United States Patent Application Publication US 2024/0301345 A1 - sequence listing, part 18

SEQ ID NO: 3110 - DNA, 82567 bp, Unknown
  R215_18m  MAG No. k141_15485
cggtcggctcccgtcataatgtgcttctactgggaccgtaatgcaatggttgtaacgctattttctcttcttgacggcaccgactatggcccatacaacggccactattaccagaataagtcccactacggcgcagataatagccgtcagcaattgcggattcggcgagaacagcgaaatcatccgatccggagatatgtacccgaaaaccagcgcgatcacgccgataatcacgcctaatagtccgaataccacagtaggcgcgctgatgctctgtttctggatgttcttggcactcttgacatccttagcattctggacgttcttggcgatcccctcagtttggcatggtttgccggcggtctgagactgctcataggaaggttgtgctgaagatgctgcgtacatcggtacatcatcggcagatggaatcggcccgccatccccctccacggcatcggcaactgtttccagggcaatccgatctgtggttggttcgatgggcgatggagaggtagctgttgcctgcgtatccacatccgagaccggcgcatccgcatgatcgtcggggacgggtagcacagccgttttgtcatcatccgctgcggatggcagcaccgtggtatcggttcggtcatcgacggtcaccatggttgtggtctcggtggtctcgtcggtttcggaaggtatggccgtggtcggtgtcgcatcctcgatggaggcgaattccttggtttcatcagtcatgattccatctcctggttgtaacggcttgatcattccgattgcccggttgtgttcttgcttgtgctgttgccgtcgtatatatcggcaagcggctggaacgtggagcctttccaatcggaggcgtacaccacgttgacgcgtgcttccactgcatagggaatattgatttttaattctgggccgttgtccggcatggcggatcccttatccaaccattcgtaatcaggcccattcatgggattggtggcgctttcagctccgaagaaaacaaagcttagacccatgtagttgttgtataccatctcgtatttgccgccgacgtcactcgaagtggagtaggagtcggcggtgccgaaggcgtaagtgcaggaatccggcagaacgatatgcacttgcgcctgtgttgtggctatggtgatggtaccgaccgggcaattactgatggaggttttgccatccagcatcttcactgtgtgcggtccatgtgtcttgtcccaatcggaccaatcaatgattgcctggtcggtgttgtagttttcaccgttgaacgccacaccttgctgcaatgtttcgaacgtggcatcgctggcatcggcaacgaagatgccatccttttgcacatcgttcatgccgtcgctgtttctcgcactgacagattggctcagtgaaacaacagtattgatgccgctggcaccaagatcacggtagtgcacgccatacgtgcctgaaacgatggtcatgcagagcgcgcatccaccggcaaccagtccgagaggaatcagaccaccggtacgccgccctctgaatccgagaatgatgaccaccagccccatcactatgcatactgcggcaatccagatggtgctcagacgcataatgccgataatgcccatgtcgtttacccaaatcagtcccatcagaccggcaaaggagaggaaggtaaggcccagtatgctcaagaccacgattgggcccgccggcttgcggcgcttggactcggtgggggcataggccgtcgcgttcatacggtcgggggcaaacggcccgttgggtactgtgccgggcatcgcgccgggcaccgcgccgggcatcacgctgggcatcgactgatagacaggctgtgaaacaggttgtgaaacactaggcgcggttcgtgaaacagattgtgaaacaggttgcggagctgaatacaaaggagatagagggaccggttgcgcggctggatatgaggcaggctgtggagctggatacgacacaggctgtgaaaccggtcgcggcgcagatgccccgaatccgtacccttcctgctggcgaatgccgcttttggccaacaaccatagcgctaaggcggcgagcgcaatacaaacccaccccgcacctggaatcacgattgccacggctaggaacaggaagcatccaagacaattccagtcccattggccggcaatgaggtcctcggccaagatgtgcccatcgcgtacatccggcatcagaaaccagccgagtgcgtacagagctgcgccaaaaccgaagaacaatgtacatacaatcaccaacgcacgtactaatgtggggctccagccaagccgtaaagcgatgccgctgcatacgccaccgatccaccggtcgtcgccgcgaaccagtccactggatcgcacccaagtgaagaagcgtcgcgatgtcttgtttttttgcggaccaggctgcggctgtggctgatacggattcgcgtttggattgctcatgattccattacaccgcccgaccactgccacaacgctcggggaacaccctgattgttccctgaacaccgggtaaaaccccggccgcaacgccctgagcgcggcacaataggagtatgacgtcatctcccgaaccattgctgcccgcgcgcatgccgctgatgcgcccccggcagggccgctggctcaccggcgtgtgcaagggcatcgccctgcacttgggcatcggcgtgacatgggttcggattgcgttcatcgctctgaccttcctctacggcgcaggcatcatcgcttatgtattcctgtgggtgttcatgcccgccggagacccggtggcggctgcggctcgcacagtgcccgttgatcaggcgccgcttgcgcgaggcaatcagccacttgccgctcatgacgacgaatcggctgccgcaccggaatcattgtccgaggccatccaacgtgctccgaaaccggccgtcgtggcattggccggtttcgcgttgatggccaccggactgctgctcaccagcaccggtgcggatgcccagattgtgcttccgctgctggtagggttgggcggcatcgcactggcatggatgaatcttagtccgcgaggcacgcagctgttgtctatgttgggcggcatcgcactgattttcatgggatgggcattgtatgtgcataatgtcagcattcccgggtggggcacctctcctcgacgcattgttgccagcggattcatgatgatcgtcggtatcgtggtggcggtgatgccgtgggcgaacgcgatgctgcaacgactcacccacgagcaggcattgaaggagcgcgaagaggagcgcgcggacatgaccgcccatctgcatgatggcgtgctgcaaacgttggcgctgattcagctgcactccgaggaaccgaccaccgtattcgccctggcgcgtagccaagagcgcgagctgcgcgaatggctgtatcaggaacgttccacatcggatcgttcggtgggagccggattgaagcagatcgccgccgaggtggaggacgagcacggcaagccgattgaggtggtcaccgtgggcgacgcgcggccgagcgcccagaccgatgcgctgctggacgccacccgtcaggcgttggtcaatgcggtcacgcatggcggcgagccggtgtctttgtattgcgaggccagcgacacgatggttgaagtgttcgtgcgcgaccatggcgaaggcttcgatatggacgccattccgcccgaccggctgggcatccgcgaatcgattatcggccgcatcaaacggcgcggcggtacagtggagatagtgtccagggccggctggggcaccgaggtcagaatgcatatgccgatcgcgctgaaagcggcgcagggagaacatcgatgagcgagaacgagacagccaagattcgtgtggccgtggtcgatgaccatgagatgttccgtgcgggcgtaatcgccacgttgcgtgattccttcgatatcgtcggccaagcggcggacgtgcccggttcggtggcgatgatcgcacagaccaagccgcaggtggtgttgctggatgtgcacgtgcccggcggtgaaggtggcggcggtgccgagatcctcgccaaatcgcggccctactcccccactaccgtgtttctggcattgtcggtttcggatgcgccgcaggatgtgggggcggtgattcgcgccggcgcccagggctatgtgaccaagacgattaccggcgctgatttgatttcatccatcaagcaggtgcatgagggctatgccgtgttctcgccaaaactggccggttttgtgctttcggcctttcagggtgtgccggcggcggggtctgatggcggcgctgatggtgcggcacgggctcatgatgaggagctggaccggctgtccgcccgcgagcaggaggtcatgcggctgatcgcacgcggatacacgtataaagaggtggcggccgaactgttcatttcgatcaagacggtcgaaacgcacgtgagctcggtgctgcgaaagcttcagctttcgaatcgcaccgagctcacccgctgggccgccgataggcgcattgtgtgataaacgacagatgagctccctcatcagagggagctcatctgctcatatcactcggcgtcgcggaaaccgttggggttcttggtctgccagttgagggaggaggcggccatgtcgtcgatggtcagctcggccttccagccaagctccttctccgccttggaagcgtcggcgtagcaggcggcgatgtcaccggggcgacgcggcttgatcgtgtacggaatcggatgaccggcggccttctcgtaagccttgatgacctcaagcacggagtagccgtggccggtacccaggttgtagacgaacacgccttccttgtcgatgtggtcaatgacggccacgtgacccttggccaggtcgaccacgtggatgtagtcacgcacaccagtgccgtcgggcgtgtcgtagtcgtcgccgtagacctggacttccttgagctcgccgaccgcgaccttggccacgtacggggtgaggttcgccggaatacccttcggatcttcgcccagcaggccggactcgtgtgcgccgaccgggttgaagtagcgtagcagcacgatggtccaggacggatcggccacatgtacgtcgcgcagaatctgctcctggaacagcttggaggtgccgtacgggttggtggtgccgccggtcggcgtctcctcggtaatcggcagttccttcggcgtgccgtacacggtggcggaggaggagaagatgatcttcttgacgttgtgcttcttcatcaccttgagcagcacaagcgtggagtacaggttgttgtcgtagtattcgatcggcttggccacggactcgcccacggccttgagaccggcgaagtgaatgacccaatcgatgttgttttcggtgaagacgcgttccataagcgcctcatcgcgcacgtcaccgtcgtaacgcttgaccggcttgccggtgatctgctcgacgcgctcaagcgccacgggagacgagttgccgtagttatctacggaaataacgtcgtagcccttgtcgagcagttcgatgtcggtgtgggtggcgatgaatccagcaccgcccgtaaccagaacagtagtcatatctcctcctttggaaggacttgccttcggttttccttcagtattgagcttacttcacttgacctgtttcacctagcggcaaaaccaagactttcgaggaatgtttgcgtggtggctttctgcttgaagacggccgtgttgccgaggatgcggtagcagacgctgccgagctcgtcacgtacggcttggtggatggcctcgcggtcgcggtttccggccaatgtttcagcgagttcgccccattcgagactgaattcgctgacttcatcgggcaaatcgcggccttcggcgagcgcctcctcgacgatgccgagctggtcgacgagccgtccgggcaggatgaacaggccttgggcttcgatcagtccaatcggctcctgcttgaccggccagtattcggggtgtgcatggaaaataccttccgggtactcgtcgctgatcgcattgttgcggaagatgagactcatctcatagccacgttcggtgatgatcgcgctgggcgagagggcggattggcggttgccgtccgcgtcatggctggcgatgccgttcgccgcgtcgtcataaccgacccatgcctcgcggatgatgtcggatacgtcgatgatgctctggcggtttttcgacaccacacgcacggcggtaccgggccagtcgaggatttcgaccacggcgtccggatagtcggcgagcgtgaaggcggcccaagtggcggccttgtgcatcggcagcagttcgccgccgccctggtagtggtcgtgggcgagcaccgagccgccgatgcgaggcagcgcggcgttgcatccgaggaagtatccggggaagcggtccacgaagtcgagcagatggccgaaggtgtcgcggtccacatgcatcggcgtgtggtcggtgttcacgcagatgccgtgctggtcgaagtagccgtagggcgagaactgccagaaccatgactcaccgccgagcgtgaccggcagggtgcgcagcgtgcgcttgtcacgtccggcgaagccctcgttctcatggcagatcgtgcacttcgggtagccgccggacacggcgttgccggccgccgccttcttcatgttcttgaattcgggtttggcgaggttgatggtcaccgtcagcccgtgcgagtcgaagcgcgggttccggtcgagctgggcacgcttgacataattgttggccacacagtagtcgtagaaccattgcatggcggccatgccgccgtccctgtgctcgatgagcaggaaccggtcgtcgagatcggcggggttggcggagaggatgcccatgatggtgtcggcgtaggccgggccttcctccggatcgaagaggccggcggttgtggcggcggcgcggaaggcggcgagtagggggtcgggggtcttttcgtcagagggggcctggcttcggctgccgacaatgtcttggactgcgtctgacactgacgccgccgacgttgtggttttgggtccggggtaggaatccaggtggaagagggcgaagatttggttgcgggtccagtctgcgttgcgtggatcgaggtcgagatgatccaaggcgtaatcgactagggcgtcgatgctggcgtatacctcggtcagctgatcgctcattgctcggcccccatcatgctggttcgggtatggttcgactgacggctcacttggcagcctccatgatgtcggctacgatggcgtgggtttcactggccttctgctccatctcctgcacgagtttgatctgggtgcgggtgcgcaccagattgtgctcggggtacttggtggcaaagtagatatcgccttccaagtagtcggcgagaaagcgcatgccgcattccatggtgagcaggttgccgctgaacggcagcagttcggcctcgcgcgcggtgatgctgccacgtagttcgcccacgaatccttccgtgtaggcacggaacagctcggtgctgaaatgcaccttgctgaggtccttttcgtcttccagagcagtggacgcaccaaagcgtatggaatcgccgaagtcgaacagcatggagccgggcatgatggtgtcgagatcgatgatcgcacgcgccttgccggtggtggcgtccatgaggatgttgttgagcttggtgtcgttgtgggtcacgcgcaacggaatcgaaccgtccctgagcccatccatcacgacggcatactggtcggcgtggctcagatagaagtcgatttccggctggcatgcggcggcgcggccgagcttgtccgcggcgagggcggccttgaagtcctcgaaacgatgcggggtgtcgtggaagcgggcgatggtttcggtcagctggctggcgtcgaattcggacaggaagttctggaagtcgccgaatgcgctgccggcctcgcggaacacgtccgggttcggcacgaggttgtacgacacggtgtgttcgatgaacttgtagacgcgccatgcgccgccatcgatctcggcccaggtggcgccggaggtggtgggcacaatgtccagcgtctctttgccctgagccttgagagtggaggtgaccagttcgacattgcgcatcagattcaccgtatcggggaagatgctggtgttcatctgttggaggatgtagcgggggccgtccgtggtcaccagataggtggtgttgatatggccgtctccgtaaggttcgatgccggtcacggcaccttccagcgcaaaatgcgaggcgatgccgaataaaacttcattgctttcggtcatgatgggtccgttctccaaaacgcgggaatcaggcttcacgccatgcgatgccgctgtcgggcaggtcgaagtcctcggtggtgccatcggccagagtcaccgtggtccgctgcggctgatcggtgttgttgattacgcagtacaacccttgctcggggaagtgcgccacctcgcactccgggttggacgagctccaagccgcatacttgtcttcgttgtgggaggcgtagaacagcacgcgttccagcagtcgggcgttggccgccgaatagggcagaccggagatgtacacaccgcggccttcgccataatcattggtcgcgagctgcacctgcccgccgtccgcgcgcagcagggtcacgttttcattgaccggatacgtgttgagcacgggttcgccgaagtcgatgccgcccaacggcttgatggactggccaccgccgcaaccgctcagcgggatgcggtagccggcctgttcccaagcctcgcgggccgccgggtcgaccggcacatcggcggtgatgaagtggtccggcaccaccggtgggaagtacttgtccacggagagggtctgatagcgctcctcgtccacgccaatcacgtcggccagctggaagaaccggcccgcttggaagcgcggtgccgagctcggctcgcccacgcccacgaacgcgccgccaccacgcacccaggcgcgcacggtttccacgagcttcgggttggtccacacgtcgccgccggtgaatgcggtgtcgaccgggccgccgttgatgattacgtcgatatcactatcgatgccatgcgcgagtacgtcgtcgaagctgatgaaccgcacgttcacgcgcatgccggacagggattccagaatgccgtagtaggagtaggtctgcttgttgggcagggcgtgtgccacggtgaacgccatccaggaacgcatcttgccccaggaattcagaatcgccacgttgagctcgccttcggcggccaccccaccggtgcggtcgtggatgtcgcggaattcgtcggcgatatgggtcaccgtgtccacgaacttcgggaacttggcggccaaggagaggtagccaccgtagcccatacggccgatcggcgaacgcaggatcgcgcggcgggccttacgccagttgtcgaggccttcgatgctcgggtcgttgccctcgtagaacgtgtcggggaagaagtacggcaggaagcgtccttccgtgtatttgacgcccggaatgtccgcgatcatgcgggtggtggtgccgtctccgatggagccgacgaccgcatccaaacccagcttttcgaacccatccttatacggttcggtaccgatccactggtcgccaaggaacatcatggcttccttgcctgccgcgtgcgacatgtcggcaagccgcttgacgttctcgcgcacgaatccggagaggaagtcaatccagtcgcgttgcgccttgcggggcacgcgccacgcggagttgtaggcaccgccatccacgaaatcctccggacgcagacggtaaccgtactccttctcgaaatcgtccaatgcgcgcgggctcacggtgcaggcgcaaccgaaccagtcgaccaccttttcgcgacgcttggcatcgaacaggagcgtgaactggtagaagaacgtggtgaaacgcaccacatccacctgcgggctgtccttcagccactgctcgaacgtatcgaacacgaacttgcgggtggccggatggtagatgtcgaacggaatctcgtgttccttgtctccccaatcattggtcaggtggttgtacatctcgaccgggtcccagatgatgtaggccaggaaactcaccgtgtattcgtgcatcggcacggcagcggtcacgtgcacggtgtcctcgcccgggtcgagcgtccagccggacgggtccacgacctcgcccgtggtgcggtccacgacttcccagtacttatgagggtcggcgtcacggttaggcttgagctgttcctcgaagaaaccgtccatcagcggcacatccaccgcgttggactcggccaggatacgggcggtcagcaggtagacctgcggggtctcgtccatgtgcagggtgatccactcgttgtgggcgcgggtcgggaagtaggcgctgtagattttcttgccaagagcgagcactgcctcgtccagatgcgtgccgtcggagttgcggatggcgtccgcaccccacaattcggcgagttccttggtcttttcggcaaaattctcttcactgggcagcgtgaagcggccggtgctggtcatgagtgctcctttgtggggttggtcatcaaaaaactacaaagcgacgaattcgtcgcatacaaaatgaccggcgtcatcgcgggccctgggaccctgactgcgtagatccttgacgcttacggtgacgccggacgattggaatcgtgtcactgaatatgggagggacgttgcccggcaccggaaggagtgacacgacatgccgggcagcggattggttagcccttgacggcaccggcggcgaggccggactgccagtagcgctggaggccgaggaacagcacgatcacgggcagcacgccgagcaacgcacccatcatcagggcgccgcgatcggtgaacgtggccagcgagaccatgccgtacagaccgagggtcacgggcttcaaggtgtcggaagacaccatcatcaacggcagcaggaagttgttccacgtggccacgaacaggaacaggaaaatcgtcaccatggccggggccaggagcctcagcacgatggtgaagaagatcctcgcctcgctcgcgccgtcgatgcgggcggcttcaagcagttcgtccggcaccgaactctgtgcgtacgtgcggcccaggaagaagccgaacggcgaaacgcagcacgggatgatgatcgagagcatagtgttggtcaggtgcaacgtgtggaagatcgagtacatcgggatggtcagcaaggcggacggcatgagcatgcaggccataatgatgccgatggccgcgttcttgccgcggaagttgaattttgcggtggcgtagccagccatcacagacacgatggtgccgatcaatgccgagacacccgagtagatcagggagttcagcacccagcgccagaagttgccacgagtccagccaagcagcttggaatagttagtggcgatggcattgggcagctggtcaagcggcacagcaaaccacatgccgttgctaccggtcatctgggccggcgtcttggtggacgcgatgatggcccagtaaatcgggaacaggaagtagatcaacaccagtaccagcagcaccacggtgagggtcttcacggccgcggacggtcgcatggagcgaggcaaatcgtgttgcgcagcctgacgctgcttttcgagcttgcgctcggcctttttgcgggcgcgttcttcaacggttgcggagctcattactcgttcaccttcctttcggccaaggtgtacagcacggcaagcacacctgcgatcagagccatgacaatggcgatggccgaggccggaccgtcaccagacggggtaatggtgccctgagaagtgttcatggccatcatcatcggtgtatacgacttggaaatacccggatcagccgtagacatgatctgcggttcgttgaacagctgaatggtgccgacgatggaaagcagcatggccagcagggccgcgccacgcacgttcggcaacttgatcttcgtggcaatctgccaaccattggcgccgtcgatacgggcggcctcatagaggtcatgcgggatggcctgcagtgcggcaaggaaaatcagcatgttgtagccggtgaaggtccatgtggtgatgttggccatcgagccgagcacgatgttcttgttgaagaagtccacattgacgccgatggcggcaagtcccttgacgatcggcgagatttggccgttgtacaggtagacccagataatcgaggccacgacgccggggatggcgtagggcaggaagtagcccagacggaaaccggtgacatgcttgaccacgaacgagtcgatgacgatggccaacgccagtgcggcgatgatcatgatcggcacctgaatcagggtgtagagcagcaccctgccgacgccggaccagaagttgccggaagtaatagcatactggaagttctggaatcctacgaatttattgaccagctcgccaccgccgtatgcgccaccgccctcggtgacctgacggaagaagctggaatagatggcccagatgatgggcaagatgaacacgaaagtgaacaggacggcgaacggtgccatgaacgcccagccggtgcggttctcgcgcttctgagcgccggaccgcttcggcttggcggcggcacgcctaggtgctttgcccttcgcctgagtagtggatgcagtcataatacaaaacctgtcttcgcaaagaacagtaaaacaaatgacaagggccacagcgcccctgcagcaatacccccaaacaatacggaaggccggagtatgtgccccggcctttcgctatggtgatgcgaggcatcggaggtcttggacggccggctatttcaagccggcccgttgacaagacctagtgaggtcactccttgacggacagaccgaggttcttcagcgtatccaccgaggtcttctgagcggtgtcgaacacatccgaaaccttggcagaaccatcggcagccttggcggcggtctgtttcattgcagcgccgactgcggagaagccaggcatgtaggtgaagtcacccatgttgtcgttcgcggtcttgaactcagccatgacatcctgtccgctgaagtagtcggaccacttctgcggggtcttggcatccgcggtggtggcggccacgacaaggccctgggagacaaggtcatcaacctgggtgttgaaccagtcaaggaactccatggcttcggccgggtgcttggaacccttgagcacggccacaccggaaccaccatcggcaccggtcttggtgccattgccgaaccagtcaccgagctgggtgaccttccactcaccagcaccagtgccaccggcggaatcgatgaacagtggggcttcccaagcggcggccacggtgccgatcagctgaccggactggatggagttatcaaacgatgcatcccaacgcgggttggtgagggcggccttgttgtcgatcagctgctggtagacatcggccacggccttggagcccttagtctgggtgttgacaacccaggagttgccgtcgaccttgtaccacggaccggaagcgccggcctggccggacatcatcatcatggcctcatcaggttggaaggtcatgatgtacttgccttgggcagcggtcttcttggcggtctcaatgagctcgtcagcggtcttcggcacggtgatgccgagcttctcaaattcagcggcgttgtagaagtaagtcagcgggccggtgtcctgcggcagaccgtaggtcttgccgtccacctgcatcagtgcgaacgggccggaagcgaaatcgtccttgtacttggcggcctcatcggtgacatcctgcagaaggcccttggtgaagacctcaggaacctcggagtaaccgacctgagccagatccggcgcattgccagccttgacgtcggtctcgagcttcttgatcatgtcggcggcattgccatcgaacttggtggccttgacctgaatgttcgggtgctccttgttccacttggccacaatgtcgttgaccaaggtcatgccttcggaatcgggcagacgatgcatataggtgatgttgaccacaccgccatcgctgccggacttcgtgtcgccggcagtgtcgctgccgccgcaaccggccaaaccaatacccattgctgctaccgcggcaagagcagccacgatgcgcttgttgtgcgataccatatctctactccttcctagtgaaatcatcacctcagcgtgatgactgattgctaatttaggcctttgctcttttattgtcaacttagctaacaattaccgcgcgtcccgttgaggtgagtggcattaaaccgattcgatgctcgattgtgcgggtttgttcatttcattaactccccttacaaagcaacgtacttttggtccaccggtagacctaatgagatattggatagcggcaacaatccaagacgttagcttgcaatcgtccaccacaaattgcaagcacttgccaacattatcggttttcaggttgccggcgcgatacccgactaggggggcaccgcgccttaatgagacgctacacgagcagcctcagcaactggtagagctgccacaggctacgcacgttgaagcgcgtgccgtcaaccgtggcgttcgcctcgccatcgcccacatggacgatcacggtgcgcccgttcacggtcagactaccgtgcatcgtgatatgattcatcttgcaaccttgttgattaaaggcgcaagccggtaatcaacgcaaaggcccgatgccgcaaacgtcgggccttttcttatcggctcacgccgattggcccgtcatatcaacggggacaccgcatgttacggcatcacaaaccaatatatcagcaccccggtggcgatcaagaagacaggttccagaaaacgaaaaagggcctgggcatgttgcccaggcctcggttcgcggacagggcgagattcgaactcgcggagggttgcccctcaacggttttcaagaccgtctctttaggccgctcagacacctgtcctgatgcgcgttcacacgcgcaagtattcattatacagaagggagggatgttgatattcggcagtgcggtcggtcttggattcgcctgctggctattagcgatctctccctcagtcagctacgctgacagctcccccattaaagggagctaaagcacgatgagactcaggcctcccacttagtgggctcgatgacttccttgccgcccatgtaggcgcgcatggcctgcggaatctcgatggagccgtccttctgctggtggttctccatgatggcgaccagccaacgggtggtggccagcgtgccgttgagcgtggagaccggacgggtgccgccatcttccatacgctcgcggatgttcagacggcgagcctggtactcggtgcagttcgaggtggaggtgagctcgcggtagcggccctgggtcgggacccaggcctcgcagtcgaacttgcgggcggcggaggagccgaggtcgccggctgcggtgtcgatgatgcggtagggcacttcgaccttggcgagcatctcctgctccatggccagcaggtgctcgtgctccttgtaggagtcctcctgcttggcgtagacgaacatctccaccttgtcgaactggtggacgcggatgatgccggaagtgtccttgcctgcggcgccggcctcgcggcggtagcaggaggaccaaccgcagtagcgcagcgggccgttgccgaggtcgaggatctcgttctcgtgcatgccggcgagcgccacttcggaagtgccgaccaggtactggtcgtcgggctcgcgcagacggtagatctcgtcggcgtgggagttcaggaagccggtgccgcgcatgacctcggggcgcaccagcgtcggggtgatggccagcgtgaagccgtgctcctcggcctggtccacggccatggtgagcatggcgatctgcatacgggccacctggccacgcaggaagtagaagcgggagccgccgaccttgacgccgcggcgcatgtcgatgccggccacgccggtgccgagggtcaggtggtccttgggctcgaagccttcggccgcgaagtcgcgaatctggccgaccttcttgacgaccacgtagtcgtcctcgccgccttcgggagcttcgggctccacgatgttggagagcttccacatggcggtggtgtattcctcggcggcggaatcggccttggacttgtattcggagaccttctgggacagttccttggtctcggcgatgagcttggccttctcgtccgccggggcggaggcgaccttcttgccgatttccttctgctgggcgcgagcctcttcgaaggccttcagcgcctcacgacgtgcggtgtcggaggagagcacttcgtcgacgagttccacggactcgccgcgcttgcgctgggattccttgacgatatcggtgtgttcacggatgaattgaatatcaagcatgggcaccagactagccgcgtaagcagacaccgacaatggccgaatgcgcgggagtcacgcggaaatcacagggaagcccgggaaagtccgcggacgggtccacccggccaatttcgtcagatgagacgcgattgaaccataatcgcgccccacggggctgttgcgtgcaggaaatgttcacgtacggcgcaccatggccgcaaacggcctccccaccgataacaataggagccatgcctcagcctgccctcaccgtgtttctgatcatcgccgcaatcgccattgtggtggtgctcatcgccgtcatcgtcatcgccctgcgcgcgcagcgccgccgcaagctggctcagacgctggagaagcgccgggacgacgaggtgcagtacgccttcatcgtgaatccgtccaaaccgcaggccgaagcccgccggctgcatatccagaggttctgcgaggccaaggggctcaatcgcatccgcttctacgacacccagcttgacaaggacggcagggtctgcgcgcttgaggcgctggaggacggcgccgacgtggtgatcgcggtcggcggcgacggcacggtgcgcacggtggcgagcgctgtctccggcaccggccatgcgctgggcatcatccccatcggcaccggcaacctgtttgcccgcaatatgggcgttcccgtggacgatatcgacgccgcgctgaccgtggccacctcccacggctcccgcctggtggacatgggccgtctcaccctgctcgaccacccggaggacgaccacggccacgccttcctcatcatcgccggcatcggcttcgatgcggccatgatcgacgacaccaaccccgagctcaaggcgaacatcagctggctcgcctacttcgtgggcggcgtgaagaacctgttcgcgccgaagttccgcggcacgctgacagtcaccagcgccgacggctcgacccacaccatcaagaatctcgatttccgcacggtgatggccggcaactgcggccagattcccatgttctcgctgatgccggcggcatcctatgacgatggtctgctggacttcgaaatcatcgacaccaccggcggcatcctcggctgggccaacctgttcggcgacgtggtgcaccagacgatcatcggcaagcccgaacagaacccgctgtccacgaactcgaccatcgaacaggtccagggtgtcagtgccgaaatcacattggaaaagccggccaaagcgcaggtggacggtgacatgctgccggaaacccgccacatccgtttctcggtggatcaccgcgcgctgatcgtgcgcgtgcccgacgcctccgcgctggaaaagaccgcgcaggccgctgcttcaaatgccacctcgaatttcgccgaaatgaccggtacactcgagccgattcgctgattcgccaatccgctaatccgttactacgatgcgtggccggtgactcgggcgacatgcatcgccaaataagcgatttcgtcgtcgctgatatccgtgtcgaggcgcagttcgagcagggaggcgatggttcgcgcgcatcgcagcgcagcggggtaggactcacgaatcaccttcatcaccggtgccggctcgtccgtcagttgctggtgctggtggatgcgtacgaacaggtagcgcaggtgggtgatgaaccggcccacgttcacggaactgcggtccaacgtgatgccgtagctgtggtcgatgatgtcaagcagttgctggatcacgcccgtcatcgtgtacgtataggacaggtcgccggtggcgaagccggcgttgaccagatgcatggcaagcgcggtggcctcgccgtccggcagcgtgacgtcgagccgtgcattgagcgatgcgagcatcgcacgcccctgcgcgtattcctgcgggtacaggttgctcacctcgccgagcagcgggtaggtgatgtcgatgccgcgccgcacccgctccaccgcattcgccacgtggtccgacagggccatgaccagcgtggtgctgccggtctcgcgctcccccagtccggtctcctgcatggattcgacgaccacgcggatgatttcgggcggaatgtccgccagcatctgcgccagatggtcagggtcgcgcccgtccgatggcacgaaggtgcgcacaactttcgactcgtcgaccgtctgccccggcttggcctggaaccccagtccgcggccggtgagaatcacctcaccgccgtcgccgcctttggcgagcacgacgttgttgttgaacactcgcagtatttccatggcatcctttcgcaacgtcattgttccacatcgatgatcgggctgccggctgatacggttttgcagtcgccgccgttgtcgtcgctgctaccgtcgccgatcaacggcgtgaccacggtcagttcagcggcgttgaccaccgtcaccaccaccacaacgctgtgcccggccgccgcgactttgccgaaatccacggtggccagtggctctcccgccgcgatccgctcgcctttgcccacggccacgacgaatccctcgccatccatattgacggtgtcaatgccgacatgaaccagcacttcgatgccgtcatcggttttaatgccgaaggcatggccggtccgggccacggttttcagcgtgccactgaccggtgctagcacggccgtctcgccggccgtctccggcacgacgcctacaccctcccccagcgcgcgggaggcgaacaccggatcgccagtcgcttccagattcatcaaccggccggcgaccggcgacaggatggcgttggagtcaggagtccgatcggaggcaggccgcgatggggaatcttccgcagactccgcatccgacgatgtcgcgccaatccctctcaccgcatcctgcgagcgtacgttctcgcccgccgagaccatctgcgcctccgtggcgcgcggcggcgtacggtacccgaacagcaccgtcagcaccatcgccattacaaacgcaacggcgatggacagcgcgtacacccacattctgtcaaacaccggaatcgtcagcaacgaggagaaggcgaacgccgtggtcgtgacgccccggaccatctgaccggatggcagcacggacgggaacagccagccaagcaccgcgctggtcacgccgccggccgcgcagccggcgagcagccagcggtagacgcggcggtgatgcagatggatgccgtacaggctcagttccgaaacgccactcagcaatcccgcgagcaacgcccccaccgcggtctgccgcatggccgaatccttgccgcgtacggccagcacgagcacgccagcggtggcaccgaagcaggcaaagttccatacacccatcggaccttggacgaaatcgtagccgagcgcctgaatgttcatcagcatcagggcattcaacggccagtgcagaccgagcggcacgagaaacgggtagagcatcgggatgatgagcgcgaataggaacggcacgtgcgcgttaagccatgctgtggccgctcccagcccaccgccgagccatattcccagaggcccgatgaccagtatggtgagcgcaaaaacgacgaccagtgagaggaatggcacgaacaccagctgtacgctgtcgggaatgacgcgcttcaacccgtggtagaccacggcgagcacgacagccatgagcaacggcacgaagacgttgccgccgtagtcgttgagttgaatcggtatgccgaacgccgacacggtgcaggtttcggcgccgaatacggcgttggccgagcattgaatcgccccggagagggcgctggatacggacgtcccggacattccggacattccggacatcacgccagtaaactgcggggtcatcagcgcggccataatcgcgccgccgagccaggggtcgacgtccagtttcttggccgcattgtaggcgatcataatcggcagaacggtgaacacaccctcccaaatcgccttgagtagtatccagccggcggaggtctcgccgtcaggcacgatgccgagtgcaacgatcacgttgacgatggcgatgaccagcgaggcaccgagcagtacacccagaatcgggcggaacgagtcagacaggtagtcgaaaaacgcggcagcccaagcgcgggcggcactgccccactcgcggacggtacgaggcgtgaagtgacgggatgtattggatgggccgcaactttgttcggcgtcggtggcagtatcgcgcgatggtgcggcatcgtcggaaaggtacggcgcggactgcgcgggttgcgtgggctgtgtggattgcgctgactgcgcgggctgcgctggctgagtgggttgcgttgactgagtgggttgcgttgactgcgacgctgactgcatcactgccgatggcaattgcgctgccggcatcaatcgcgccgtccgcagccgaacgatctgctcgtacaccgaggcgaccgctccgccgatgatgacctgataacgattgccggctcgcgggaatgcaccgaggactccggggatggattcaagaccgtgctggttgacatggccggcatcggccagttcgaagtgcagtcgcgtggcgcaatgggtcaggctggtaatgttcgcggggccgccgacggcatcgacgatgcgcgccgcaatcactgcaggcgttgcgttcgatgcgttcgccacggttcctccttgctgccgtatgccactgtgttccattatcggcgctgggtgccccaaaagcacggcaatgccggcaaagcatcgcgaaacggcaactatgcgctacggtgctccgcgatggtgtcccgccataatgttccgcgatgatgcttcgccacacccgttctccgtatttgccgcagcgcccattccgacatcattccaccatgcagaatcctgcaatcgttgtcaaaaatcatcgttttttgctgcctattcggagtgtcgcgactgcggaagtcgtattctatctttcacacacgttgcgtagcagggttgttactcaaaacgaggcaagacctggagcgacgtggaatttgcgtatcgtaatatgcgaattccacgttgttccaggtctttttttgttttcgggcgacttcagacaatcgaagcctgaccttgcacgcggcagaggggccacgcaacaggcgcggtccgtcaacggcgaaaggacaaggcaatgacgacgacaacggcatcacccgtatcgaaacagacggcatccgcggcgcaggaaaccagcgcaaccggtgcggcggccaccgcaatcgaaaccatcgaaaccggcgtggccggagtggcgggcgcggccacaaacgcggcagccaacgcaatcgaggacctcgaagccgccgaatcgcacggcttctccacgcgcttcccgctcaacagcgcattcatcttcaccttcggcgcgctcggcggcatgctgttcggtttcgacaccggcatcatctccggcgcctccccgcttatcgaatcggacttcggcctgagcgtctctcagaccggcttcatcacctcctcggtgctgatcggctcgtgcgcaggcgcgctgtcgatcggcgcactgtctgaccggttcggccgcaagaagctgctcatcgtctccgcgctgctgttcctgctcggctcaggcctgtgcgcctcctccaccggattcgcgatgatggtgtgcgcccgcatcatcctgggtctcgccgtcggcgcggcctccgccctgaccccggcgtacttggccgaactggcgccgaaggagcgtcgcggctcactgtccacgctgttccagctcatggtcaccttcggcattctgctggcctacgcctccaacctcggattcctgaaccacaacctcttcggcatccgcgactggcgctggatgctcggttcggcgctggtgccggccgccttgttgctgctcggcggcctgttgctgcccgaatccccgcgttatctggtgaacaagggcgacacccgcaacgccttcaaagtgcttacgctgattcgcaaggacgtggatcagacccaggtgcagattgagctggacgaaatcaaggccgtggccgcacaggacaccaagggtggtgtgcgcgaactgttccgtatcgctcgtccggcgctggtggccgccatcggtatcatgctgttccagcagctcgtgggcatcaactcggtgatctacttcctgccgcaggtgttcatcaagggcttcggcttccctgaaggcgacgcgatctgggtgtcggtgggcatcggcgtggtgaacttcgtgagcaccatcgtggccacgcttatcatggatcgtttcccgcgcaagggcatgctgatcttcggttccatcgtgatgaccgtttcgctcgcggtgctcgccgtgatgaacttcgtgggcgacgtggccgtgctggcagtgccgacgatgattctcatcgctttctatatcctcggctttgcggtctcgtggggcccgatcgcctgggtgcttatcggcgagatcttcccgctgagcgtgcgcggcatcggctcatccttcggctcggcggcgaactggctgggcaacttcatcgtctcccagttcttcctcgtgctgctcgatgcgttcggcaacaatgtgggcggcccgttcgcgattttcggcgtgttctcggccctgtccatcccgttcgtgctgcgcttggtgcccgagaccaagggcaagtcgctggaggaaatcgagaaggaaatgaccaagcgctagacaaccggcacacgattcgcacaaaagttgacaactcttaacataagagtacccaaagtggcgaaaaacgtggcagaatagggaacatggtagcaaacaatgcgggtcagcccgccaccccagcagatctgattaatgtcgatgaggttatcggcaagtactatgacctcgtccccgatcccgaagtccccgagcagcgtgtcatcttcggcacctccggtcaccgcggatcgtccctgaagacctcgttcaacgaggcccacatcatcgccatctcccaggccatcgccgaataccgcaagaaggccggcgtcaccggcccgctgtacctcggctccgacacccacgcgctgtccggcccggccaagaagaccgccatcgaggtgctcgtcgccaacggcgtgcacgtgcgcgtcgactcccgtgacgacttcgtgcccaccccggtggtctcccaggccatcctgacccacaaccgtgcggtcgacggcacccagcgcttcgagggcgagggcctcgccgacggcatcgtcgtcacgccgtcccacaacccgcccaccgacggtggctttaagtacgaccccgtcaccggcggcccggccccggccgagaccaccaacgccatcgccgctcgcgccaacgagctgctcggcgacttcaagtccatcaagcgtgtgccctacgaggaggccatcaagtccgagtacgtcgagggcttcgacttccgcgagcactacgtggacgacctggagaacgtcatcgacttcgacgtgatccgcaactccggcgtgcgtctgggcatcgatccgctcggcggcgcttccgtgaactactggccgctcatcaacgagaagtacggcctgaacatcggcgtggtgcgtcctgaggtcgacccgacctggcgcttcatgaccatcgaccacgacggcaagattcgcatggacccgtcttccccgtacgccatgaagggcctggtcgacgagctcaacgccggcgcttgggacaagtacgatctggtcggcggcaccgacccggacgccgaccgtcacggcatcgtctgcccgaactggggcgtgatgaacccgaaccactacatcgccgtgtgcgtggagtacctgttcggcggcaaccgtccgggctggcctgagggcgcagccgtgggcaagacgctggtctcctcttccctgatcgaccgcgtggccgcatcgatcaacgcgaaggtcatcgaagtgccggtgggcttcaagtggttcgtggacccgctgttcagcggcgaagtcgccttcggcggcgaggagagctccggcatgagcttcctgcgcaaggatggccgcgtgtggaccaccgataaggatggtctgatccccgacctgctggccgccgagatcactgccaagaccggcaagaacccggcccagcttcaccaggagcaggtcgagcgcttcggcgagtcttggtacaagcgcgtcgacaccccgaccacactggagcagaaggccaagttcgccaagctgaccggtgatgatgtggccgccacgcagctggctggcgaagacatcaccgccaagctgaccgaggcaccgggcaaccacgccaagatcggcggtctgaaggtcaccaccaaggacaactggttcgccgcccgcccctccggcaccgagaacatctacaaggtgtacgccgagtccttcgtctcccccgaggctctggacaaggtactcgacgaggccaccgtcgtggtcgacaaggccctgagcgagtgaaatcgctgcgttagtcgcgttcaccgcaaccaataaggctctgcattggattcatgcaatccactgcagagctttttttagcgcatatgcagttcgcgaccactgaaacacgcaggtcaacggttctcctcatgcaccgtgactgcattttctcaacatcactgcagagcaggacggccagatgaccgcgaaacgttcgcctgcctaccatcatcattgtggggtcacagcggccagatgaccgccgaagcgttcggtcggcttgcatcatggtcgagttttaacatcgttgtgggacgccacgacgaatttgcccattccagagctgccatcccacaaaagcgtgggacaacagctaagtcaatcgttttacatttcccccatcccacacactcaaactggaaaccccggaaagacgccattcctgccacacccgtcacagccattacccgaggggccgtgggacgccacgcaaaaatcggcaaaacatgcgtagcgtcccacacccattggcgcaaatccacgctcaatgcaccgacaacacccccaatcgaccactatgacacatttccctccacaatcgaacactagtcattcacgaaatccatcactacgaggcatcgcaatcgaacggcatgcaatatcaagcacacaccacaacaacaggtcgtacaaatattgcctttacatcagtccgtttcgaacatcatggtcacagcaggctctgcgccaactcttcaagagacatggcaactacatgaaactcgaatacggcaccgcgcgaagcaagcgccctcgccacgttgaaagcgaattcagcacgagcgtcctcgttagcgatacttgccgccgtggcgacgaagaccagccatctccgcccgaccagcacaccccttttctcttggtcacggcgccattgagccttactcgtacgatgatgatcgccatcatattcaacagcgaccttgaactctggccacgctaagtccaacgttatgggagctccagatgcaaaagccgcgtccggcaccacatagttcgcaaccggctgtggaatcccatgcgctaccagagagagtcgttcttctgattctttgggcgaatcagcaccaggtgatatcagagacaatgctcgaacgcaggacgggcgccctctgaatcgggtaaattgctccacgaacttcaccagatcctgatagattgcagcagcatcacgatccttagccaatactggctgtttgctcgtagcagtgatgacggcatccccgagcacaatcagagactcaaaagaaacatacggggcaagttgggcccatacgtgaaacaggtccagcgcaaacacgtgttggttcatttccacattggcggctttagccgcatgtttccaaatatgcgtttgcagtggtgcatggcgtgtacggaaccgcttgctcttaacgctggatacagtgtgcagcttggccgagtcgaggtcgcaatcggcgggaatcggtacggattgcagagcgagggaagtggtcatgccgaaaagcagcttcttgcccgcccgtttcgcttcctcagtgcagcgtgcgaccatgtcgcgtctgcgctgggcgaggctttcgctcatggtcggtgtcgctgcagaatcatgtgcaccactgttcggcgatgacgagtcgcgagaagtcgggtatttcgagtcagtagaaaatgaccccgcaaattcgggcggaacaaaaactgcctccgattcttccggaggctgatcgtatatagagcctggcagagctccatagttggtgatgccgtcggtcatcctgttcatgacaccaccatatgggtagtgggtgcggaaacggaagccgatccgaggtatgtggtcctagcttcacttacgcacattcattgtggataaccatgtggacacctcacttatacacatagtcatccacctcttcaaccccgatttgacacactaactgtatctgatatgattacagtatcataactgtacacatcatagttacagtatcgactcggtaaggaggtcgtttcatgaacggcgaccattcactggcagtgcacgcattggtctaccttgaccatcgcgccacacacctgcccagtcagatcctggccgagaacatatgtaccaatgcggcgcgcgtgcgcaaagtaatgcgaccgctcgcctcagccggactcatcgccactaaagagggtgctgaaggcgggtacgctctggcccggcccgccgccgaaatcactttgcgcgcggtagcggaagccaccggcaccacttttgtgaaagtgaactggacaccgggcgacgtacacgaggactgtctggtgtcatcttcaatgggcgcagtgatgaacgacatctatgccgggctcaaccgcacttgcctcgaacaactcgaacacaccaccatccacgacatcaccgaacagatattcagcgagcgcaaaggctaataatcccgcgcgtttcccctagccagcatcagtcgataacgcttcggcagtcaaagaagaaaacagacgccgcacggcacacaacacatcagcacaacgcactcttatcactcgaatacgtaaggaagtaaccatgtccatcagcacacccaatgccatcagcacacccagcacctcccccactatcaccaccgacgccctgatcattggattcggcaagggcggcaaaaccttggctgccaagctcagtgcagccggccgcaaggtcgtcgtcgccgaggcaagcgccgacatgtacggcggcacctgcatcaatatcggatgcttgccgtccaagtcactgattttgtccgccgaacaggcgcggcgggatggcgcgaacagtactcccgaaacccgcgaagcagcgttcgaggctgctatcaaggagaagcgccgcgtcacttcgatgctgcgcgacaagaactatcacaagctcgccgaccaagacaacatcaccgtaatcaccggccgcgctcacttcaccggccctcatagcgtggaaatcgccaccgctgagggcccggtcgccgtgaccgccagcaagatcttcatcaataccggtgccacgccgcgcattccggatattcccggtatccacactacgcccggcgtctacaccagcactggactgatggatctcgacgatatgccgcagcgactggtgattatcggttcaggattcattggacttgagtttgcctcgatgtttgccgatttcggcacggcggttaccgtgctgcagcacaatgccgagttcctgccgcgcgaggatgcggatgtggcggccgcgattcgcacacagttggaagcgcagggcgtcaagttcctgttcaacgcggataccaaggccatcgcgcctgctgctgacggcggcgtcaggttgtccgttgcggtgaagggtatgactcgcggcgcatcgcaagcttgcgattccacccccgccggcaccgggaacgctcataccgatatcaccggtgccaccgacgccaccggcgccaccgacactacaacaaccaccagccccactagcaacccgaccgatcacgccacgatgtcacacgttcaaacgaaaccatcagacgatggcgagccgcggttcgccgagccggctgaagcccgattctgcctgaccaccgacgcggtactggtggccaccgggcgtacgccgaacgtcgagggactgcatcttgaggcagctggcgtggagctcaccgaacgcggtgccgtgaaagtcgatgagcttctgcgcaccacagcagccgacatttgggctctgggcgatgtgaacggcggcccgcagcacacgtacatttcgctggatgactatcgcgtggtgtggtcgcagctcaatggttccgaccgtccgtacacggtgaaggaccgcaagcatgtgccgtcgagcacattcctcgccacgccttactcgcgcgtgggattgaatgagcgcgaggcgaaggcggctggattggattatgtggtcaagcgattgccggtggccgctgtgccgaaggcccaggtaatgcggcgaccggatggtctgatgaaggcgattgtggaacgcaatactggccgcattctgggtgcgatgctgctttccgtcgagtcgcacgaggtgatcaatatcgtcaagttggcgatggatcttgacgcgccggccagcacgttgcgcgatatggtgttcacgcatccgacgattgccgaggcactgaacgacttgttcgcgtagtttgttcgcatagcacgcccgcgcagcatgacccgcgtagcgcagcccgcaacagactcccctaatgcgcgcgaaggtcctcatcgacgtaaaccgatgaggaccttcgcgctgtcgtcatgatccgtacgtgacagcaatcacgtccgaaccagccgttacttcaagccgagcttacggtccagaatgccggaggcatccaatcccaagcggcgtcggatgaacaagccaagaccgagcggcaggccgggagccaaggccatgtcgcctggaccgagtgccacggttttggagttgcctgcgataagcatggtgcccttggatgcggccgtggaggtcgaaccatcgccgtccgcctctggtttgaggatttcgatgttgccgtcactggttttgtacagtcccttattctcattccagataccggatgcgccattgttgccggcctcacccgcagagaggaaatgtcttgtttttcttgtgagcgctcacctattcacgcgcgatggcatgtttttcaagcaaagtcaataggtgtgatgttattcacactcttcactacgttgttttgcctcgcactgggcaaccccacttcagcaagagattgcacagcttgcgttagggtggagaacatgactatcacagtatccacagatgggtccgcattagggaatccaaacgggccaatgggctgggcctgggccgatcatgagcagaacgccggcggcaagcccggccataagcacgacgaccatggttatgatgcgggcggcgcgaccaacggcaccaatcagattggtgagctgtgcgcagtgctggaagctttgcgagcgcacccgggccctgagccattgctcatcgaatcggattcgcagtacgccatcaattgctcgaccaagtgggtcaaaggctggaagaagaacggctggaaaaattcgcagaaaaagcctgtgaagaacaaagagcttattcaggcgatcgaccgtgagatctcacaacgccctggcccggtggatttccgatgggtcaaaggtcacgccggcaacgagggcaatgagttggtcgatgaactggcacgcacctatgcgggcgattgccgttcgggtgcgcgcgacggctatctgccgattgaaggctggcagtcgctactgggctccgaatacgcacatggcaccgatgtgcctccagacgtgcagttggtgctggatggcaaggcggatgcggcaagtttgcgcaagccggctgcggcgacggattcgacggatgccacaaggccagagaccaagtcttcgtcacccttagcgacacaatcagcgcaacctgtacaatcagcgcaccccgtacaccccgcaaagccaagcggactgacggtatccggtacgctgaccttctcccccgcgccgaaaacgagcccgtatttcaacgggcagccgatgccgatcaaaggcagcatcgaaatcgaaggctatgtggacggcgacggcaacctgaccatcgccaacgcaccattcgtacgacactaacacccaaacacacgaatatgtaccgcaatcggacacgatgacacaaaatcgctcattcgcgttaggataggagataaggcttcacgccgttgatccatgcggcggaggcaaggatggcaaaggagaaaccatggataaggcacagcaggatgcgctgaagaaggcggccggcatcgaagccgccaagctcgttgaaaacggcatgatcgcaggcctcggcactggttcgaccgtgaagttcctggtggacgagctcggccgccgtcatcaggaggaaggtcttgagttcactggcgtaaccacgtctcgccgcacgcaggtccaggctgaaagctacggcatcaagatcgtggacatcgacgacgtggatcacatcgacgtgaccattgacggcgccgacgaagtcgacaagaacttcaacggtatcaagggcggtggcgctgctctgctgtgggagaagatcgtggccaccaactccaaccagatcgtgtggattgtggacgagtccaaggttgtggacaccatcggcaagttcccgctgccggtcgaggtcattccgttcggcgctggccacgtcatcaagaagttcgaggaccgcggctacaagccggtgcttcgtcttgacgccgatggcaaggaagtgcgcaccgacgagaacaacttcgtggtggacctgcacctggagcgcatcgatcacccgcaggagctggccgaagacctcatcaacacggtcggcgtggtggagcacggcctgttcctcaacatggtcgacaaggtcatcgtcggcgacccgaacggcccgcgcgtgttgaccaacgccaacaagtgatcgtctcacatcactgaacttttccaagcccgcatctgtacatcgcaggtgcgggctttactgttgcccgaacaaggcaaaggagccaaaaagagaaaccccgcgaccataacgatcacggggtttctaatgccttgattgcaggtaagactacttacgctggtggcgggtcttacgcagcagtttgcggtgcttcttcttgctcatccgcttgcggcgcttcttgatgacagaacccatctgaagcctccatttcgattaatcgtaaaagttgcaacttgcaccataatacacgtgttgccagacagaggaaaccagtatgttgtcgatagtccgcatatgccctgaacgcagttggggcatccacatcagcaatgtggatgccccaacgttcataagtttgtgcagcagctgacagccgatactagatactacatcgggaacttctggtagaagcgatcgaccgcttccttggtgccggtagcttggaagaccacggtatcgttctgccagatggcagcggcgttcttgctgttggaggcatcggccttcaccacgtacgcgcccgtgacgttgccggaaaccttgacgttgccggatgccgactcatcgccggtctgcgcagcgaccaacgcatcgtactgggtcttggcattgtccgccgacgaccactgcgcggcgaccagcgtgacatccttggcggcatcaccagtggagtaggtcagagtgtactcctcgagcggcgatgcggaattccacgtcgtggaggcatccgccttggtacgcgcgtaattcagcacgctgtccggcatggccttcaacagctcactggcatcatccggcaaagctgtggcgtcgatggtcggcttgatcggctcggatgattcggttttctgctggctgttttgggtggtagtggaggtgccatcattcttctggatggcccaacccggccacacaaaggccgaaagcactgccaggataatcacaacagctgcggcaaccaccactgcaatcaacttgccatgggattgtgtggtcgaggagttctcactattagtcataccccgattctctcacagccgcgtgacgctagacggccgtaatcttagtcgttgtgcgcaagccgcgtgaaactcttgtgaacggtaaaaatttaccgtccgctggtgtttgggttagggtgagaccatggcgaaatcaagtgtgcagtatgtatgttccgaatgcggttggaacgggccgaagtggtacggccgttgccccgagtgtggtcagtggggcacggtcgaggaatttcacgaggctcggccggcggcaggctctcgcacggccgctcccggccgaacatcacgcacgcagtcggttacggttgccgacaacgccagatctgcagcccgtccgattaccgaagtgggcacggaaagcgtcgagcggctcggtaccgggttttccgaattcgaccgtgtgctcggcggtggcgtggtgccgggttcagtgacgctgatagcgggcgaaccgggtatcggcaagtcgacattgctgttgcagacggccggcaatatcgcgcgcgttgtggcgggagacagtacattccgaggagccggtcagcggtctgcccaacagtcgggccgggcgcagggcggcacatcaaacacggtgtcggtacagggcaacgcaccgtcggtacatgccaataccgtgctgtacatttccggcgaggaatcacaggcgcaggttcgtttgcgcgcttcccgcatcaacgcggtggagccgaacttgttactggcctccaccaccgatctgtccacagtattggggctgatcgaacagaacaagccggccttggccattgtggattcggcgcagaccatcgtctcgcaggaggtcgatggcatttccggcggttcgactcaggtgcgcgaagtggcaagcgcgctgatagataccgctaagacgcttgacattccggtatttctggttggtcatgtgaccaaggacggttcgattgcaggcccgcgcacattggagcatctggtcgatgtggtctgccaattcgaaggcgacagcgagaccgcgctgagaatgttgcgagcggtgaagaatcgttttggtccgaccgatgaagtcggctgtttcgacatgagcggtgagggcatcgaagaggtcaccgatcccgccggattgttcctgtctggagacggccctgatgcggccaacgcggcacccatggaaggcacctgtgtgacgttcacattggatgggcatcgcagtctgcctatcgaagtacaggctctggtcaccacgtcggtgctgcccacacctcgacgtgcggtcaatggcgtggaccccagccgtatcgccatgctggtcgcggtgctctaccgtcacagcaagctcaacctgctgtccaacgacctgtatatctccactattgccgggggccaggccaaggagcccggttccgatttggcgatagtggcggcactggcgagcgccgccacgtcaaaacccattgcgcgagccacgtgcgccattggcgagatttccctgaccggtcaggtgcgcccggtaccgcgtatggaatatcgccttcgcgaggccgcgcgccttggctttacaacggcagtcattcctccgctgcgcaagccggtgcatgtcgagggacttcggctggtggagtccaacacattgtccgacgccttagatgccttgggagtgcgtaaatagccctgagatatgcctcaggcggtaagacgcttggtctcttcgacgttgcgcttgagttcgtcaacgagttggtcgggaccatcaaacttgacctgcgggcgcaggaaaccgacgaattcaacgcgaaccttatggtcgtacagatcaatccactcatcggtgatgcaataggcctccaccacgcgttcgttgagtcctgttttctcgctgaaggtgggtttggtgccaatggagatggcggcaggccagcggttctcaccatctaccagccaaccggcatagacgccgtcgaccggaatgtagcctgcaatgtcggagccaagattggcggtgggaaatccgatggtgcggccgcgctcctcaccgtgtaccacttcgccttcgatggcgtgcggagcacccagaatggcgttggcatcctggattcggccatgagccagcaggtagcgcacattggtggagctccaggcgcgcattgccttggcctggttcttcttgctccatgcgcggcgctcggccttggtggcattggccagcgggtcgacgggctctccccattcgctcggggcttccggcttgaaatcgcgcggaatgcgcacttcacccgggccacggtcatcgaccacatcaagttcgaatacaccggtggcggcggcaagattggcgatatgcttcacatcaccttctcgccccttgcccatggcggcatcctgcccgaggaccagcgtacgcatgcccagcttgccggtgagtctgccaaggaagaaaatgtatgacatggctgcgaaggccagcgtgtagtgcaccaccaacacatggtccacgccgaaccgttccatgcggtgcagtcgatcatccacactggtcaaggcttcggcatccacgttctgcaccgcgggttcctcgccatggtgcgaggcggcccagccgtgcacgaatgcggggcgcgggtcaaacagaatcaccacggaaaaagcatcatgctggtgcgcgagttccaccacacgcttgatcaccgcctgatgtcccaagtgcatgccatcaaatgcgcccaatgtcaccacggccttcttgtcgttactgaacgagggccattcaatcgaaccttcggcgtcaggggtcaggtgcgtgatatccatcagtgtgctgttccttttatccgtgcgatgttattcatgcaatataggcgttgttgtgcgcggcctgtatcaagctgcacttttcaccgcgtctactttacgcgagggggaatacggtgaccggcttggcctgatgagcgttggcacgctcgataatcgccgccacatcatgcgtttgcggcacaatggcggcagtgggctcgctgattgtacgctcgatacggcggccgaagcgcaattcgctggcttcctcaggtgtgatgtcaagcgccggcatcgcgcctcgagcggcctgttccatggtgagggcatggtcaagcagccagttgcggcgctcgtcaccggcaagaccttcaggagtgttcaatacgcacttgttgcgcgtgacggtttgcccttcccgattagtgaacgtcttctgatcggtatgtgcggtgacggtatgggttcgcgtgtcaagcatcgcctcagaggcgataagtccgctggtatcgtccggcaacgcgaatcggccgactcgcgtacggcgcaaacgggtcaggtatccgccgacgccaagttcattgccgaggtcgcgggcgagcgcgcggatataggtgcccgatgaacagctgacccgcacgtcaatatcaagtgcgggaatcgttcccgtgttcgcgtcttcccgcaatggttcagcggcctgctcccctgctacgaatccgctgcggatatccagcacggtgaattcgctgatggtcaccaggcggggtttgagttccacatccttgccttcgcgagccaagtcgtaggcacgctggccgttgattttgatggcggagaacgtattgggtacttgttcgatatcgccggtgaaattggtggcgatggtgcgagtgagcaggttttgccatgaggcagttggtgacgccgttggttcgccgctctggccgccctcagtcagctgcgctgacagcgtttgccagcgggagcgggcttcatcatcgacaagcgcctcgccttcggcatcgtcggtagtggtgcgcaggccgaggcgtatggtggcctcgtaggttttgtcatgcgccacgatggcgttgagcagtcgcgtggcgtggccgaaggcgatgaccagcgtgccagtggccatggggtcaagggtgccggcgtgaccgaccttcttgatgtgcaacgcgccgcgcacggcggcgacggcgtcgaaactggtcacgccttgaggcttgtcgatgatgagtaggccgctgggtgttgtatgaagcacactactcctcgtcggactcgaactcatcgccctcggcttcggcctcgtcgtcgtgcttgtacggatcggcgtcgccggcgtactgggcggtggcgcgggcgcgggcgagttcttcgtcacgcttcttggccacggcgagaatgtcttcgatctcgtgagcctcgccgggcacttcatcgaacacgaattggagctgcggagtcaggcgcaggccagccttgtggcccaccagagaacgcaggtgacccttggcctgatcgagcgcctgctgagcgcgtttgcgttcgccttcctcgtggccttcgtggccgagctgggtccagtagaccttggcgatctgcagatcgttggtcacacgaacttcggtgacggtgatgctggcgagtcgcttgtcatgcagttcgcgctcaatggaggaggcgacgacacgctgaatcaaggccgcaatacgtgcggcgcgcgggttggttcctgccataggaatttccttttctagacttgagccccctctgacgaggggctgccgaacgcagtgaggctgggggagagaaaatcatggaactaccatgtctctcccccagtcagcctgcggctgacagcccactcgtcagagagggcttaacaatgactacttgcgctcgacttcctgcatctcgaaggtctcgatgatgtcgccgagttcaatgtcgttgaaggtgccgaggttgataccagcctcgtagccttccttgacggactgaacgtcgtccttgaagcgacgcagcgaggagatctcgaggtcgttgaccgtggccacgccgttgcgcaggatacggcacttcgtaccacgcttgacctcgccgtcctgcaccatgacgccggcgatgttgccgaacttggaggagcggaagatctcgcggatctcggagtgagaggtgacgacctcttcgtattccggcttgagcatgcccttgagggatgcctcgatgtcttcgatcgcacggtagatgaccgagtagtacttgatctccacgccctcgcgctcggcgaggtccgccacctgacggttcgggcgcacgttgaagccgatgataacggccttgtcgaccgtggccaggttgacatcattctgggtgattgcaccgacgccgcggtggatgacctggatgccgacctcgtcggatacctcgatcttcatcaaggaatcctcgagcgcctcgaccgaaccggacgaatcgcccttgatgacaatattgagcatgtcgatctcggactcggcgaacttcttcttgaagtcctcgagggagacgaccttgcgacgcttggccagctgggcggcacgctcggtggcctgacgcttctcggcgatctggcgagcggcacgatcatcggaggcgaccaggaagaggtcaccggcggtcggcacggaggtcaagcccagcacctgaacaggtgtggacggaccggccgcttccatcggctgaccgttctcgtcgagcatggcacgcacgcggccgtacgaagtgccggccacgatggcatcgcccacgtggagcgtaccctgctgaaccagcacggtggccacggcaccacgacccttgtcgagtcgggcttcgacggtggcaccacgggcgtccatgtcggggttggcgcggaggtccagctcagcgtcagccgtgagcagcacggcttcgagcagcttgtcgacgtgcaggttctgcttggcggagatgtcgacgaacatggtgtcgccaccatactcttcagggaccaggccgaactcggtgagctggccgcggaccttctccgggttggcaccgggcacatcgatcttgttgacggccacgacgatcggcaccttggcggcctgagcgtggttgatggcctcaacggtctggggcatcacaccatcgtcggcggcgaccacgaggatcgcgacgtcggtgagctcggcaccacgggcacgcatggcggtgaacgcctcgtggccaggggtatcgaggaaggtgatcttgcgcggttcgccttcaaggttcacggtgacctggtaggcaccgatgcgctgggtaatgccgccggcctcacgtgcgatgacgttggtcttgcggatggtatccagcagtcgtgtcttaccgtggtcgacgtggcccatgacggtgacgaccggcgggcgaggcttgagatcctcgtcatcctgcagttcttcctcgtcaaggttgatgtcgaactgctggagcagttccttgtcttcctcttctgcggagacgagctggatgttccagccgatctcttcgcccagaatctggaaggtctcctcatccaaggactgggtggcggtagccatctgacccaggtggaagagcacggtgaccagcgcggcctggttgacgttgatcttctccgccagatcggccagggaagcgccctgacgcagacggatggtctgaccgttgccgttggggatgcgaacgccgccgatggtcggtgccttcagctcctcatactcatggcgctttgccaggcggttcttacgggccttcgaggacttaccgccctgacgtccgaatgcacctgcggcaccgccgcgaccgccgcgaccgccgccacgtgcgggaccgttgctcggtgcgccgccgccctggaagttattgccgccgccttggcccccacggaagccgccgcgtgcgccgccctgaccggcaccctgggagccgccgccctgacccggacggttgtggccccactggccgggacgaggaccgccctgaccaccttggcccggacgaccgccacggaagccgcggccctgcccctggccttggccgggacggcccggacgaccgccacgaccgctatcagcagtcggacgagccatcggatgcggacgcggaatatcacccggcgtcggggtgtgcataccctgcttgcgggagaacgggttgttgcccgggcgcgggccctgagcgtgcgggcgcggaatcgcgtttgaagcggcattgccgccattggcaccggcgccgccctgagcgtgcgggcgcggagccgaagcattgtcgcggttgttctgatgctgccccggctggccattgttcggacggccctgattgttacgacgatcgttgttacggcgatcgttcgggcgactctgacgaccgttctcgcggccttcgcgattatcgcgaccattctcacggttgtcgtgctgaccgtggcggccgggggtcggcatgccggggcgtgcgccgccctgcggacgcggtgtcggtgcgcccggagtcggagtctgctgatgtgccgaggcgggcgatgcctgacgtgcgggagcggccggagtcggtgcggaagatgaagtggaagccggggccgaaggtgcggccgggcggcgctgctgcacgggcttggcagcaggcttttgtacggaagatgcgggcttggaatcgcccttggcgttgtccttggcgaactctgccttcagacgccgggctaccggcggttcaatcgtagaagaagcggacttgacgaattctcccatgtccttaagcttctcaagcacggttttgctatcgacattcaaaaccttagccagttcgtatacgcgtggtttcgccactaattactcctattctgtgaccacgcgcgtgcatgggcgtggtcagttggtgatgacggcaagcctaccctgtctcatcgtgcgaccatgatcgtgttacctcgtctctggtgtgggcgatttcgcgcacactgcgccagcccacatacgccaatcaagcatactcatagcgctggatagcgcagacgcagcgagccgcgccattgctgacgcggctcgtatcaggaaataatgcgccctgaagatcattcgccttcgagcccggcggcctattcggcttccggagcagcagcctcggccgcagcctgggcggccttttcagcggcgaccttcttggcatgggcctcggcggattcgatgccgatcttccagccggtcagcttggctgccagtcgtgcgttctggccttccttgccgatggccagggatagctggtcgtcgtggatgaaggcgatggcggtcttgttcttctcgctgatcacctgtacgccggtggccacagccggggacagcgcggctgccacgaacttggccggatcgtcggagtagtcgacgatgtcgatcttctccgggccaaggttctccataacggcacgcacgcgagcgccgccggggccgatcagcgcacccttcgggttcacgccatcggtgttggccttgaccgcgatcttggtgcgggcgccggcctcacgagcgatggccatgatggacacggcaccggagaccagttccggcacttcacgctcgaacagcttgcggaccagctccgggtgggagcgggacaccacgatttccgggcccttgatgccacgggccacgttcaccacgtacacgcggatgcgttcgccgtggcggtaacgttcgccgggcacctgctcacggcgaggcagaatggcttcgacatcgcccatcgcgacatgcacgttggaggggtcggaagcatcctgttggatgatgccggtgatgagcttgcccttctgaccggagaacgcgccgaataccttctcatcttcggcgcggcggaacagctgggtgatgacctggcgtgcagtggcggcggcgagacggccgaagtcacgcggggtgtcgtcgtattcctcgcccagcttgggagcggggtgcgggtcgtcctcggtgggctcgaccgggatttcgtcggcggcccagacggtgaagttgccggaacgttcgtcaagctccacacgcgcgtgcctggcggcgtgcggggtcttgaggtaggcgaggcgcagggcctctgccagcgcatcatccagggttccggggtcgattccttgctcggcggcgagcttgtgtattcctgtcaggtccagttccatcgatccgtacctcctatgaagttatgtggcgcatggcctatgagtggtcacagttagctattagtgtaggtttccatgcagacacgcttctcttcaggacggtttacccggcgcttggcatccgcactatgcgcgagcgcgatgctgtgttcgctttcggcgtgttcgatgccgcgactggccggacgggccgaggcggaagctcaaatgagcccttgcgagaaagcgatgacgttggcggactacgccacccatccggctgaaggcacgccgttattagagcagtatgccaccggcctggccgctcccctgacttggattgacgttgccgggtattgttcgggtcgttttgccgagggaacgttacgtgacgcgcagaccaagcaatggctggcttttctggccgataaattcgggcagtccgcgcctgaggtgacgccggcgcgtcttgatggcgtcacgtccgccaacgttgaccgaccggtattggatgcgatggccgtggccgaggatcgcgccggattcgctatcgaggtcttggccgcacgaggacagaccgctggggctacgttggcgttgagcgatatgcataagaccgccgggcagcagctggtgtcgctggcgaacggcaattttgatgattccggcgcacagtccagttcttccggccagagcgacccccgccaaaaggtctatgccatcgaccaactactggccaaccccaccaccatcgccgacaaggcaagcggccagaccgtaccgaccgccgccgccatcgaaatggactgcgcccgcgcgcagatcaaggccgtgaccgaatcgaaatcttccaccgagagcgatacgctgctcatcctcgccgcactggccgccaagcacgcctacaccgcgttccaacttggctacccagcgactgacgccgcattgttcgagtagacacacactcctcacgaagccgatgcgaacttgttggatgctagtgggcaagtcgagttgaggcacgttccaccaatgtgaaatcggtggtgtacgtacgggccgggcctgagtatccttcgatgcggtcgataagcatgtcaacggcatgcttggcataatcgtcgatatgtggatcaatggtggtcagcgccggcgccgagtactcggcttccggcacgttatcgaagccgaccacttgtacatcgtcaggtacacgcaaaccatgtcgttgattgcggcagcgtgaacgacatgcaccaaaggctcgtcaaggcgcggcgcatgatccgcaggcgcatccgggagggccaaccgttcatgttcctcaacgaggggctcgcggcagccggcccagtgccgtccacgaacaacctcgtcgaatcatggaacgcacgcctgcgcgacatgccgcgccgccaccgcggactgcggctggtcagacggctgaaggcgatctgctggtggtgccaccagcacacggaacgtcccgagaccgacgcgtggctcgcggccaacgcgatgaccgacgaacgactcgagcgcctctaccggcgggcatgggagagaagcccgcagagcatgcacgagacgttcggcattcccatgagacacggcaccggcatcgactggaacgagttccacaccagggtcgaatggcagtcgaacgactagaccgccggacatacattttggcctataaccccgaatacggacgttcgcatcaaaaacaaaaagggttccgggacaaaccacggaaccctaaaggcggataaggcgagattcgaactcgcggaggctttcacctcacacgctttcgaggcgtgctccttagaccgctcggacacttatccatgctgccaaaatggcaacttgttcattatgccacattctgccgacctggcaaatcggagtttcgctgagcaagtctcgagtgtatgccgcttgagacatgtcagatcacaatcccggaattcgcccgaagcgctggcattgcgtttacgcgccaagcactccgacaggaattacatacactccatcatcgcgttgatacgcgaactcgccgacccccaccaacaccgccaagaactccggttcacgggttcgcgcactcggatttctcagcagcttatctttcagtctgcatagatttgccgatgcctcagggactttatcctcactggacttaatttcgatgccgccccaccgtccatcggacaattcaataatggcatcacactccagaccggaatcgtcacgataataccgaaccggttctatcccaatatcgaggagagatctcgcatacaccaacagatcacggatgcatagattctcaaacagaaacccaaaagtctgccaatcgccgataagagcagcaggactcatgcccaacattgcggccgcaatggaaggatcggcaaaataccgacgcgccttggtctggagtcgctttggatcccgtgccggcgggacccagccctttatcggatcgatgacgaacatgttctcgaacatggccgtatacccggataccgttctctccgaaatgaaatcgtcaaggttttcttcagtaccgtacatatccttacgtaaggttttgaatgtcacagcttgactgatattgcgcgcaagcgaatccagcagacgacgagccacatcaggatccttgccttgcctgggcacactctcagtcagcgtgagtcgcatgtattcccgaatcagaatctgtgcgtcagatacaggcagagccaccgcctccggccatccacctcggcatacggcatccaacaacatttgtgtacttatctctgattttgcagcggtgaacttatgttcaaacagtccactgagacttaccgcacctgtcgagagtccggactcatataaagtcagaggattcatacggatacgtccgattcgtcccgcaccactatggttcggccgattctcattgagaggagtggatgaaccggtcagaatccactgacctttattcgcggaatcatcgtcgacgcgatgacggacttcatcccatatagctggagcgagttgccactcatccacgatatgaggcctatctcccagcagcatcaatgacggatccgccttagccgcagccaaattgttattgcgatccacataggtaatgctggctgcatgggcccgcgcagaccaagttttcccgcaccacttggtgccggtaatctccaccgcgccaaagatgcgcatatatcgttcgatctgtgcatccacgatacgagggcgataggctttcggcttgatgtcgctcgtcagagaatcggccattccgcgcacctcccgttatttcacgtccgccatcgcaataatccgaatttctcaactaccaaaatccgaatattggtggtggtagaagcggtgacgggaccactctgcattgagcggtctctctcagtctcgctacgctcgacagctcgaacgcaatttaaggacagctttccagctgccattttatttgctcactgtcattcgccttcgcctaaaaacgcctccggcgttttcttcacggctcagctcatcagagggggcttgaaattttgtttacgccacctgttcgtggacggaggcattgacccattgggtctgctggacgttgtagccggagaagatgccgatgtcgagcatgcagtcgcggtaatcgcggccgtgggcgatggtgatgtagctgtcgtccaccaatcggttatgcgtgggatccagtccgacccatcggccatcctgatacacctcgacccaagcgtgggtcgcgccctctcccccaagcaaaccggcaatgtagcgcgcggtcaatcccacatgccggcacacggacagcattacatgggcataatcctggcatacgcccttgcgctgggccaaggcctgttcggcggtggtgcgaatcgtggtggaaccgggcgtatacacaaacgccttgtagacctcatccatcacttcggcggcctgctgcaccggagtggcgtcggcaggcaacgcagccaagcgttcgcggcatacgtcgatcatcgcctccacgttcgggccgggaatggtgagcgctgaattgaatcggtacagcggtttataggcttccttatggatatgcgcattgtccacgaaggcgatgccggtcaccgaatagctgaatatgtcgtgcggctcggggatgaatccggtcatcaccacggagccaaaggagtcgatggtggtttcgagttcggtttcgggctgaatcttcacttccacgtcaatcacctgttggcgagggccagtggcgggaatacagcgaagctggaacctgtgatcggtgaccggtgcgctgaaggacagcttcatctcatagtcgaacacgagttttttcacaacgtctcctgcacttacacacgagccggcaaccggcacattctcgggataacgacactacagccatggctgaggtatggtccgcgcgctcacagtccacgcatatattccggcaattcgccgatacgtatcggccggcactcgggcgcacggtttttcgccataccaccatagcatttgaacccgtcagggcgaacgtcgggttaggggcgcttggcatccatgttcatggagctcagtgagcccatgtctttgatggccagggcgctgacacggccggaataatcgtcaaggtacttcttcagcaggtcggcgacttcctgatacccgcgagacggcagctgaccgaccagccagctcagcccatcggcgaagcaactaggcaacggcatgccgtcgaggatcatcgagtaggaggcgagcttcctaagcggggcttccatctcctccatcgtcaggccgaagcgcgtgtacaggtcgatgcgctcaagatacttgccgatgaagatgaacgccttcagcgtggggtcgaccggcgaattctcgatgccgccccagaaggcgagcatgtcatcggtaatatcgcgctgcttgtagatgtcctcggcgtcggccgcgtatttggcggcatcggtgatattggtcatcgccaactccacgtactgcaacagacgcgagctcaattccgggcgcagaatcacggcgttgttgaatgcggaggttacggccgaccgcaccgaatcagggttggacccgtcgtacaggaagctgttcacgaacccgtcgaagtcctcgaaatcttcgggcaggtcgagtgcgtgagcgaacggacggaaggcgtccacatcggtgtccatcacacgatcgtagaacgggaagaactggttcagcgtggtgaaggcgcgctcggtgtaccgacccagccaatacaggttgtctgccttggaagcggtgaccagagacaacgagtggcggcgggactggctcagcaggttcgccacctgcacttcagcaccgtattcatgctccacgccggattcgggtgccaacacccacgtatccttgaatccgccaccctgcgacgagttgacgatcatctggccgggcaccgacgagtatcgagtcaagcccgaataccacacgtgcgtgtttttgccggtgaccacaaaggcacgcaaatcgcatttgcgcggcgacatctcaccggtcttcgggtccaccacatcgatatcgcggaactgaatcacctcttgggcgatgaatcgacgaggctcctccttgatccggttggcaagctcctcacgtgcggcagcatctagcgacgaaccgaacaccacgccgtaaccaccggcttcggccacatccttgatgaccagctcgcccatacgattcaggacttccttacggtcggcctcgaacatcggcatatacgtgggcgcgttgttgagaatcggttcctcgccgagatagtacttgatcatctgcggcacgaagtagtagatggccttgtcatcggccgcgccgttgcccggcgcgttgacgatggccacgttgcccgcgcggtaggcggacaggataccgggcacaccgatcaccgaatcaggattgaaggcaaacggatcgaggaattcgtcggacagacggcggtagaccacgcccacacggtggcgtttgccggcgtagtcgaggaagtagaccttgttgtccaccacttcgaggtcttcggggaaggccagtgcggcgccggttttctccgccagataggcgtgctcgaagaacgcggaattgtagcggccgggggtcagtaccacggcgatgccctcagtggacacaaagtccatggccttgcgcagtaggcgcgggtattcgcgattgtcgcggatgtgcacgtcgcggaacaggcgcggggagatgcggcgctcgatgtcgcgcacgaacagcgggtagctggcgcccgaggggatgcgcaggttgtcttccagcacccaccagcggccatcttcaccctggaccaggtcttcgccggcgatgtgcgcgaagatgccgccgggaggggtcacgccgttgacctgcgggaagtagccggccgaggtgtatacgtattcctccggcacgacgccgtcatggatgatggccttgtcggagtagatgtccttcagataggcgttcagggcgttgacgcgctgcttcaggcccttctccaattcgtcgtattcgtcggattcgataatgcgcggcacgggatcgtacgggaagagccggtcatggtattcgccgttcttgtagatgccgaagcgtacgccgttgcgggacagctcgcggttgatcgcctcgcgacggtttaccagttcatgggccagtctgcgtgctgcggattcgatcatcgtgcctgctccttgctgtggcggcttctgtggcctcaagcggttaggcgtttcgagcgcacgctgacgccgcaagccgtaaccgggtttgatggttacaacctaaggcggccccgtttcagcaaacgcgcgagaatgttacaggcaggtcacttcgccgaccgcactcgtctcgccgaccgcgcgcatctcgccgaccgcgcgcatctcgccgaccgcactcgttacaatgaatggctatgacacgactgcgcattgacttggcctacgacggcggcggattctatggctgggccaaacagcccaatctgcgtacggtgcaaggcaccattgaagatgcgctgcacaaggtgctgcgggtgccggccgatgatgcggccgaaccgttgcgtctgacggtggctgggcgcaccgacaccggtgtgcacgcctcccaccaagtggcgcatttggatgtatccgatgaggtactgaatcgctgcgtaggtcacatgaccattccggtcaccgaggcgctgactcgcagactcaaggctgtgctgccttcggacatcgtcattcatggcattgccgtggcaccggccggtttcgatgccaggttctccgcattggagcgcacttatgtgtatcgggtcgccgatcgttcatccgagatcgacccgcgcctgcgtggatgcgtgcttaccgtggatgaatcgctggatctggagcttatgaaccgcgcagcctcattgaccatcggcctgcacgattttggttccttcgccactccgaatccgggaggcactacgatccgcgaagtcaagaccgcctattggcggcgggtgccgatcactcccctggtgccggatgcgatggcatcgcatgaagcatatcggactccgtcgctggagtccggactggcggtgttcacgattgtggcggacgcctttgcccgcaatatggtgcgctccttggtcggctcatgcatcaaagttggttcgggacgcaaatctctggaatggtttgccggcaaaatggccgagccagtgcgtgaaggctcaagcgggccgattgcgccgcagggcctgactttggagcatatcgcataccccgtcgatgatcagctggccgcaagagccgaggccattcgagccgtacgtacgttgtagtttctatgaaacaacgcaaaagggctggaacccaaacggattccagccctttcagctagcttggcgaaacgctattcagctcactcggccttctcggcgtcagcggcttcctcagcgggagcctcagcctcagcggcggcggtctcctcgaccggagcctcaacggccggagcctcttcttcggcaaccttggcggcggcttcagcttccttcacaacagccttcttggcaaccggctcggtgacgagctcgatcacagcggccggagcggcatcgccaacgcgcggggcgatcttgacgatacgggtgtagccaccttcacgctgctccatctgctcggcaatctgggtgaacagaatgtgcaccacggacttgttgcggatgacgcgcatcacgcgacgacgggagtgcagatcaccgcgcttggcgaaggtgatcaggcgctcggccagcggacgaaggcgcttggccttcggcagcgtggtggtgatgcggccgttctggaacaggctggtcgccatgtttgccagcatgaggcgctcgtgtgcggggctggaagccagacgcgggcccttcttaggtgtaggcattgggtttactccttatatgtccgttcttcaggcaagcaggtgggcatatgcccgaacatccgcttgcctagtgaacgaacgattggtcaaagaggcagatcactcgtcttccggcgagaagaacgtaccaccttcgagattattggtatcgaaggccatcggcgaggacttgaggctcaggcccagggtctgcagcttctccttgacctcatcgattgacttcataccgaaattgcggatgtcgagcaggtcctgctcggtgtgggagacaagctcaccgatggtgtggatgccctcgcgcttgaggcagttgtaagaacgctgcgtcaggttgaggtcctcgatcggaacggccatctcggggttggtctcctcggccaccggggccggaccgacctcgacgccttcagcctgggcgttgagctcacggcacaggccgaagagctccaccaaggtggaaccggcggaagccaccgcgtcacgcggggagatggcgggcttggtctccacgtccagaatgagcttgtcgaagtccgtgcgctgttccacacgggtggcctcgaccttgtagctcaccttgagtaccggggagtagatggaatcaaccggaatacggccgatctcatcgttgtcctgcttgttcatctgggcaggaacatagccacggccacgctcgacagtgaactcgatctcgagttcgccatcgtcggcgagggtagcgatgtgctgctccgggttggcaatagtgacgccggcaggcggggtgatgtccccagccacggcttcgcccttgccgctcttgcgcagatacatgaccacaggctcgtcatattcgctggtgagcacgatgcccttgatgttcagcaggatctcggtgacgtcttcctggacgcccggcagagtggtgaactcatgcagggcaccggaaatacgcacggaggtcacggcagcacccgggatggagctcagcagcgtgcgacgcagcgagttgccgagcgtgtagccgaagccaggctcgagcggctcgatggtgaagcgggagcgctgcggattcagagattcctcggtaagagtcggacgctgtgcaataagcactgtggttatcctttcagcttgaactcggtggtgcactcaccggtcaggcggttttggatggatttggtattgctgagtgctcagacgcgacgacgcttcggaggacgaacgccgttgtgggcttgcggggtgacgtcggtgatggaaccaacctcgaggcccgcagactgcagggaacggatggcggtctcacgaccggaacccgggcccttgacgaacacgtcgaccttcttgacgccgtgttccatcgccttgcgggcggcggactcggcagccataccagcggcgtacggcgtggacttacgggagcccttgaagccgacatcaccaccggacgcccaggacaccacggcgccggacggatcggtgatcgaaatgatcgtgttgttgaaagtggacttgatgtgagcctggccgaccgggaccgacttgcggtcgcgacgacggggcttacgagcggcttgcttaggcgctgccattgaccctcgtttcctagtaacgaactttgttgttgacgttcgggcgatgggatgaaatcatcccgtggcccgaatcatgccaccgactacttggtggccttcttctttccggcgaccgtgcgcttcgggcccttgcgggtacgagcattggtcttggtacgctgaccgcgcacaggaagtcccttacggtgacgctggccttggtagcagttgatctgaatcttgcgacgaatatctgcatcgacttcacgacgcaggtcaccctcaatcttgtagttggcttcgaggtagtcacgcagcgtaatcagctgctcgtcggtgagatccttgacgcggatgtccgggctgataccggtcgcggcaagcgtttccttggcacgagtgcgacccacaccgaaaatgtaggtgagggcgatctcgatgcgcttctcattggggatgtcgactccggcaagacgtgccattgcgattccttcttgttgccgtaggtcttgcacccgctcgcccggttacccggcacgggcctacgtacccgtggttcagtgtcgttcccttgcgggaagcactgtgagagagtgccttatttacttagtgccgctggagaatctgctctcagccctgacgctgcttgtggcgcgggttgacgcagatcaccatgacgcggccgtgacggcggatcacgcggcagttttcgcagatcctcttcacgctagggctgaccttcatggttatccttttcttgtgtacctttacttgtaacggtacgtaatgcgtccgcggttcaggtcgtaagggctcatttcgagcacgacacgatcctgcggcagaatacgaatgtagttcttacgcattttgccggaaatcgtggcgagcacgatgtgcttgttctcgagttcaacgcggaacatcgcgttaggcagtgcttccactacctgtccttcgacttcaatcacaccgtcttttgccatgtgcctctagtcctattccgttggatgattactatggcatatccgaagacacaccaactgtcaactatatacgcacatacccctgtacgaacactcggcgtgtcgcacaggggtatggaaacgttgatgtggtatttcggcatcactccggcttgttggccgggctgccgaacctactactcgaggtggctgatgatacggccgctgatctcgtcgatgtcgccgacgccgttgaccacgacgagcaggccacgggattcgtagatgtcgagcagcggagcggtttccttctcgtaggtctccaggcgcttggcgatggcctccggagtgtcgtcagcgcggccctgctcggcggcgcgcttcttcatacgctccagcagcacgtcacgggcggcttcgagggccaccacgtggtcgagcggagtgtcgaggtcggcgagcatctcgtcgagagcggtgacctgggcggcgttacgcgggtagccatcgaggatccagccgttattgcagtcttccttggccagacgatccttgacgatcttgttggtcagggagtcaggaaccagctcgcccttgtcggtgtagctcatcgcctcaagaccgagttcggtcttgttcttgatgttgtagcggaagatgtcgccggtggagatggtggggatgttgaagtgctcggcgagcagagcagcctgggtgcccttgcccacgccctgggggcccatgatgagcagacgcatggtggtctccttttgtgtcggttattaatacggttttggctcccttggttaggggagccattgagttatatgtggaagaaagattgctccgtcgtggaacagtccactggactgttccactcctcgcgcggccgcctgcccattgcgggcgaccgctgccaagcgggcgtcagccttctttgtggtccacgttttcgaacaggaagccggtgtactggaactgttcggtctgggccttggcctgacgcagggtgtcgaggcccacgcccgcgataatcaggatcgtggtgccaccgaacggcagcttggcgttgagtccgagagccatgatcagcacggtcgggatcagggccacgaacagcaggtagacggcacccacggtgttgagtcggttcatcacgtaggtcaggtaacggctggtggcgttgccggcgcggatgccgggaatgaagccgccgtactgcttcatgttgtccgcggtctcgtccgggttgaacgtgatcgaggtgtagaagaagcagaagaacacgatcatcagcgcgtacagggcgatgtaccacacggatgtggtgttcgccaggttggcgttgatccacttgacccaggactggtcggacttgccgaactgggcgatcagggtcgggatggcgaggatcgaggaggcgaagatcggcgggatgacgccggacatgttgatcttcagcggcaggtaggtggaggagccaccgtacatcttacggccgatcatgcggcgcgtgtactgcaccgggacgcggcgctggcacagttcgacgaagtcgacgaagatgaggatgaccacgagcacgcccacgacgatgccgaacttggtccagtcgccgttcttgccgttggtgccgtagccgatctcccacagctgcggcaggaagccggagcagatggacatgaagatcaagatggacatgccctggccgatgcccttgtcggtcacgagctcggccatccacatgatcaggccggtgccgccggtcatgatgaggaccatgaccacgaggttccacacggagccgtccgggatgacctggtcgcagcggtagttgaacagggcaccggagcgggcggtgaccaggatggtggtggactgcagcacggccaggccgatggtcaggtaacgcgtgtactgggtgagcttggcctctccggactggccctccttgtgcagggcctcgaagcgggggatgaccacgcgcagcagctgcaccacgatggacgcggtgatgtacggcatgacgcccagcgcgaagatggacagctggagcatggcaccgccggagaagaggttcaccagtccgatgaagttctcctgggaggcgctgccgatggtggccatgcacttgttcaccacgttgtagtccacgcccggggtcgggatgaacgatccgatgcggtagacgatgatgatgaacaggacgaagagaatcttcttcctcaactctttggtcttcagggcctggattagtgtcctcacctggatttcctcccaatagcgcgccaatcacgcgaaatacgcaaactaacgaatgagcatagtctaaagtgcctacttcggccacttcatgtctcgcgaatgttacctgaattatgctccgtcgtactgaacgggggaagcatactcaaaacgatcattgtgttgagactgcttctctgcgctcagaacaacattttttttagaaaagggaacccccgtccacctattggcgggcgggggttgtacagcctattgcgctccccgtaggactaatcagtcctcggaaacggaaccgccggcggcctcgatcttggacttggcggaagccgaagccttaacacccttgagggtgaaagccacggtggtctcgccgtcgcccagaaccttcaccggagcgttgtcacgaacagcgcccttggcgatcaggtcggccacagcaacctcgccaccctcggggaagagctccacgagacgagcgatgttgatgacctggaactcgaccttgaacgggttcttgaagccacgaagcttcggcaggcgcatgtacagcggcagctggccgccttcaaagcccggacgcacgtggttacgcttcgtctggcccttggcgccacgaccggaggtcttacccttggagccttcaccgcggcccacacgggtgcggtccttcttggcgcccggggcgggcttcaggtcgtgcatctgcaggatttcgttatctgccataatcagtcaacctcctcaacggtgaccaggtgacgcacggcgttcaccagaccacggttggccggggtgtcctcgcggacaacggtcttaccgatcttgttgaggccgagggtcttgacggtggcgcgctgagccggggtacggttcacgatgccgtggtgcagggtaatcttcaggttcttagccatgagtatcactcaccatccttctcttcggcggccttagcggcagcagcctcttcgcgagccttgcgagcctcggcaatgccggcggcacgggcgcgcagcagagcatcgggagcaacctcgtcgagcgccaggccacgacgggcggcgatctcctcgggctcttcgagctgcttgagggcatcgacggtagcgcgcaccacattaacggcggtggcggagcccatcgacttggtcaggacgtcggtgatgcctgcgcattccatgacggcgcgcacggagccaccggcgattacaccggtacccggggcagccggacgcagcaggacggtgccagcagcgtcgtgaccctgaaccgggtgggtgatagtgccgcggacgcgaggcacagagaacatgtgcttcttggcgtccagctggcccttggcgatggcggccgggacttcacgggacttgccgtagccgacacccacggtgccgttgccgtcgccgaccacaaccagtgcagcgaagctgaaggtacggccacccttgtgggtcttggacacacggttgatggtcaccacgcgatcgagcagctcgtcgccgtggttttcttcacgacggttacgacgctcgccgcgacggccttcaccgcgctggccacgacgacccttgcggtcctcgttgttggattcggtcgccacagtgttctgagtttcttcagccacttgggtttccttcgtttcgttgtcgctcacagtgcaagacctccctcgcgggcgccatcagcaacggctgcgacgcgaccggtgtacttgttgcccccgcggtcgaacacgactgcggtgatgccggcagccttggccttctcggcgatcagctcgccgaccttcttggcggcctcagtcttggtgccttcgaaaccggcgaagtcggcctgaagggtggaggcggacaccaaggtaatacccttggtatcgtcgaccacctgagcaaccatgtgacggttggagcgggtgaccaccaggcgcggacgctcgggggtaccggagatgcgcttgcggatacgcgcgtgacggcgcttgagagctaccttcttgccttttccgagaatagcaacgctcatatcacttaccagcctttccagccttgcgcaggatgcgttcatcggcatacttgatgcccttgcccttgtagggttccggagcgcgcagcttgcggatgttggcggcaacctggcccacgacctgcttgtcggtgccttcgacaaccacgtggttggcgtcggtcaccttcagggtgatgccttcgggcgggttgacggtgatggtgtgggagtagccgaggaagaactcgatgcccttgcccttggcgacggcgcggtaaccggtgccgacgatctcaagagtcttggagtagccatcgtgaacacccttgaccatgccggccatgatggagcgggccagaccgtgcttggcacgggtcggacgcaggtcatcagcggcggtcaggacgatctcgttgccttcaacggcagcggtgatgccttccggaaccacgtaggagtcagaacccttggcgcccttggcggagaagttctggccttcaatcttgacttcaacgccagcagggatggcgatggggagcttaccaatatgcgatgccatgtttcagctctcctttctcaccacacgaaggcgacaatttcgccgccaatgcctcggtcgaggcattccttctgagtcagcagtcccgaagaagtcgagatgatggcgatacccaggccaccgagcggcatcggcagggagtcggacttcgcgtaacgacgaaggcccggcttggagatgcgcttgatgccctgaatggaacgctcaccgttcggaccgtacttgagggtgacctcaagagtctggccgaccttggcttccttagcggtgaagtccttgatgtagccttcgcgcttcaggatctcggcgatgttcgccttgaacttggagtacggcatatccacggtttcgtgcttggccgcgctcgcattacgcagacgcgtaagcatgtctgcgatcggatctgtcattgtcatttgggcttgttgccctttctcgctatggtttccgccgccctcacgcttcttctagaagcgttcgggccgcggaccttcagcgtcgatgtttaccaactggacttcgtaacgccgggcagttcaccgcggtgagccttctcacgaaggcagatgcggcacaggccgaacttgcggtagacggagtggggacgaccgcagacctggcagcgcgtgtaagcgcggaccttgaacttcggcttgccggccgccttgttcttaagagcggtttttgccatatcagttctccttgaaggggaagccgaggtgcttcagcagcgcgtaggcttccttgtcgtccttggtggaggtcaccacagtgatgtccataccgcgcacgtgatcgatcgaatcaggatcgatctcgtggaacatggactgctcggtgagaccaaagttgtagttgccctggccatcgaactggtggccgttgatgccgcggaagtcgcggatacggggcagcgcgagggtcagcagacggtccaggaactcccacatgcggtcgccacgcagggtgacgtacgcaccgatggcctggccttcacgcaggtggaactgcgcgacggacttcttggccttggtgatcttcggcttctggccggtgatcagggtgaggtccttgacggcaccttcgatgagcttggagtcgcgggcagcggcaccaacacccatggagacgacgaccttctggacacgggcaacctgcatcgggttggagtacttgaactccttctcgagctcaggaatgatctgctcgttgtacttgaccttcaagcgcggggtggccggcgcttcgacagtagtatcggtcatgccagctcctttccggacttcttggcgacgcgcacgcgcacggtcttcaccttgccgtcacgcgcctcttccttaacggtgatgccaacgcgggtcggctgcttggtctccgggtcgatgaccatcacgttggagcgatggatcggagcctcagtggagacgatgccagcctgctggccctgctgcgttgcacgcacgtgcttcttgacgatctgcacgccttcgacgatcagtcgatcgttggagagcacctgcttgacggtgccttccttgccgcggtccttgccgcggatgaccttgaccaggtcgccgctcttgatcttggctgccatgtcagatcacctccggggcgagggacacgatcttcatgaacttgtgctcgcgcagttcacgaccgaccggtccgaagatacgagtgcccttcggttcacggccggagccgagaatgacggcggcgttctcgtcgaacttgatgtaggaaccatccgcacggcgggattccttgacggtacggacgacaacggccttaaccacgtcgcccttcttgaccgacccgccaggaatggcgtccttgacggaggcgacgatcacgtcgccgatgccggcatagcgtcgcttcgatccgccgagcacgcggatggcgaggagttccttcgcacccgtgttgtcggcgacatgaagccgcgtttcctgctgaatcattgattctccttagccgagctggttctccccatttaccggggcatcgtggttgcccatgacaccccggtaaatggcgagccttgccgaactttacttacttggcgcgctcgataatggattcgagacgccagcgcttggtcttgctcagaggccgagtttccataatactcacgaggtcgccaatgtgggcgtcgttgtgttcatcatgggccttgaccttgctggtggaacgaacgaccttgccgtacagcgggtgggtcgaacgctgctcgagctcgacggtaatcgtcttgtccatcttgtcggacacgacgtagccgcggcgaaccttacggaagttacgctcttcagccataatcacttctccttggattcggtagcggccggctcctggctgatgccaagctcacgctcgcgaagcacggtgtacatgcgggcgatgtcgctcttgacagccttgagacgggcggtgttctcgagctgaccggtggcgtgctggaagcgcaggttgaacagctcttccttggacttcttcaggaagccttcgatttccgcgttggtcttctcgttgagattcttgatggagtaatcagcggtaccgactgccatcagatatcaccaccttcacgtgcgataatgcggcacttcatcgggagcttgtcgatagcgcggcggagggcttccttagcgacgtcctcggacacaccaccgatttcgaacatcacgcgaccagggcgcacgttcgcaatccagaactccggggcacccttaccggaacccattcgggcaccgagcgggtgcttggtcagcggacgatccgggaagatcgtgatccacacgcggccaccacgcttgatgtagcgggtcatggcgatacgcgcggcttcgatctgacggttggtcacgtaggccggggcgagggactggatgccgaaatcaccgaagttgatctcgttgccgcccttggacatgccagaacgcacagggcggtgctgcttgcggtacttagtcctcttggggataagcattcttgctcactccttcgtttctgcagccggagcggcctcggcgggagcctcagccttgggggcttcgacggcctgcggggcggcggaacggttgccacggcgcgggcggcgatcgccaccacgacggcccggacggttgttctgctgagcctgctgctcttcgaactcggattcggtcatgtcgcccttgtagatccagaccttgacgccgatacggccgtacgtggtcttggcctcgaagaagccgtaatcgatgagggcgcggagggtctgcagcggaacgcggccctcacggtagaactcggaacggctcatttccgcaccgccgaggcggccggagagcttgatgcggatacccttggcaccggcgcgcatggcgtcctgctgggccttgcgcatggcacgacggaaggtgacgcggttggtcagctgctcagcgatgccctgagcgacgagctgggcgtccagcgcggcgttcttgacctcgaagatgttgagctggacctgcttgccggtcagcttctcgagcttggcgcggacgcgctcggcctcggcgccacgacgaccgatcacgatgcccggacgggcggtgtgaatgtcgacgcggacgcggtcgcgggtgcgctcgatgacgatgcgggacacgccagcgcgctcgaggtccttgctcatctccttgcggatctgatcatcctcaagcacgaagtcgcggtagcgttcgccggccttgttggagtcggagaaccacttggagcggtggttctcagtgatgcccagacggtagccaaacggattgatcttctgacccatctttagcgggctccttccttgttagccacgacgaccgtgatgtgggaggtgcgcttgttgatacgagcggcgcggccctgggcacgagcgcggaagcgcttgagggtcacaccttcgtcaacgtaggtctccttgatgtacaggtcgttctcgcggaacggctcgccggccttgtcggccttcacgcgagcgttggcgatggcgctctccagggtcttgcggaccggcagggccgcagcctgaggggcgaacttcaaaatggtgacggcttcggtcgccttcttgccgcggatgaggtcgaccatgcggcgagccttgcgcggcgtcacgcggacgtgacgagcgattgctttagcttccatgttctattccttatccttagcgacgggccttcttgtcgtccttcacgtgacccttgaaggtcttcgtgggggcgaactcacccagcttgtgaccaaccatggcctcggtgacgaacaccgggacatgcttgcgaccatcatgaacggcgaaggtgtgtccgatgaaatcaggggtgatcatcgaacgacgggaccacgtcttgatgacgttcttggtgcccttctcgttctgctcgtcgactttcttctgcaagtgggcgtcgacgaaggggcccttcttgatgctacgagtcatcttctcgatactcccttacttgcggttcttgccggacggacggcgacgaacaatcatcttgttcgaagccttcttcggacgacgagtacgaacctcgcccttgccccacggggagaccggcggcttaccaccgcgggtacgaccgccgtgcgggtggtcgaccgggttcatggactcaccacgggtgatcggacggtggccgatccagcgggcgcggccagccttgccgagctgaatgttggcgtggtcctcgttgccgacctcgccgacggtagcgcggcagcgcgcgtcgacgttgcggatttcgccggacggcatacgcagctgagcgtaggcgccatccttggcgacgagctgaacggcagcaccagcggaacgagcgatcttggcgccacccagcgggcggagctcgatggcgtgaaccacggtaccggtcgggatgttcttcagcggcaggttgttgcccggcttgatatcagcctgagcaccggtctcgatgacgtcgccctgcttgatgcccttcggcgcgatgatgtagcgcttctcgccatctgcgaagtgcaggagggcgatacgggcggagcggttcggatcgtactcgatctcggcaaccttggcgggcacgccgtccttgtcccaacgcttgaaatcgatgagacgatactggcgcttgtggccgccgccgcgatgacgggaggtgatacggccgtaagagttacgaccgccggtcttggacttcttgcgaaccagcgacttctcaggcgtagaacgagtcagctcggagaaatccgagacggacgcgttgcggcggcctgcggtcgtcggcttataaacgcggatagccataatgtagttcttcctttaacttttctcggctagccttcagttaccaaagatgtcgatcgtctggccctcggcgacggtcacgatcgcacgcttctgggaagcgcgctggccgaaaccggtgcgagtgcgctgcttcttgccagcgcggttgagggtgttgacgttcgtcaccttgaccttgaagatctcttcgattgcctgcttgatctgcaccttgttcgcatccggagccaccacgaaggtgtactggccacggtcggaagcggcgtagctcttctcggagacgacgggcttaagaatcacgtcgtgagcgggcttgtgaatagcgaccatctaaatcaggcctccttcggctcggtcttggcagccacgaaagcctcgaaggcttccttggtgaagaccacgtactgcgaggtaatcacgtcgtacgtgttgagctgatcgacgaaaatcgggtgaacggtcgggatgttgcgcacggagagccactcgttgatgttgtcgcgagtgaagacgaccgtggtgaacttgtccgcggtgatcggggccagggcggcgacagcggccttggtggacggctcggtgataccgaactccaccacggcaacgcgaccggcgttggcgcgatcggacagggcgtagcgcagagctgcggccttcatcttcttgggggtgcgctgagagtagtcacgcggctgcgggccgaacacggtgccgccgtggtaccactgcggtgcacggatggagccctgacgagcacgaccggtgcccttctgcttccacggcttcttgccgccgccggaaaccatgccacgagtcttggtggcgtgggtgccctgacgagcagcagcgagctgagcggtgacaacctggtggatcagcgggatgtgagcctggacatcctcggcggaaacgccgaagagagcctcaggagcttcaacggtgccggtggcctggcccttggcgtcggtgacgttcagagtaacgtttgccatggtttatcaggctcccttcacagccgagcggacgagaacgatgccgcccttggggccaggaatggcacccttgatggcgaggatgccgttctcgacatcagcggagacgacggtcaggttctgggtagtggcggtcacatgacccatgcggccggccatacgcttgcccttgagaatacggctcggagtggcgcatgcgcccacagaaccgggacggcgctcgttcttgtgagaaccgtgagtacggcggtaggacttgaagccccaacgcttgatggtaccggcgaagcccttacccttggtggtgccggtcacgtcgacctcagcaccctcttcgaacaggtcagcggccagttcctggccagcctcgaactgatcgacgtcgtcggtgcgcacctcgacgaggtggcgacgcggggtgacaccggccttggcaaagtggccagccagcggcttggtcaccttggtggggtcgatggcgccgtagccgagctggacggccttgtagccgtcagattcctcggtcttcacggcggtcaccacgttggtggacacgtcgacaagagtgacgggcacgaagaagccgttctcgtcccacacctgggacatgccgagcttcttgcccagcagagccttgcgattagacataatgcttcctcctcccttacagcttgatttcgatgttgacgtccgcaggcagatcgatgtgcatcagggagtccacggccttgggggtcgggtccacgatgtcgatgaggcgcttgtgagtgcgcatctcgaagtgctcgcgagaatccttgtacttgtgaggagaacggataacacagaagacgttcttctcggtcggcagcggaacggggccaacaacagttgcgcccgcgttcgtcaccgtttcgacgatcttcttcgccgattggtcgatgacctcgtggtcataggacttaagcctgatgcggattttctgtcccgccattgccgtccgccctttctagcgatgttcgttgtactgtttaccaacctgcttctagggcaccggcgcgcatggcctcccttggacatacgtcctctggcggtcatccgacatcagtgcgcggtttccggctgtcacttcacttgaagtggctcccggcccgcgctcgcttttttaattccaatttgcgagcccaaatcaggcaacttgtttattcaagcattgaggtgggacagtgcggaggaattcgcgcgtgtcgtgctcaggccgttcgtattacctcgcggcatagccgctcggcgtcgcctaccaacatccttctgagacttacctatatatagtggcacagctcacgttggcgaatatggattgattaattgagttggacggtaacgcgaattactcttaaggctcgtgacacaatcactggcaaagaacatcaaacctattcgtgagcacggtgccaacgtgttatatcagcacggcactttggccttactcgtgccggggctgctggaaggcaccaccaccatcggcgaattgctcaagcatggcgacaccggcatcggcaccggcgagggcttggacggcgagctcatcatcctggatggcgtggcatacaagataggccaatccggtgtggccgaacgcgtgccggacgacttcaccatgccattcgctaatagccatcgcgcggccttccagtaccagtgcgagcgtcatgatatcggcctagaagagctcaacgaaaagatcgtcaaggcgaacggccgcgcgaacacgttcttttcggtaattgtgcgcggcacgttcagcttcatcaagacacgcgcggtcatcaagcagcaggcaccctaccccacgctggtagaggtggccgaccggcaggccgtgttcctgcgccacgacgtcaagggcaccatgctcgggtacttctcccccgtgatgtttcacggcgcggctgtggccggattccacgagcacttcctgtccgacgacaagacgttcggcggccatgtgctcgatgcggtgctcgagcgcggcaaaatctacagtcaggtgttcgataccttggtgcagcatctgccggtggacgaccctgattatcgcaaccacgacttcagccaagatccgatagccgaggccatttccagcgccgagggcgatactcaacgagattagtctcacataaacacaatgtgagccaaatgaacatttccgaacaatcgcacatgttgcataatggcggaagcactggcttctcgcacttcctatgttcgattgtcgcaatgcaggtctcacatctttcttattgagaaccattcgctgcgatatcatgacagatatggcttcccgccgcaagactcttaaacgcgattggttcgacaaccaacctggcgcatgggtaatggttatgctgcccgctgtggctggcttctttatcggcgggcctaatcttgatacgctttggctgttggcgacgtgggccgtgtgctattgcgtgcagttcagcgccgcgcactggttcaaagcacacttttcacgccgttatctgccgccgatgctcacttatgccgtagcgctcatcgtcatcggcttgccattcctgattacgcataccggcatactgcgttgggctcctttatatatagtgctggttgcgctgtcgatgctgtcctcgtggctgaggaaggagcgctcgctgtggggcaatgccgtgtcggtgattgccgcatcggccatggccacggtgatcgcgtcgtttggcaacgctgttgagacggcatgtgttattcccatcaacgcagcacatgcctcgtgcgcagccgctgatgtcaccgccgcacgcgccgcgattcggaatatgccagatttgagccagatattcgaccttcacgcctggtggcctgcgggttcattgcccgtgaacgggctgattgccaccgtgctgtttgcgctgacgcagtatgggtcggttttggtggtcaaaaccatgatccgggaacgcgggaagcgttcgtacgtggcggcttcgtgggtatggcatgcggcgctattgctgctagccgccgtgccggctggacgcagcccgtatctgattgcgatgactgtgctgctgttggcccgcgccgttgcgttgccggtggttacacggcgcacaaccttgaagcccgtggtgaccggcattaccgaggcgtttgccagctttattgcttttggctgcattattgcggtgatttagcgacgctcagcgattccatggggcggtaattccctcatggggcggtaattagcccatggggcggacggtaaaattttaccttccgcagaatagagccgttttcgtacaccgccccatggggttttcaccgccccatgggcaagttaccgcctcatgagtaggttaccgccccatgagtgggttaccgccccatggaggtacctgccggctgagggagcgccacatatgcaaaggagcccggcccctgtaatggggtcgggctccttgtgtccgctatgcagccactaagctgcaacaccgcggttggtggctactgctggtgccagcagccgccaaccgcctgcaatcagcgctcggaggcttcctcagtggcggcctcaccctcgcgctcgatgcgtagcttgtggccttccgcctgggagacgccgtagtaagcaccgacggcgatgtccttcatgtcgttgatcagcgggatgcgcgggttggccggggtgcactggtcctcgtaggcgcgcatgccgatctgatcgagcacggaccagaagtaatcctcgtccacgccgcaatcctggaagctcttgttcataccgagcttgttatcgcggtagtcctcgacagccttcgccaggttctccacggcttcggccggggtcttgccggtgtcgatgccgaggttgcgggcgatgtcctggtagcgctccggggcgatgtacttgttgtacttcggccaagaggtgggctcctcaggaatctggccgttgtagcgaatcacgtacggcagcaggatggagttggtacggccgtgggcgatgtggcacagggcaccgatggtgtgggccatgccgtggcacatgccgaggaacgcggagccgaatgccatgccggccatggtggcggcgttgtgcatcttctcctgagcgtcggtcttggccaggccgggctcgccgttgacggactcagccaggttgtcccagatgagcttggccgcgtgcagggccatgccgtcggtgaagtcgttcgcgtacacggacacgtatgcctccatcgagtgggtcagggcgtcgaagccggcgtcggaggccagcttgcgcggctgggtgcgagccagcaccgggtccacgatggccacggacggggtcagcgcgtagtcggtgatcgggtacttgtagccggtcttgtgatcggtgatcacggcgaacggggtgacctcggaaccggtgccggaggaggtcgggatgcacacgagcttggccttcttgcccagcggcgggatcttgaaggcgcgcttacggatatcgaagaacttctcgcgcacgtcggagaaggcgatttccgggtgctcgtagagcagccacatgatcttggaggcatccatcggggagccgccgccaaccgcgatgatcgtgtccggctcgaactcctcgcgcatcatctccgcgcccttttcgacggtctcgacggagggctccggctcgacgtagtcgatgatgcggaaggtcacacggttggagcgggcgcgcagctggtcgatgaccttgtcgacaatgccgagctgctccatgaccttatcgcacacgatgacggccttctcgatgccgtacatgtcgcgcaggtacttgatggcgttcggctcgaagtaggtcttggccgggatcttgaaccactgcatgttgttgttcctccgagcaatgcgcttgatgttgacgagattcacggcctgcacgttgccggacaccgagttgccgccgtaggagccgcagcccagggtcagcgacggggcgatggcattgtagatgtcgccgatgccgccaagggaggaaggctggttccagatgatgcggcaggcgtgcatacggacgccgtactcacgcacgagctcctggttgttggtgtggatggcggcggtgtggccggcacccagcttgagcatcttctcgcacatctcgaaggcctgctccttgttgtcggccttgagcacggcctgcaccggagcgagcttctcgtgggtcagcggctcgtcgtcggagacttccttgcactcggcggccagaatggtggcgtcggccggaatctcgaagccagcagccttggcgatgaactgcggggacttgcccggcaccacggagttcagcacgggcttgacgccggaaccggcggtgcagccgaacatgtactgctccagcttggccttctcttcggcgttgacgaagtaggccttacggaccttgagctccttgatgagctggtcgtagacgtccttgtgggcgatgatggcctgctcggtggcgcagatcatgccgtaatcgaagtgcttggagagcaccagatcgttggcggcacggacgatgtccacatcggaatcaacataggccggggcgttgccggcacccacgccgagggcgggcttgccggaggaataagcggccttgaccatgcccggaccaccggtggcgaggatcgtggccacgcccgggtgctgcatcagcgcgccggtggcctggatggacgggtgctcgatccactggatacagttctcgggagcaccggcctcgatggcggcgtcgcgcacgatcttggcggcctcgacggagcacttctgcgcgccggggtggaagccgaagacgatcgggcagcgtgtcttcagggcgatgagggacttgaagatggctgtggaggtcgggttggtaaccggggtgacaccggcgaccacgccgacgggctcggcgacctcatcgatgcccatcacgtcgtcttcgcggatgatgccgacggtcttctggccggccaggtagttggtgacgtgctcacaggcgaagatgttcttggtggccttgtcttccacgagaccacggccggtctcgtcgacggccatcttggcgagaacgaggtgcttgttcagagcggcgatggaggccttggcgacgatacgatcaacttgcttctggtcgaggttctcgaattcgtcgagagccttcttggcgcgggcaaccagcgcgtcaacttcggcctcagctgcggcctgcttctcttctggggtcggattggcagcttcgactttcttctttgcttctgccacttggggtcctcctcgatcttcttggggtatatggcaaagttctgggccatcgcctcgtcacctcagttgcaccagcgggataccgcctcagtaaccgaaaatgaccggtgatgcgttgtcacattgcatatgtgacttgagtcacaatataccgaacggtccggcgcgatgcatacgcacaaaatcgacggcgtttcacgtgcgatattgaacagtttttgttaagagttgtgcgaaatatcgaacaaatcctcactttattcggcgatttggtactttttgttcactttttaccgaaaatcacatgcttgcaaacaacgcaatccgacaactttcttaaatcaagtttccaaaagtactcattttccccacatttctagaaaattggtttaaaaaagtgcccaaaatcgcctacaaatatacgattgttgcctcataatctccgcgtcgaggcacatgaaagccactttcataaagtatacttacatatatctcatcgtacaaaggggtaaatatgagggcaatgccatcgaccgcagtgaaagcgcacaaccgcagtgccatgacccagtatctgtatggccatagccatgtcaccaagcaggaactggaacgcgaactcggcctcagcctgcccaccatcacccaaaatctgcgcgccctagaagatgacggactcatccgcaaaggcgaactgcaggattccaccggcgggcgcaaggcgcaaaattatgagttcaatcccgatcatcgcactgccatcggcgtagtgatgcggtccaacgaactgcgcctgtgcgcgattaacctgtacggcaacgtcatcgaaaaacgcaacgatgccctgccttaccgcaacaccaacgtttactaccagcgtatcggcggcatcatcaacaacttcgcctccgacgtcgaaaagaagcacggcaaagtgctcggcgtctcgttcgccatccaaggcatcctctcccccgacgccaccaccatcaccttcggcaccattatgggcaacacggggcttatgctcgaaaccatcagccagtcggtccattacccgtgcatgatgatccacgattccgatgcctccgccatggtcgagctatggttcgactccacgctcaccgatgcggtgtgcgtctatctggagcgacgcccgggcggcgcggtgatcgtgggcggcaagctgtatcagggtccgaatatgtgcaatggcgccatcgaacacatgacgctggtgccgggcggccgcgaatgctactgcggccagcgcggttgcatggacacctactgctcgccggagaccttgcccgaggattacgaaagtattcccggcttcttcagcgtgcttgagcagggtgaacggcatcatcgcgagcgcatggacgaatggctggattacgtggcgcaggccatcgtcaacgcgcgatccatcatcgcgggcgacgtgattgtcggcggtgaagcagcccagcatcttgaagacagtgacatcgaggatctgaaggcgcgcgtcatcgcacgcagtccgttcggcaccgaccatttcaatctgcgcaagagctactgcgccgaagaccagaacatcatcggtgccgcattgcgattcgccgagaattatctcgacgatatctgtggtgctgcggaacgcggcaggaaatcaagggcttccaccagaagtgacaacacgtctacaatggaggtatgaaaaacccaccgttgcatcgttacgccactcgcccagggctgtacttcactgacgacggtggggctgacgtcgttgttcgttccgaaactgccgatcaggtttggctgtgtgtgctggagcccattgacgagcccggcgccttcttccaagacgccatccgcctgttcgaagacccgaacgcctcgttcatccagcagatccatgagtttccggtgtgcacgcgcattatcgaacatttgtatctgcgcgagaccctgttccgcatgaccggaccgaactacggcctgtggtacgtgcacctgcccaaagcatgggacggcatgcgttatggctaccgcgtggacggcgcatgggacccgaaacacggcgtgcgcttcaatccatacaaattcctgcttgacccgtatggcaagggcatcgacggctccatggagctcatccccgccgccttctcctatgaatgcgatgtcgtggatcgcaaggtaaccggctcggcatacggtgccatgagcaccgtagactcgctcggccatgtgccggtgtccgtggccatcgacgatcgcgatatccataagcatgagggcgacccgcagcacccgcatgtgccgtggcgcaaaaccgtcatctacgagatgcatgtcaaaggcttcaccgccaacgcgccgtggctgcccaaagcgttgcgtggcacctacgccggactcgcccaccccacaacgctcgcctatctgcagggattgggcatcacctccatcgaactgctgccgattatggccaagcaggacgagctcttcctgcaagaacacggccgcaagaactactggggctactccaccctcagctacttcgcccccgaaccctcctatgccaccaaagcagcccaagagaagggcgcggccgccgtgcgccaagaagtcatagacatggtgcgcgcgctgcacgaggccggcttcgaagtcatcatggacgtggtctacaaccacacatgcgaaggcggcgtcgaaggcccgacggtctgctggcgcggcctcgacgacctggcctactatcgccatcaaaaatccaataccggtcgactcgaagacaccaccggttgcggcaatacgctggacttcaccaacacgcatgtggtcacctttgccatcgactcattacgatactgggccaagcgtatcggcatagacggtttccgtttcgaccttggcgtcacgctggcccgcctggaaggcgaattcacccatcatcacccattcctctacgccctgcgttccgatctgctgctgggcaacctgaagctcattatggagccgtgggatctgggcaacctcggctggcgcaccggccaattctccgtgccgttcgccgaatggaatgaccgcttccgcgacacggcccgcaccttctggcttgaggatgtggatggcggctccgatttcggtcgtatcagtttgcaggagatggccacgcgactctgcggctcggccgatctgttcgccaccgaacccgggcgcggcgctccggcctccatcaatttcgtgtcctgccacgacggtttcacgctgacggacctcaccagataccgctccaagcacaatgaagccaacggcgagaacaataatgatggctcgtcggtgaaccattccgccaatttcggcgtcgaaggcgtcaccgatgatccagacgtcatcacggcacgcgaacaggcggccatgaacatgatcggcatgctgctgctctcgctgggtacgccgatgatgctcgccggcgacgaattccgcaacacacaggacggcaacaacaacgcctactgccaagacaacgacatcacgtggctgaagtgggattggatgtattccaccaacaagacacgcgaaatgcgtcgcctgaaaaccgtgtctcgactggtggcgctacgtaaatcactggacctgtatcaccacgaggacttcttcacccgactgacccaactcggcctactcaagccctcaagccgcgtgcagtggttcctgcccgacggcaccacgccgatggagcgtgactggttcgatctgggcgtacgtagcttcaccatgcgattgctgtccaacagtgaggtggacgtgtgcattgtggtcaacggcaccgctgacgaccgcacattccacctgccgccagacactcactggacgcctaaatggtgctcggccgaaatcaacggccgccgagccgggcatggcattcaggtcgaggaatgcgatttgaacgatgacaccaccgtttggacgcagcatgtaccggacgccagcgagacggtacgcacgctggtcgaagaagtggccatgcagcgcacggaatcctcgactgaggatgaagcggataccatcgaattcgcgatgccagcaacggatcacgccgcaaacggcacctcgtccgcgcctcgggatgaggtatcagctgatatgcctgatgcccctgtggatgatacgccggacactcccgtcgacgacaatgtctggaccatgccggcgctgagcatcacgctgatgaaacaggtgtgagtcacactcaaaacagcacgacacaaacacaaaggctctccgcggaattccacggagagcctttgtatgctcggtacaggacaagcgaaattaacgcttggagaactgcggggcgcgacgtgccttgtgcagaccagccttcttgcgctccacgacgcgagcgtcgcgggtcaggaagccagccttcttcagggcggcgcggttggcatcacgatcgatggcgttcagagcgcgggcaacgccgaggcggatagcgccggcctggccggtggtgccgccgccgtcaacgaggacgatagcgtcgaacttgccttcgagcttgagcagaacaatcggagagttgacctcacgctgcagcaacttggaggggaagtactcctccagggtgcggccgttgatggtccacttgccgtcacccggaaccagacggacacgggcgacagcctccttgcggcgaccggtgccgtagcccggctcgatcgcggaggtgccggtgccagcgccagcgttggtctcggtggtgtagttggtgagctcctcttcggtctcgacaacctgggagtcgttggtgttttcagccatgattcttatctcctctcaggtttcacttggcctgctgcgagacctgggcgatctcgaagacctggggcttctgcggggtgtgcgggtgctcggcgccgcggaagacacgcagacggtcgagctgcaccttggccagacggttcttcggcagcatgcccttgacagcgttcttgatgatgcgctcggggttcttctcgagcagctcggcgtaggagtcacgacgcagaccaccgggacgaccggagtgcgagtagagttccttgcccatcttgttgccagtcagagcaatcttgtcggcattgatgatgatcacgtggttgccggaatcggcgtgcggagcgtaggtcggcttgttcttgccgcgcagcaggattgcagcctgggtggcgagacggccgagcaccacgtcggtggcgtcgatgacataccagtcatgagtcagatcagctggcttcggagtgaaagttttcactggattaccttttctatattgtgttccgggtctcagctgcttggcgtggcttggtcagggccgcatccaagaggcatcgaacctcattatccgtgggctccctgaaagtcctcgatggcgagtgggatagcgctttgaaggaccccttagggaaacacaacaatccactagtatatcgccgggcttgacatagggcaacaggggacactccattgggtttatggcttctcttcccctatttatggtttctcttccacccacttcggctaaccgactcgcctacggtgaggcaattccctgccttctctcagctatcgcttcgttcaggcctcgtctacggacagtccactggactgtccgcttaacgactcggctcgtcagagggaggtaaagtgggtcaggaattgaagatttgggcgaagcgttggacgccgggggtgtcgaagagggtttcgagcggtaccacattgcccttggcgtcggccagcgggatgcgccagttcgggtattcgttgttggtgcccggctggttctgcgcgcgcttctcccccaccgcgtcggtgatcgaggcggcgagcagcttgcacggcgaacccttcagtgcgcggtacagcgcgtcgatgatatccgcctcgtgatcctcacgatgttcggcgaagtcggcatcaagatagccctgctcgaccagcatgaccagcatcgcatcctgctcggcctttgcggaggcttcgaattcctcagccgggccggtcagcaagcccagacgctcacgaatcttgacgtgctcgtattccaggtaaccggcggtcggcggcaaatcgtgcgtattcacggaggccaatgcgtacggacgccactgggagggggcgcggaacacgccgtcgcactgctcgaaccattcaacggcgcaaccgagaataccgtggctcgacagggaatcggccacatggtccggcaccacgccgaggtcctcacctacgaccacgccgccggcgcgagaggcctcgatggccagaacgcccagcatgatgtctgagtcgtagtacacataagcgccatccatagccgaccggttctcgggaatccaccacaggcggaacaggccgagaatgtggtcgatgcgcaccgcaccggcacgggcgaacatgccatgcaccatattgcggtaggtctcgtagccggtggcctccagattgatcgggctcagcggcggctggctccagttctggccttgctggttgaacatgtccggcggtgcaccgaccgtggctcccttggcgaagcgctcgggattccaccacacgtcagcgccggaggggtgcacgccgacggccatatcggacatgatgccgatatgcatgccggcgtccttggctgcctgctgggcggaggacagctgctcggcggcagtccattccagccagcggtagaagtccaaagtgtccgggtactgcttgcgcagattggcgatttccggggagttgcggttgaacttgcgctcccagttgctctcctcgccgttgggtgctccccacttgtcgtagcacaggcaccacgtggcatacgcctccaagtcggaaccgcagtccgccttgaattggtcgaacgcgctttggcgttcggcggtacggccggccttgaagataatccacagggcgtgcatcttgctgcgccacatggcgtcacggtcgatgagctgggaatcaccgttcagcggttcggtgtcggcatgcagtccgtcgacggcgttcttgtcgcccgcgctgagcgtggcatattcggcgatcgcctcggggcggatgtacgtgaagttgatcaggcgacggcttaccggcagatacggcgacggggtgagcggggacaccggctcggcggcatgtaccggattgatgagcacgaagtcggcaccggtcttctgcttggcgtccaccagcatggtcttcagatcctcgtaatcgcccacgccccaagagttggaggagcgaatcgagtacagctgggccatccagccccacagactgccgcccttcatcgggtcaagcagatcgacgcgatcaggtgcactgatcaaagtggcgtcttgcacacggtcggcgaccttgacgtgcagcgtatggtagccaatcggcagatcggcgggaatgaccacagccgcattcgaaatgaacgtgccatccaagtcgtaggcctgggatccatctccaggaccaacttcaacggtgccctgatatggctcgccgttctccagcgtgatgctcgccgaaggcacgtccagaatgccggtgttcaccagcacccgatcctcgctaccggcgatatgcagcacggtgggtgccaccaatcgggagtaacgctcgttcagaatgcgtcggatggcgatgagttgggcgttctcgctggaggcgtcgatgcccagcgctgccagcacctcgatcaggacgtcatcgtctatctcgtggtagtcatggctcatgcccacataactcgtgccgacaccgaccaacttggccagtcgaatcaacggacgggccagacgctcttcactctcggtaatctcactcatagccccagtctaacgccgtttgattgcgccacaccgtaagcaaaatgccgtgattccgccaaattatgtactttttaccctcacatagtgagatgtgagcgctcacaatggtggatagagggtgattgccggccaaatttgcacggcaaaacacagcaatagtgtgcttagcggcggctttccacggcgtgccgcacctcggccgaggggtcgttggccaatttggcaagcatcgcttcggacgtattggggttcagcgccacggcacggcggaccatcgaggaaagcaccgccggtgctccctcttcggattcggtgccaagtacgcccaagaaatccaatgtctccgcatccgcagtggggtcctgcgcgccctcaagccgcatcttccagctggtgcgcttgtttttcaacgccgtatcccggaccgcaggcaccgggtccttggtcaggcggccgaccagccaattcttgtcatccccgttggcggccacggcttgacgcacggacggttcggggtcttcggagagtttgaccaatacgttcgggaacggcatggtgtcggcgaggaacacgcgatcggccaccggggtgtgcgggttgccggccacagcctccaaaagtgcggtggcgcgggagaacgccgcctgatcggcacggtcaggcaacggccgacgggcgaattcggacagttcggccgggtcggtggaatgacgcagacgctcgtatgtagcggtcagcggttcgaaatccaccggagcggcggactcggctgcggcctgcgcgccttggtcccgctgttgggcgcccgtgtcgattgcagcctcagttgcggcctcggtgggctgggtctgctggctggtgatgttctcgtcggtcatgatgcccagcttagtcatacaggcgtcacgcgagcggaaccggaatgttgaccacgtcaatcggatccggcaccaccgcggcattgaacgcttcccgcacacactcctcgaatcgcgcgcaatcatcctgcggcaccaccgcggtcaactcgacgttcaccgcatacgattcatcctcctgactgccaccgagctgcgccagaatctgctggaatcgtgccagctgcgggtattcgagacggacccggtatcgcttggcggtcatgatgcgggcggcgcgggcggctttcatcgccaatgatgcggcggatgagtacgcgcggaccagaccaccggagcccagcagaataccaccgaaatatctggtgacggcaaccacgcaatcggtggtgccggactgcttgagtacgtcgagaatcggcttgccggcggtaccggacggctcgccgtcatcgctcatgcgttcggacagtcgcccatccgcgcctccgcacacggcggcatacgccacgtgtcgggctttcggatgctgctcgcggatcgcggccacgaacgcgagcgcctcgtcgagcgtatcgacatgggcggcgtcgccgatgaattcggactttttttcgacgagcgaatcgtgggcgggatcgtcggacgtgttgagaatcgtctgcataagcgtgttccggtggtcggctgactgggtgttcgattgagcgcgaggctagacaggactatcagtgttcggagacgacgacgttatagtcctcgccggcgaagtaggcggtcaggcaggcgatcatctggcgggtgagctccttgaacgcgccgtcggtacgccagccgacgtgcggggtcaggacgatgccgggcacatggcagatggcgtcgtcggcggtcagcggctcgtggtcgaacacgtcgagtgcggcgggaacatcgcccttttgcagtcgggcaagcagcgcatcggattcgatgacttcggagcgggcggtgttgatgaacagggtgccgggcttcacatgcgcaaggttctcggcggtgacgatgccgcgcgtggcgttgttgagcggcagatggacggagatgacgtcgctggtttcgatgagctcgttgagatcgtcgaccggagtggcgccggagcgttcgaaatgctcgggcggcacatgcgaattccatgcggcgacctccatgccgaaggcgcgggcgatgccggccacggtggcgccgatgccgcccagtccgatgatgcccatgcgacggccggcgagttgcagtccatcgccgccggcccacgcccagttgccggccttgacatccttatcgagttggccaacgcggcggatgagctcgaacaggagggcgaaggtgtgctcggccacggcgtgatcgccataatgttcggcgttgcagacgcggatcttcagctcgcgcgccttatcgagattgatgtagctggcgacgccggtaccgcagaacacgatgcacttgacgtgcccctgctcgctgatggtgcgcagcagatcatccgaaatgtggtagccgcccaccagcagggcgtcggcatccttcagacgctcggctacgatcgcctcgtcggacgtgaattcctcgaacatacgcacgcgggcaacgtcgtggagcgcggggaactgggccttgatgggctcgatcatcgcgtcgagcacggacggcatcacgacgaggggcagatcggtgcgttcgctttgggtttcgtaaatctcggtcatgggctccacattaggaggccgacgggaaaagcgtcaccttgcggcttcccctccttgagaccaagccgagcaactattgctttgccgcctgctcctgcgtgatgttccattccttgacgacgttctggtccgcgcccatcgaatagatgacatcccagatgcgttggcgtatctgagcgtcgtaggcttcgtcccaacatgtgcctatgggatggtcgctggatatcgggcaccattggtagttgccttgatgcacgttggcggtgggcacccagtcgatgcggttgacgcgccacgaccccttgacgcccttcttgccggcgaactggatgcgtgcggtcacaccctggttgttgaccaaggtttccggcgtgttcgccgactcggtgacggtgttgcccagaccgtagacaatccacgtgccgttatagttctcgatgggctgcgcacaatggcagccggcaccgtagataacgtcgaaggcaccagtgtcggcaagctcatgggcttccgaaatctgccaggaatcggcgtaatcaaggtattcctgcaccgagtgcatggcgatggccaccacatcggcaccttgctcgcgggccttgttggccttgtctaccgcgcgctggatgtcgctgccgtgattcgggtcgccgtcttcgcgcagacgatccacctgccagtcctcgtcggcggtcatgccgttgagggagaccgtgccggtgaccagacccagcttgccgccgccggtcggggaatcgatgactaacggtttggtggagtcggcttcggttttgtacgagccggtctgggcgatgccatcggcctcaagcgtgtcccacagacgggcgatgccatccgccccctgatcccaggaatggttggtggcgtgtgtgcaggcgttgtatcccacgttgcgggcggcatccgccacttccggcggaatgttgaagatcgggtacgcggcatatgggccgccgcgctgggcgatcggggtttcgaattcgcacacggcgatgtccgaagcctgaatgtactgcttcatcggcgcgaacagcgggtcgaagttgaaggcggtgccatccgtggcgttggggttcgggccttggaaatggctccacaatccctcatggaacaacaaatcgccgttgaccagcatggcgatgcagtccgtatccgggcaatccggtgaattgccgtgatgttcggtcaccggtttgggcgtgttcttcgctttattcaacgcgacgtccgacactccggcgcgtgcggggccattgccgtccgtgcgatgggttgcgaaccatgcgccgatgcccagcgtaacggcgagcgtgatcacgaacacgataatcagcgccgcacggttggttcgtgtcgagttggagcgatgttgcccctgcccagcgatatggctcatctttgcccacccttcggaactcttcttctctctctaggataccgcccatctcagtcaaacactgcggggaggaaggcgatgggcaagcgattggacaagcgacataaaccggttaatcttcaatcaccattcacgaacaccacgcaaaagtctcacttagtggacattcttctttcgtttgttagcctttccccgaggtgccgcactcgttcacccgctaaaatggcggtttggaggcggacggacaatggcgtacctccgactccgcttaccacaagcggagaccgaccgtcctcggttatttcggttatttctagcgacacattcccaggaaagtttcgcaaaacagacccccaagcaacccactagaaacacattcccaggaatgcgtcgcaaaacagatatccggacaacccaccagaaccgtattcccgggtttcgaatccctctgactccgcgaagtgcgaacaggcccatcatcaggagtttccggaaaacaaaaaagattccaagctttca

SEQ ID NO: 3111 - DNA, 124361 bp, Unknown
  R215_18m  MAG No. k141_16396
ggcaagttcgacttggtggccaagcacgccgaggaatccgccgccgaagacgcgcccgaaaccgaggtcgccgtcgaagccagcgagctcggtgagccgccagccaagaagccaaagcactgagcgttgcgcacaacaacaaaagaggggaacctcctattgaggttcccctcttttgttttttgacgttcggatgacacgactgtgggacggcacgcaaatatcccgcattgtaagctggcggcccacaatagcgtgggccaccacgcgtgtcaaacgttttatatacgcggcgtcccacagaccgaatcaacaaatccttggaatttagccattcttcaaactatagttagctctgacttacaagagggtgtgggacgccgcatcgaaaaagccagtttttgatgcggcgtcccacaccgataacgcactttacgcgtattgggcacctgtcacatgcggattttcccgcatacaccatcacaccgtcggaatcacgatgaggtatcgggtttcggcggttttttgttgcgtattggggctatcgagctgcgcgacggcctgcgccaagagcgtgccagcatcgctgatctccacggtctcattgatcagcgcgctcatgtcatgcttgagcagcgtgccgccagtgccaaagccgaacagtactggagcggtgtcaagattgttgccggaatcgccagtatcgctcgacttggccgagtcgttcgttcccgaaccatcgctcttggacgaatcgaacttacctccaccaccgatggccgaagtaagaccacccgcatagttcatcacatcgccagcagacatggacatggtgtcatcgaccagtgaggccttggaatgctgcgactgctgctgttgcgcggctttggcctgcttacgggcggcatcggccttacgcttggcttgggcggcccgggtcttgccgtagaacgattgcgattgcgaatcgaccaggccagtcagtgcctgagcctcggtcaccggaccggaagagacatcaccggacaagccatcgccatcgctgccggaagccgaggacgcgactccttcgaactgatcggagaatcgcaatacaatctggcgcaaggccgtggctttgcccgtatgctcggaggcggtggcaagcgtgctcatcgcggcatcgaccttggattgagcgtcggcgagttcatcgctaccgttggtttcggcgatggcttggctctcgtaagcggtggcgcccgaagacgtgccgccggtcagggcgctcaaattggccgtgtagacgtccgtgtatttcatcgaatacggaatcattgcggcggagagctggctctggccatcggcgtattgcttggagcctcgagtggcttcctccgaagcctcggcggtcagatcatccaccagtccggtggtgccttgctgctggatgcggcgaatcacctcatccaacgcatcgaccgcaccggcatgctgatgtgcggcactgacgttgttcaccgcgttggccaagtcgagtacggcttgcgccaaaggcgtatccccggacagttcgccggccgtgcccatcaacgccggcaactgggtggaggtaccaatcgatccagacaggtgcgtggtatatgagcccacatacgcggccatatagtcttcaaacgtccgcttatgggcggtttcgcgttcggccactacggacttgtccagcgcacgctcattatcgcgcagggtttgaagctgctcgatgagctgttgatgctccccggaaccggcgtcggtcagtgaatcgaccagtatggcggcagaggcgacgagttgggcgacatccgtatcggcagcaggctgtgcggcggcattcgcggcatcgggattagcaccaaccaccggactgctggaattggaaggcaatacggcgagcgccacggaactcatggagaagtctttggcgttcatatagcagctgaattccaagccggttgcggcttttccagctgcggcgactacggtattggaaccttgcgtggttaccgtaatggagttgtcagcggaaacatcatcggctacctgcgtaggcacggtaaaggcgacaaccgggatcgtacggttggcctccttggtttgcggcttaatatcgatatacacgccgatcagtccagatgcgccggcaacctcgtttgcctcgacgtttggaccgtcaagcgagtaggtgacgctgactttccatggcagggtggcggcggaagcggggatacgagaaaccttggacgtgccggaatcactattggcggaatcggtatcagtggaaccgctattgccggaatcggcactggcgccattgccggcgccgcccttccctaccacataccaacggaccggctccccttcggcatcggcgacggcgtacatatcacttgccgtagcgagcaccggaccgtaatcaaccggagtcggacgagacatccaagcaccgccgagaatcgaagccacgcacaatgcgcaactgaccagtgcggcaccacatctcatctacgtatcccattcatacagtcggccactatgggcattccattcccgtattaatgtagtcgctgccggcaacttgccctatagacgaatatccgaaaggtgcccattcgctgcgggcgaatcaggcgaatacgtcgagtacgcccgggtcgccaccggcatcggcgatgcgctggtggcgcttcttggcttcggtaaccacgaattcacggtacatttcggcaatttccggatcaagcccggcatcgatggcgatgcggtggaggcgctcgatctgatagtcctcacgcttggtgtcttcgggcgcgaatccggcgttggctttgagcacgccgacctgcgaggtggccttgaaccgctcggccagtaatgcgatggccgccgaatcgatgttatcgatggtttggcgcagcgctttgatgcgcgccaccgcttgtgcggtttccgggtgggccgccgcctgggcggagtcgatggtggtcctttgccagccgctgctcgtttcgctcatagattcgaggatactcccgattgcggctttgcacgatgcgcaaagtcagatatctcagatgtcatagtcgccgtaggggatatggctggcatccgcatcgccgaacatggccgcaccattgcccactcccaaaacaatcgaacccattgatacatctttcatctcatatatcgtcagcgtgcatgtgaacgttgacggcaatactacaactgcaatgtgatagttgatgtatttgcatcatatacggcaagggctgcgccccgtatcaatcggggtgcagcccttacactattgttcagcggtctggtcagttgccgttgaccgcgttgccggtgttggcctgctgcacgatggcggcgaggaagtcgcggttggtggcggtcttcttgaggcgcggcaccaacgtctggtaggcctgctcgggctccatgccgcccagcagtcgacgcagacggtagataatcggcagttcctgcgggttggtgatgagctcctcgcggcgggtgccggaagcgttgatgtcgatggccgggaacagtcgcttgtccgccagctcgcgggacaggcgcagttccatgttgccggtgcccttgaactcctcgaaaatcacctcgtccatcttggagccggtttccaccagcgcagaggagatgatggtcagggagccgccgttttcgatgttgcgggccgcgccgaagaacttcttcggcgggtagagggcctgcgcgtccacaccaccggacaggatgcggccggaggcgggggcggcgatgttgtaagcgcgagccagtcgggtcatggaatcgagcagtacgaccacgtcctggccgagctccacaagacgcttggcgcgttcgatggccagttcggcgaccgtggtgtgatcggaggccggacggtcgaaggtggaggagatgacctcgccctggaccgtgcgctccatatcggtgacctcttcggggcgctcgtccacgagcaccaccataaggtggacctcggggttgttggcggcgatggagttggcgatgttctgcagggtgatggtcttaccggccttcggcggggagacaatcagaccacgctggcccttgccgatcggggaaacgatgtccatgatacggccggtgagcttgttcggggcggtttcctgcttcaaacgctcctgcgggtacagcggcgtgagcttggagaactgcggacggttgagcgcttcttcaacgctttggccgttgatggaatcgatggcctgcagtggcacgaacttctggcgttggttgcgacgatcgccttcgcgcggggcgcgaatcgaaccatggacggcatcgcccttgcgcaggccgtacttcttgacctggcccatggaaacgtacacgtcgttcgggccgggcaggtagccggaagtgcgcacaaaagcgtaggagtcgagcacgtcgacgatgccggccaccggcaccagatcctcctgcggctcttcgcggcggctatcacggtcattgcgatcgctacgattatcgcgatcatcatagcgacgatcatcatcggcgttgtcgcgatcacggccacgcatgcggcggttacggcgatcgttgcgatcattacggttatcgcgatcgttgcgatcgctacggtcgcggcggttacgacgcacaaactcgtgatcgtcgttctgctcgccgtcttcggacgtttcctcgtgcttctgcgtgggcagcgtggccaggatatcgtcgaggtcacgcacggtttcttcgctgttttccgcagtgcgacgacggcggcgaggctgctcgtcctcatcatcacggactcggcgaatcagcggaacttccacgtcctcatggcgctcgcggcgacgctcggtatgcgctgcatctcccaaatcgagcgtggccagcagatcgccggcctcatcggccttcttgcgcggcttgcggcgagcgaaatcggactggtcgtcatcgcgacgatggcgggccgcacgcggttcggatgcggcatcatcggcggccttacgacgggtgcgtcgcggttcggtctcgtccttcttggcatcgtcggccacgggaagcggcaaatcgagctgcggttccgtggaggccggagccggagccggcgactgggtggccacgtcagcattgtctgtggtattggcctcagcggcatcggactgcggagccttgacgaccttggcggttttggcggccttgggagcgcgcacggtcacaccggccggcggctctccaccattgcgcgccgcctgcagggtggcgagcagctcgggcttgcgcatggtcgacgtgccgcgcaggcccatctgtttagcgagctctttgagctcaggcagcttcatatcctcaagattctggctatttgccactggttgccctttccataccgaacagacccatgcctatccaggcgttaagagtgattattgcggttgcaccgctcatgaatgttcgctgcgtctctgagttttcacgaacgtcgtttactgtacaacgccaactcgaccaacgcaaaacggcccgccgaaaaccaaaaaagctccctctgtgacgagggagctcaacaaggtttattcacttttcttcgtggtaggacttttcggtgttgacggaccacacgttcttcttggacgtcttgccggtcttgatgttgccgacggcctccatggcggtggccatggagtggtccatgttgttgtagcggtgctggccgttgcggcccacgcagtagaggttgccgaagccgtcgaggtactcgatgagctcgtccatgtgctcgtaggtgtcgaagtaggcggggtacgccttcttgacgcgctcacgatgggagtcgatgacctcgtccgggccgttgatcacacgcatgcgggtgagctcggagatcgcgaacttggtgacgtcctcctcgctcatgttccagaacgagtcgccctcctcgcagaagtactcgaggccgacccacacggtgtcgtccacgttcttgaccaggtacgggctccagttgttgaagatctgcagacggccgaccttgtagcccgggtcctgcacgtagatccagcagtccggcacgatcggcggattgccgagggtggggatgttggtggtgttcttgagcttcaggtgcttgaccagcaggcccacggtcacgaagtcgcggtacggcaggccgttggccacctcggtcatatcggccggggcgggcttggaatcagcggcctcgggatcgtcgccggccgcgtcgatggcgttgaccaggtccttgaccggcatcgaggagatgaactggtcgccggaaagctcggtgcggttgccctcggaatcctcgtacaccacggaagacacggcgccatcggtctggcggacctcgaccaccctggcgtcggtcagcaccttgacgccggcggcctcgcaattggactcgacggtctcccacagctggccgggaccgtacttcggataccagaactcctcgatcagcgaggtctcgacctccgcgttggagcgcttcctggggctaagcttctggaaggcgttcttgagcacgcccatgatggacaggcccttgacgcgctgggcgccccagtcggcggagatctgggaggggtggcggccccacagcttctccgtgtagccctcgaagaacatcgaatacagcttgcggccgaaacgattgatgtagaagttctccaggttgtcttccggcagcttgtggaacatggacttcaggtagctgaagccggccaccatggtgagcttgaagcccatggccttcaacgtgttggggctcagcgaaatcgggtaatcgaagaagtggcggttccagaagatacgggacacgcggtggcgcttgagcatcaccttgtcctccgtctccggatcggggccgcccggctccatgtcgtggtcgcggccgagcttcttgtcatcataggagggtgcgccctgcaacggcagaacggtcttccaccaatccatgatgcgttcgtctttggagaagaaacggtggccgccgatatccatgcggttgccgttgtgcttcacggtgcgcgagataccgccgaattcgcgggtcccctccagcacggtcacgtcatagttttccgcgccgccgtccttgatgagttcccatgcggcggtaagtccagccggaccgccgccgataatcactacggattgcttgtcggtcattatgctccttataaacgcaaaatcagagacagtttactagaagccccggaatcgcacaccgaaagatgagcgaatgcttacagaattctcccgatatacgaccgatgcgccgtcttccatcagcagaaaggcgacgcatccaatcgtgaggtaggggtattcggcaacgctgcgtcacgcacagcgcggcgaatcggtttggtcttgggctaattcgtcagcgacgaaccttccatagattcagcgagattcctgcaagtgcaagcagcatcatcttctatcagccgcaagcaaacaagacacacgatggcaaggttacgagtttgaacttttgctatgcgttgtatgaacaatgcgcgacgccccgccgtaagatgacggaatgccgcgcattgtcaatacaggctgtatcagacgattgcctgtcagtgaatatcgtcgggaatgtcgatatcggttttctggacttcctcgacgttcacgtccttgaaggtcacgatgcgcacggacttgacgaaacggctggaacggtagacatcccatacccatgcgtcagtcagctgcacatcgaaatacacgtcctggccagcggaacgcacgttgaaatcgaccttattcgccaagtagaagcgacgctcagtctccaccacataggtgaacagcttgatgacgtcacgatattccctatacagcgcgagttcggcgtcggtttcgtaattgtcgagatcctcggcactcatgcttgtttactcactcactttccgtatcgcgtttgcggccgcggcccagcgtacgccaccatgcttcctttgagggcttgcgttccgcctggccgtacggccagttgctttcctcttcgagactgtggcgcgtgttcttctgcgtatcgtcgtggtgcccggcctgtggctcgactggctgtgcggccgccggcgtctgggcctgggactgcacgtcactcgtcgtgacggcggctgcctcaccacgctgtgccggctcgggttccggcttgttctgctggatggcgatggaatgctcacgcgcggacagcgcttccttgacacccgggttgtcctcaatcaagtgcataccaaaagcgtcaagcgaacgaatcgggtcgtactcgtcgaccaacgtgtccatgacgataaggtcctggtatttgttgttttcgacatcccacaacgcgtcgcgcgaggtgccggacggcacgaagccgagcgactggtagaccgaaatcgaacggctgttcttttccggcacgctcacccagatgcggtgcatgcccaggccggccggttcgggcgcaaagccgtaagtcatcacacgcggcatggcgtcacgggagtagccgcggccacggtactcacggcccaagatgatctggatgcgggcggacttggaccagccgtcgatgtcgatgaggaaaatcatgccgatgacattatcggtgctggccgcatcgagctgaccgtcatcgtcatggtcggcgtcagtcaatacggcccatgcgatggtgcggcgggattccgggtcgcccacgccggattcggcgggtgcctgaccggcttcccaggcttgggagcggcggacccatgtgtgtacgatggcgcgttcggtgaccgcatccttgccggtgatcttggatgcgccatagaaggcatcaagttcatccaaacgagccaggtcctcgacggtggcggggcgcaggtgcaccatttcgccacggattggcggaatgacgatgctctgtggcagatcgcgcttcagttgcgcttcggtagccatgctcagcgtctcgttggttgcggtcatcggtatacatcccccggttcggcttgtttcggctcacggtccagtgccgaacatatcttactcgactgggtgaacgctggaaatgctctgcgacgactttcttacagaatcaataaaggctcccgctggcgggagctgtccaacgaatttgaactggaggatttccctacaaataagtgctcccgctggcgggagctgtccgcgaagcggactgagggtggtcatccgtacatggcgaccaccctcagtctcactccgttcgacagctcccgccagcgggagccagtgaatctaatcagcccttgatcttgcccatgacgaccttggtgacggccttggcgtcggcctgaccgcgcgtggccttcatcacggcaccgatgatcacgcccatcggcttcatgttgccgctcttgagtttctcgacgacatccgggttggattcgaacgccgcgtcgacggccgcctcgatggcaccgttgtcttcgacgatcttgtagtcgtgcttcttgacgacttcatccggagtgccttcacccttaagcacgccttcgacggtctgcttggcgagcttgtcgttgagcttgccggaggcgatgagcttctcgacctcggccacatcggccggggtgatcggcagctcttcgagggacatacccttggcgttggcttcgcgggaaagctcgcccagccaccacttgcgggcaccggcggccttggcaccggccttgacggtttcctcaatcaggtcgagggcgtcggcgttgaggatgtcgcgcatctgcagatcactcaggccccactcagacttgaggcggttgcggcgctcacgcggcatttccggcatctgggccttcatctcctcgatgtgctccttggtgatgtggagcatgacgaggtcggggtccgggaagtagcggtagtcgtcggcatcggacttcagacggccgccagcggtggtctgcgtagcctcatcccagtggcgggtctcctgcagaatctccttgccgtcgtccagacgagcggcctgacggcgaatctcgtactggatggtcttctcgatgccgcggaacgagttcacgttcttggtttcggaacgggtgccgtacggggcgtccgggctcgggcgcagcgagacgttcacgtcggcgcgcatgttgccctgctccatgcgggcatgggagatgttcagcgcgcgcacgatgtcgcggatggcgcgcatgtaggcaccggcgatttcgggagcgcgatcgcccgcgccctcgatcggcttggtgacgatctcgatcagcggcacgccggcgcggttgtagtcgaccagcgaatgatcggcgccttcgatacggccgtcggcgccacccacgtgggtgttcttgccggcgtcgtcctcgatgtgggcgcgctcgatcggcacgcggaagacggtgccgtcctccagttcgacgtccaggtagccgttgccgttggtgggcttgtcgtactgcgagatctgatagtcgcgcggcatgtccgggtagaagtagttcttgcgggcgaactggctccactcggcgatttcgcagtgcagggccaggcccagcttgatcgcgtaatcgacggcggtcttgttgatcaccggcagggagcccggcaggccaaggctcaccggggtcagctcggtgttcggctcgccgccgaactcgatgtgggccgggcagaacagcttggtgttcgtggacagctccacatgggtttccagaccgaagaccacatcgtacttcttggtggcatcggcgtacttcatcagtttttcagccatgatgttgtttctttccttccgatgctcacttgcccaggccgtcaagccacggggtcttgaggtcgttccagatcgggccgttccagctgtcttccagcgcggcttcgagggccgcagccggcttgtacatgacttcgtcgcgctgctgcggggcgatgaactggaagccgacgggcaggccgtcgtcggacaggccggccgggatggacatggcaggcacgccggcgaggttggccggaatggtggcgatgtcgttcatgtacatggccagcgggtcgtccatcttctcgccgaacttgaaggcggtggacgggctggtgggggccacgagtacgtcggccttctcgaaggcgttgtggaagtcccggatgatcagcgtgcggaccttctgggccgaaccgtaccaggcgtcgtagtagccggcggacagggcgtaggtaccgaggatgatacggcgcttgacctcgtcgccgaagccggcctcacgggtgtaggccatcatgttggcggcggtctgaggcacgccggtcggcggcatcacgcgcaggccgtagcgcatgccatcgtaacgggccaggttggagctgacctcggacggcatgatgatgtagtaggcgcccagcgagtagccgatgtgcggaaccgagacctcaacgacctcggcacccatctccttgagcttgtcgacggcctcgttgaagcgggcctcgacgccgggctggaagccgtcgccgccgagttccttgatgaggccgaccttcatacccttcagatcgcgcttggcgccttcgcgggcggcggcgaccatcgggcgcgggccttcggggatggaggtggagtcacgcttgtcgtggccaccgatgatctcctgcagcagtgcggagtcgagcacggtgcgggagaccgggccgatctggtcgagcgaggaggccatggcgatggctccgaaacgggagacgccgccgtaggtgggtttgacgcccacggtgccggtcagggcgccgggctggcgaatcgagccaccggtgtcggtgccgagggcgatcggtgcctcgaatgcggcgactgcggaggcggagccgccaccggaaccgccgggcacgcgctcggtatcccacgggttgtgggtggtctggtaggcggagtgctcggtggaggagccctgggcgaattcgtcgaggttggtcttgccgagaatcggcatgccggcggccttgagcttttcgatgacggtggcgtcgtacggcggcacccagccttcgaggatcttggaggcggcggtggtctcaatgcccttggtgacgatcatgtccttgatggcgatcggcacaccagccagctcaggcagggcggccttgtcttcggcggacttggcgtcgaaggcgtcggcctgctcgagagccacatcgccggaaaccttcaggaaggccttgatggacggctcggcggcttcgatcaccttgaggtgggcttcgacgagctcacgagaggtgacgtcgcccttcttgatggcagcggcctgctcggcagcagacagtttgacgagagttgcggtttcgttgctcatcgattactcctcgcttcccaggattcgcggtgccacgaacatgccggcctcggtcttcgggccaccggcgagcgcctcttcctgcgtgagcggggtttcggcgacgtccgggcgcaggtaggcttccagaggaaccgggttggcggtcggcggcacatcgtcggaggcgacttcctggaccttgttgatggagtctgcgatgacgttcagttcgccctgcagacgggtgatttcctcatcggtgagcgcgattcgggccagatcgcccaaatgcacgatttcttcacgtgaaaatgttggcatggccataactatatgagccgtatgtgacacgcagttgtcgggaagcctcattttcccgcctactggagcccttcagcgaatcagaagctcaagccggtcgagcatttgccccgctgctggcttcttcggcgaggcaaaaccgttgccggaccgcaagttcaccttactgagacgactcgcagcagagcaaaaccgcgagctgaccgatgaaacgccccgctcagccatcccagcaaaacaaaaccgcggtccaaccaataaaacgccccgctgagacgccccgcagcgaggcaacgccacggcccaaccgcaaatgtgccccactgaagtatctgcatggccaccctaataagctcacaatgagcccaaacacacctacatcgaacatatgaacgacaatcgccctgcgcccctcgccagttatccacattttgcatacccacccaaaagaatccacataatcagtccaatacggtcagatgcctgataatcaggcaaaaacacacatctaggcaccgaagctagaaccacataaccccagacagatagacaccgtgttcaccattggcataccgtcgaatcatgaaacatcacaaagcagtggacatactcatcacgaaggctgaagcaacgcaacagtgcgcttatggaacaaccaaggcacaccgctcggcgctggctcggcgcgtgcaggcgcgcgaactcaaacgtgtattccccaacatgtacgccgcttcggaatactgggattcgctgcaacccgacgaacgtatcagacatattgcacgaactcttcataacagacatccggattgggtgttcgccggggtcacggcagcggccatccacgattttgaacaccaatggcatcttcatgctggcaccatcactctcgccacaacatcacgaggccccaacgccagcagtgcaaaggtcaaacgcatcttcacgtcaagcagcacgccagaatatgccaatggactcccggtgaccagcaaagccagaacggtggtggattgcgggctgtccgtcgacttccgatttgcactgcccattatcgattcggcgctgcgcaacggcgtcgccatcacggacattctgaatgtgtgcagcactatgcgacgtgattgcacgccgatattccgcctactgcattatgccaatccggcgagtgagaatggtggcgagtcacttggacgaggcaccatcatcgcaggcggcctattagccccagaactgcaacaaaacatcaccgacccgcaaaccggtgctctgtatcgcgtggatttcctctggcggctacctgagaatcggcttatcgtgggcgaattcgatggctatgaaaaatatgtgaacccggatatgaatgaccgcaagggtgttcgtggtgcagttcaggcggagaaagaacgggagacggcactgtaccgggccaaagtcgacaccattgtccgattcacctatgaggaggtgatgcaacaacatcctttactcaataagctgcgggcagccggcatacctcatgctggaacagtgatgggagctggttaagcgcagtgaaccacggtggtcaaatccatggggtcagagtcaccagaaccatggtcactgcagaactgccaaagcagtaacccgcgttatttgatatctgatatccgcttttccggtgatgatgagaccgccgatccatgcggcggcagcccaggcgatgagaatcaggccggactgccaccattcgggaatccagtagtccggtttaacggcttcggccagtgtggactgcgcggagctgctgatgcctgcggcgagcaggatgccgacgatgccggcggcaaatgcgaattaatgccgcggcgatggatttggtggcgtagatcatgcctctaatgtggcccatattaggcagatgcggcaggattgtcggcgcatggctacacgcctgatacggcgtgttgggcaatccatgcgtgcatggccacggccgccgcagcgcctgcattaatggagcgcacggaaccgaattgagagatgtagaccacatcgtcggccaattcgagggccttctcgctcaatccggggccttccgcaccgaagagcagcaggcaccgcttggggaaggtataggtttccatcggcactgcgccgggaatgatatcgagggcgatgacgcgggcggcttgaagctccttgatgcgcgcatcacaagcatcgatttcggccagcagctcatgaaggtgcttgttgtctccatccacagccacatcatgcgcatggatggcggcggcaccggccttggctcgttcataggcgatttcaccggcgatgcgatgatgccagctttccaccagttcggcgatggaggggtggtgttcgacgtgctggtacagttcggtcatcaacgcgcccttgcgattccacttatgtggaccgacaatgtgtacgcgcttggcctggaaggcgttggcggtgcggaccatggaaccgatgttgaaatcgtgggtccagttttccaccgcaacttcgaagtcatgacgccctcgagcgtcaagatcggccttaatggcagcgacggtccagtagcggtaacgatccaatacgttgcggcggtcgccgtcattcaacagcaccgagtcgaaacgaccgtcataattcggagaagtcggatcgtcgggacgaggctcgccgggatgggtctcagaccacggcccaaggccgatttcacggaattccggttcacctgaagctttggcagccaaagaaatctggttgggtgcgtgcaatctttctcctcgataacgctattcaccggttcctcttagtcagcttcgctgctcagcccggctgactttatgcgagggaagtcaaaggtggatttaccgcagttcggattcgtcgaagacctggatgaaggggagcgtttgctcgtcgccggtggaggggttgaccacattgatgtctttggcaccgccaccgacgagcgaggcgatggccacgaccttggcacccagctgctccactatgccaaagtcgaggctcagctcattgccgttgcgcagggtgaccagcgagctggtctgcacgtacgacttttcggacagccaagcatccaacagcaccacacggcggccttcgatggaggggcccttgatggacgggtagacgaagtccatcacgaatccgtctaggtcctcgccacgagaggcggcggcctggatcatggcggacaccatgggcacagatgctgcggtcaaggcaccaacagcatcgaagtcatcaaccgaatagcccgcatcttccaaagcgtcaatcagtacatggcccatgacggtggcggcatggtggtcaaaagtcaccgcggcaagttcggagaacggacggcccaccacatgctccctcagcaaggtggctagctgttcacgcggctccagcatggcaaagtcattgtggctcttcgcgacggcgaggtccggggtaccagtggggcggaatccagattcagtcatgactccagactatcgcctgaggcagtcagatgagtatcaccctcatcggccggcaccacttcaggggcggacagttcgctcacattgcctttgtctgattcgatgatcggtacttcctcgatgatcttggtcggttcgattttttgcagcttgcgagcggtgggcaacacacggcgttccaaactggacgcgaacttgttgtaagcgctgactgtcttggtgatctgggtgcccaatttgatggcataatcacccaacgtggagaaccgttcgtaaagttctcgggacaaatcgaacagctgcttggcgtcatcggtgagcgactgctgctgccaggcataggccacggatttcagcacggcccacagcgtgaccggcgaggtgagcgccactttgcgagagaacgcatcatccatcagtgtggagtcggcttcgagcgcggcctgcaacagcgcctcattggggatgaaggccaccacaaaatcgggtgccacatcaaaggcattccaataggccttttcgccgagagcacgtacatgctcgcgcaacgccttggcatgggctcgtaacaaatcatcgcggcgggcaatatcctcggggctggcggtgtccgggatctcgcaggcacgctggtaatcggcataaggcactttggcatcaatcggaatggtcttgcctcccggcagatgcacgatcatatccgggcgcaacgtacgtccatcggcatccgtgaccaccacctgaatgtcgaaatcgacatgttccagcaatccggcagattcgacaatgttcttgagctgggcctcgccccacgcgccacgcaccttgttgttgcgcaatgcggcggacagggaactggtttccttgtccaaacgggcctgctggtcgttgagccccttgagttgggctcccaatgcgcccatttccctcttgcggccctcttcgatctgcgtgaccttgttctgcaaggtatcaagatttttggccactggcgcaagcgcctcgagcaccttgctctgttctttcaaacgtgcttcctgttcagcacgcttggcctcggcgtcccgagcatccgcctgacgcttccgttccgcctccgcagccacacgctcacgttcctgctgaatgcgaatctgctcagcctgctgcgcctgggcaagttgtgacttggcgaaagccaattgctggttcacgccttcaatctgagcctgtgcggcagcattgcgagcactgagctcagcattctcgaatcgcgcattctccagcgaggtcttggcctcctccagctcctcgcttttgacgcctcgagccatctcctgacccttatggcgccccagcacgaagccggcgaagaggccaagccctgcaccaaccactagcacgacgatgacgataatcacggttcctatttgctcaaacatggtacccagtatgtcatcgatggtgaatgacggtaaatttttaccgaactcgacgatttcaagccgttaaacggacgctcagcagcccacattggacgcttggccttatcacagtcgagcatcaaccgttattatgctgtgtcgtatccgagcgtcagacggcctttcatgatttgccagcgcgcgtcatcatgcggcagaactcgtcacgatttgacgagacgcgcaatggccgcggaagcctccgcaagtttttcatcggccacctcgccgccctggaccgacgcctgccgcacgcaatggttgagatgatcgtccagcagcaataacgccacggatttcagcgccgaattcgacgccgaaatctgcgtcagaatatcgatgcagtatttgtcatcctccaccatctgcgtgatggcgcgcacctgcccttcgatacggcgtaatcgtgcgatgaccttggccttgtcttcgtcataaccatgcatcgcaacccccctgatacttatccgtcagctgaacacaccccatcatataccctctaggggtatagggtatacactgttgttcagtgcattaggaatgggaaggaacagttatggagttcagcatcttctcgaccgccacggcgctgatagtggcggccgcattgacatggctggtcctgcggttcttcttcggaacgcagaaggcaacggccggggccatggacgcttccgacgaacgccaatccgcgacgatcaccgtcaagggcgggtactcccccgccgtggtgagcatgcgtgcgggtacgccgatcacactgaccttcgaccggcaggagaccggcgaatgcacctcgcatgtggtgtttgctgatctgggacttgacgccatgctgccgggcaacgccaccaccgacgtgaaactgccggcgttgccggcgggcgagtatccgtttgcgtgcggcatgaatatggtgcatgggttgttgagggttgagggagaggacggctcggatgagaacacgccccttcctcatcctgatgcttcgtatacggcacctaccgccgtggatgcggcggaggccgatcggcgagaggcggctgaacgcgccaatgagatcaaggcgctgacgaagctggtgattgtgggcgcggtactgacgttgccggtattcgccgtcaccatgctgcatatggccaatcccacgctggtgccgcattggatggtgaacccgtggttgcaggccatcctgatcacgccggtgatgttctactgcgggcgtccgatccacacggtcggcttccccgcgttggcgcatcgctcccccgacatgaactcgctggtctcactgggcacttcggccgcctacctgtattcgctggtgacctgcatcgccccgtgggtgttcccggaaggctcgcgcgaaccgtatttcgaatcggttggcgtggtcatcaccttggtgctggtcggccgccttctggaaaccaaggcccgcgaaggcaccggcaaggcggtgcagtcgctcatcaaactgcgcccgcgcaccgcgcacaaactcaacgccacttccgcagacaatgtggacggcatcgaatggcgcaatccggcgtatttcacggacaccgacatcgacgccatcgccaccggcgacctgctggtcgtcaagaacggcgagcgcgtgcccacagacggcatcatcgtggccggcgaggcgcatatcgacgaatcgatgatcaccggcgaatccaagccggtttccaaaaccgtcggcgatccggtaaccggggccaccgtgctgctcaagggcgactgcgtgatgcgcgccacccaagtcggcgcggacacggtactctcgcagatcgcggcgatggtggcccgcgcccaggcgaccaaggcgccggtgcagcagctggccgataagatcgcccggtatttcgtgccggcggtgatgatcatcgccatctggacgttcgccatctgggtgtcactgggcccggtgccgcaactggcgcatgcgctggtcaccgcggtcagcgtgctgatcatcgcctgcccgtgcgcgctgggactggccacgccgctgtcggtgacggtctcactgggcttgggcgccaccaacggcgtgctggtcaccagcgccaaggcgctggaacaggcgcgtcgcatcggcaccgtggtgttcgacaagaccggcaccatcacgcgcggcgtggtggacgcggccgccgactgggacaagccgagctacgagcaggacacagtcaaggaaggctcgcgcgaggccatcgcggcgttgcgcgcacgcggcatccgcacggtgatgctatcgggcgacaaggccgaggtagccgggcgcatcgcccgcgaagtcggcatcgatacggtgatctgcgaggtcaagccggacggcaaggcctactggatcgccaaactgcagcgcgaacgcgacgaggccgccgccaagtccgcggatggcgcctcccgcacggccgcgcaatcccgcactctgattgcgatggtgggcgacggcatcaacgacgcccccgcgctggcccaggcggatctcggcatcgccatcggcaccggcacggacgtggcgatgcagtcggcggacgtgaccttgatgagcggcgacttgcgcggcatcatcaagaccatcaacctgtccaacgccacgatgcgcaacatccgcgagaatctggggtgggcgttcggctacaacgtcatcggcattccggtggccgccggcgcactctacccgttcaccggctggctgttgagcccgatgatcgcgggtctggcgatggcgttgagctcggtgtgcctggtgctgaacgcgaacaggctgcatggggcgaatatcaacgtgggtgctgccgatagcaccgctggctcgggcaacagcacggcggatatcgaatcagccggatcggccgaatcagccaacgccgccaacatcaccggctccaccacatccaacgcgcctcacgagccgaccatcatcatcgacgatcgcaccacgctgaatccaaccaatcacgtatccgaccaatccaataatccaaccaacaaggagaacactatggatatgggaatgcacatgcaccacgtcaccccgaccgacggcgaaaccgccaccgacccggtgtgcggcatgaccgtggcggtgaatgccgacgcgatcacgcgcgagtatgagggcaagccctattacttctgcggcgaacactgcgccacgaacttcatgaaggccccgcaggtgttcctggagcagtagtctctgcgtttacctgattcaacgacaatggcctccgcccaaaacgagcggaggccatttgcatatatgaatcaatcaacgaatcagctggcgaagaagaacacgaacagccaagcgccgatgatggcgccgatgatcggggccacgaccgggatccaggcctcgccccagcgggaggagcccttgtgcgggatcggcagaatggcgtgcagcagacgcggcatgaggtcgcgagccgggttcaggccagggccggtcgggccacccatggaggtcacgaggccccacacaatgaagccgacgacgatggaggcggcggcgtaatcctgcttgccccaagccagggacaggcagcacagggcgccgaagacgagcaccagggtgccgaacatctcgttgaggaagtagttgaccttctggttgtccgcgtcggtggtgcagaaggtgccgagaatggcgtcggcgtcctcggtctccttgtagtgcgggtagtaggtcaggtagacgatgaactggccgagcagggcgccgagcagctgggcgacgatgtacggcagcacgtcgctccacgggaacaggccgttgacggcctgggcgatggtcatggccgggttgatgtgcgcgccggagacgctaccgaacataagcaccgggaacatgacgccgaagccgtagcccatggcgatgttcaaccagccggcgtggtgacccttggtgttcttgagctcgacgttggccacggagccgttgccgaagatcatcagaatggcggtgccgaagaactcggcggccagcttggtaaagagagagtattccactgcttcttcttttctcttcgccgcgcaacaggcatggctgactgttcacggcattctgtgtgattggaaatccgttcgcggagccggcgacgcgatttacgctgggcgcgaaagcaaacgtggcgattgtacactttgccccacgacgaaatgctggcaggatgcgatgtcgaatgtccagccgaatgcaatgcccaaaaaagccaccggaatcagccgaagcgaccttgactctcagtggttgcgaatgacgttgcgcaggggtaggacgctggtgggcgagacggacagttcgtcgattcctaggcacaggaacgtatcggtcaggctcaggtctgcgccaagctcgccgcagatgccgcaccagatgccatgacgatgggcagcctcgatagtcatctggatcatgcgcagcacagctggtgaatgcgggtcggcaaagcgttcgagactcggggtctgacggtcacaggccagcgtgtactgggtcaggtcgttggtgccgatggagaagaaatcgacttcggcggccagctcgtcggccatgatgaccgacgcaggcgtctcgatcatgacgccgatctggatactctcgttgaagtcggtgtgctcgccgcgcagctcgcttttggcttcttcaagaatccgcttggcgtcgcgcacctcctgcaccgaggtgatcatgggcagcataatggcgatattgccgtatgctgaggcgcgcaacaatgcgcgtaactggactttgaaaatctccgggcgggtcaggcagatgcggattgcccggtaaccaagcgcggggttatcctcgtggtccagattgaagtagtcgacctgtttgtccgcgccgatgtcgagtgtgcggatgatgaccggacggtcgcccatctcctgtgcgacttgtctgtatgcatcgaactgaaattcctcggtcggccagtcctcgcgttccagatacaggaactcactgcggaacaagccgatgccctcagcatcgttggccagcacggcggctacgtcagagggccggctgatgttggcgtacaggtggacccgctgaccggacttggtttcggtgggcttgcctttgagcttccgtagtaggctcaggtgttcctcagcttcggccttcctgcgctggcactcggtcagcgtggcctcgtccgggtcgacgaacaccgcaccgctggcgccgtcgattacggcaacgtgaccgtcatcagtcgggtcgaaggcgtcgccgataccggtgatggcgggcaggcccatcgtgcgcgccagaatcgcggtgtgcgagttcgctgagcccttggcggtcacgaggcccaaaaccttagcgcggtcgagctgcgcggtctcgctgggagcaagatcttgggcgaagatgatgtggctttcgccgttctgcgcaatcccgttctgcacagtaccgttctgcacagcatcgccttgtatactgccatcctgcgccgtgctatcgcgtttgccttgcagcacgttcatcacgcggcgagaaacatcctcgacatcagcggctcgagcctgcatggtcgagctatccatcgcagcgaacatggcggcgaactgttcggcgacgctcttcaccgcaaattcggcgttcaccttgtcttgcgcaatcaaaccttcgacgcatcccgcatagtccgggtcctggagcataagccgatgggcgtcgaacagctcggccttgttttcgccgaactcagcggcgacgttgtcacgcagttgcttgagctgagcgacggccatgtcacgggccgcgcggaatcgatccatctcagcctgcggatcgtcgattacgcggcgttctacagcatgatcggcggcggcgagcacgcggaccgtgccgatagcaatgccagcggatacgccgacgccctgtatcgttctcattacaggtgctccttgaggaatcgctcgaactctgcggcagcgacagcttcatcgttgccctgcacccgaaccgtaacctcgtcaccttgttgaacatcaagtcccataacaccgaagatacgcttggcatccacggatttgccgccgtaggcaacggtgatgttcgactcatattcccgcgctttggcaaccaaccggccagctgggcgggcgtgcatgccttcggggtcggatacggtgaacgcgaatatctgagacatgacgccgctccttacacgtccggccgtcacgcgcgaagacggcctttccgcaccagctacggactgatgctggaaaaaacaaaaaaaccggaatctttcgattccggttgtctgtgcccccgcagggattcgaaccctggacacgctgattaagagtcagctgctctaaccaactgagctacaggggcttggttagatgttgaagtgttccttgcaacaggtgataaatatactcagatttgaagcgaatgcaactctcggcgtgtcgcgtctatttccggcgtttttgctaatacaaaaatcccccatgcggcgcgaaccgcacgggggatgatgcttaagctcagactcttggtctgtgtgattccagcactaggccggaatgactcactcggccacgaccttcacgaagaaggaagcggtgatctccgggtggagggccaccttggcggggaaatcgccggtggtcttgatggtctcgacctcgatggccttcgggttcaccgcggccttgtcggacagagcgatggcgatggcctcgttggagataccaccgaacagcttgccggactcggacaccttggcggcgatctcgacggtggtgccctcgatggcggccttggcggcgacggcgtcctcgcgggtggcgacggccttggccagacgagcgcgcttcatagcggtgatctgagcctcagcacccttggtccacgcgaaagcgaggccctgcgggaacaggtagttgcgggcgtagccggccttcacgtcgacaacgtcaccggagtggcccaggttggacacggtcttggtgagaataaccttggtttcagccattgttcaaagcctccctaactcagcgacccgaagtggcgtacggcagcagggccatctcgcgggcgttcttgatcgccttggacagctcacgctgctcctgcacggtcacgccggtgatacgacgggaacggatcttgccgcgatcggaaatgaacttacgcagcagcgcaacgtccttgtaatcgatctcggtgaccttggcggccttcagcgggttcggcttcttcttgaacggcttgaccggcggttgcggcctcttacgtgacatgatgttctccttataaatcttgatattgattgctgctggcagcggggaggtaagtactgatcagaactccgggtcggaatcgtcgccgccgccgaaatcggaggaagcgccgaacgtggagaagctaccggcatcagatgcaccggcattgctccacgggtcggccgcaggagcggacgggttggcgggagcggcaggctgctgggagtatccagcgccaccaccctgatagccaccgttgtaaccgccctggccaccggcataaccaccttggccactctggttgccatagccctgattgggttgctgaccaccctggaaaccaccggaacgaccttggaaaccgccctgaccggacgactggcgggtcacctgtgcggtggcgtagcgcagggagggcccgatttcatcgagctgcatctccacgacggttcgctgggaaccatcctgtgcctgataggaacgctgctggaggcggccggtggcaatcacgcgcatgcccttcttcagggactgggcgcagtggtcggccaggtcacgccaagctgagcacctcatgaacagcgcctgaccatcctcgaactggttggtctgacgattccaggttcgcggggtggaagcaatcgtgaagctcgccacggtcgcgccgctgccaatagtgcgcagctcggggtccgcagtgaggttgcccacgatggtgatgacggtttcgcctgccataacggtccttcttacttaccttgaataccagctgttcagctgactaaacgcttgattcagcccttacgaaggatcttcgtacggatcacggattcgttgaggttcagaacacggtcgagctcatcgctggtagcgggctcggcggtgtacttcaccacgacgtagttgccttcggtcttaccggcaatctcataggcgagcttgcgacggccccagtaatcgggctcatcgaaagagccgccttccttggtgacgagttccagatactgctcggtcagcttcttcagaccgcgctcatccagctcaggatcggcgatgaacatcagttcgtacttgtgcgcagacatcacccacctccttcggactattcggccacggacgttccgtggcaggagtgtgtatgcgtgttaatcatagggcgatgcagatgcacttcaccctgtgagcaacttacttatcttatggtcagggcgggacagtgccgcatgttcatcaacgattgcagcactcttacaacacagccccacttcacggcacgcgctgcggtggggtgcttgtacactggttaaggcgtaaatcacacagcgactcaaacaaaggatgcgaacgcatgtcggcgattcttgaaggcactccggataaacgactcgtattggtcacgggccgcgcctaccccgagctagctgagaaggtggccgaatgcttgggaaccgaaatcctcgaaaccacgtcctatgactttgccaatggcgagatgtacgtgcgtttcaccgaaccggtgcgtggtgcggacgtgttcgtgctgcagtgtcattcgggcgatatcaacaagtggatcatggaacagctcatcatgatcgacgctttgaagcgcgcctccgccaagtcgattaccgtggtggcgcccttcctcggctactcgcgccaggataagaagcaccgcggtcgtgagcccatcaccgcccgtctgattttcgatctgttccacgccgccggtgccgaccgcattatgacggtcgatctgcacgccgctcaggagcagggtttcttcgatggtccggtcgatcatctaaccgccatgccggtgctgctcgattacgtgcgttccacccttgatctgggcaacaccaccatcgtgtccccggatgccggccgtatcaaggtgtccgaacagtgggccgccaagctaggcaatctgccgctggcattcatccacaaacagcgtgatattactcgtccgaaccatgccgaggcacatggcattatcggcgatgtcgacggccgcgactgcgtggtcatcgacgacatggtcgataccgccggtactatctgcgaagccgtgcgcaccctgaacgaatccggcgccaagtcggtgacgctggtcgccacccatggcctgctctccggcccggccgtggagcgcctgtctcactgcggcgcgcatgaaatcgtgtttatggacaccgtgccgattcccgaagagaagcgcctgccgaatatgaccgtactgtcttgcgcaccgctgctggccgcgggtattcgctccgtgttcgaggaaggttccgtggcgattctgctcgacggcctgcccgaggacatgcgtccgcgcaatatctatgcgtgattgatacgccgaaaatccttacaaaaaaacgccgcttggctattgatcaagcggcgttttttcgtatagctccaatcagatgaaggcgcgctcgccgaagatggcggtgccgacgcgcacgatggtggagccttcttcgatggcgtaggtcatgtcgtgggtcatgcccatggacagttcggtgcagtcggccgtgccttcggcaccggaggcaataatctggtcgcgcgtgcggcgcagatgcgcgaagcccgcacgaatcgtgcgctcatcatccacatgggcgccaatggtcatcaatccctgcaagcgcagtccgcccatcgcaccgatgcgctgggccaagtcgatggcgtggctgggtgcacagccggacttcgattcctcgccggattcgttcacctccagcaacacgccgaccgtgatgccgcgcatggtggcacggcgggcgatcttttccgccagttcgatggaatccacggattcgatggtgtccactaccggcagcaccttgccgattttattggcttgcaattggccgatgagatggaacgggacatgccgtccggccccggccaaggcatcatcgcccgaagcggcgtcgcggaccacgcccagcgcataccctcgttcggccaggcgcttcgccaggcccggggccttgacggtgacctcctggggacggttctcgccgatgcagcgcacgccggcgtcgatcgcggccaggatctcacccacgtcacgggtcttggtggcggccagcagccgcaccgacccgctcctgcgaccggcgacggcctcggcctcggcgatacggtcgagcacccgatgcacgccatcggcgatctcattcgcgcgcccgcgctcgatgacctcgttcgtcaggtccttatgctccatgtatgccgtcattgctgttctccccggtgaatcgacattccatcatacccatacgggaaggcgttgcgccggcgcctcatcgcttcttggttttgcggccctttaagtagatgtcgatgacgatccatacgccaagggcgaaggccacgacgtagcccatgaagccgatgaccggaatgccgaagataatcggcttcatgccggcgtagtagacaatcgacgagccaacgaacaaaccgaccacaatcagggccatcgtcagacgattcgccatatccgaaagcagctggaacggctcttcggagccgaccagttccatgttgacgcgcaactgaccacgggtcagcatacgggccacggtcttgagttcggtcatggtgccgagcgtggcatgcaaagcctgatgcccctcaacgcccagcgacttgatctcgtctttggtggcgttcttcagcgatttcgacgtggcgatatggtcggaaatgatttcgatcatattcacatcaggaatgaactcgtccagcaagccttcgagcgtaaccaacgcgcggccgacggtggtcaccgtactgggcacctcgatgttgtggcggccggccatctgcgtcagtgcggtcaggaaagcggcaatgtccagttcggccagatccacggtgccgaattccttgacgatcacgtccagatcggccaatagcgcgggatagtcctccggatcggcctcggtgccggcaaatcgcagcagcccctcggccagagcgggcgaatcctgtttggcgacggcgaaaatcatttctttgaggactgcacgggtgcgctggtcgagccgaccggtcataccgaggtcgataagtacgatctggccgccccggatgaggatattgccgggatgtgggtcggcgtggaagaagccgtcgtcgagaatctgcgtggcgtaattgtcgacgagcttggtgccgatctccttcaagtcataaccggcgtcgatgagctggcccgggtgggagacggagatgccgtcgatgtactccatgaccaccacatgctcggtgcacagttcggcgtacaccgtcgggcagtccatgtatttgaatcgggcggcgaaacgcttgaattcggcgagattgcgggcctcgatcagaaagtcagtctccgattcgaaggtgtcccacagctcctcgaccacgcccttcagatccacgatctgcgaggtgcgaatcaccttagtggcggccttggctatggagcgcatgatggagacgtcctgggccatgatttcgcgcacacccgggcgctgcactttaatggccacatcttcgccggttttcagcgtggcgcgatgcacttgcgccagtgaagcagagcccaacggcttgggatcgatatgcgcgaacacctcgtcggcgggacgcccgtattcggcggcaagcacatccaacaccgtggaatacggcatcgggtcggcgtcggcgcgcagtttggcgagttcgtcgcagaagctttgcggcagaatctcggagcgcatcgacagaatctggcccactttgacgaacgtggggccgagcgcctcgaacatgaggcgcatcttgaccggagtcaggccgtgcagcacgtcgaattgctcgacgattctggtgatctgccccagtcgtttgatcttgccacggcgcgtcagatggtagcgcgtggcgaaatcgttcctgcgtccgaacaatgccagcgtttcgtcggatacgctcggagtcgccttggtaacggcccgcttgagcgtgtccggcgtgtcgacggaccggttcgccgccgcctcacgttcggctttcgcaggcgtcagaatagggtcgaccctgctggaaagcggggtcgactctgattccggcgtagtgcgtgtgagcttggtcactcggccttgccctcgtcggcgggcttgtcggcggcactggtgtcggctgcggcagcagctttgtcgccggcttcggcggcggccttcttggcgtcatccaccgtctcgctcaccttgcgcttgagctcggtgttcagcgccttgccctgctcgaccgtaatctcacccttcttgacgagttcgtcgacgagctcgctgctcttctcatatccggtggcaagggctccgatgcccgccagcaggaccttgcgcaggccatcacccagaagatcaaaatcagccatgatacccctccttcgaggtccgacatggcctggtgccatgtctcgtaccaccaagcctagcgcaaacaacagggcaatgtactagaccctcagactgatttcgactgatttttcgctgattggtacttaccgaggactcaccgagaattcaccgaggacgttcggcggcagccttgcgcgcgttggtggctacttgatcaagccgggcgagctccttggcttgttcgggggtctgatcggacgtatcgaacgtaccgtaacgacgagtcacggcggtttcgataaggaaatcgctgatggcggggtttttaggcagcaacgagccgtgcatgtaggtgccgatcacgttgtgcacgcgcgcgccctcggtatggtcttcgccattgttgcctcggccgtcctgatcgacggtgccgagtggctgaacgccttcgcgcaggaaggtctggccggagtggttctcgtagccaatcacatcgccgaactggtcggaatgctcaacaagattgccgatcatacgcacgttctggcccacggtataagcaccgataacgccgatgccatccagacgggtgccgtccacggtttcaaagtactcgccgaacagctggtacaggccgcagatcatcagcatcggcgtaccgtctgcggcaagcgagcgcagcaggtcggcgcgatggtagaagtcgtcgatgattttcttctggccggtgtcttggccgccgcctcccagaataaggtccacctggtcgggccagtcgtcgccttgattgtactggtggacgaccggttcgtaaccgtacagttccagccggcggcggatagtcagcacgttgccggaatcgccgtagatgttcatgtctttgggatacagggacaccacatcgattgttctggccatgtcacgttctccttgtcgatgtcttcccgctaaggggaagtcttattcctcaccatgtcctcctgcaggcgggaggtggcgcgcgggcgctagagggtggttacttgcccacgccagcgtcccgtacttcagtgatgcggcccagtacggcgcgggttttgagcatggcggtgtaggtgcagtagatgtgcttgtgtgtgccgggattggcgttgacgaatgcggtgaccgcctgttcgaggtcggtgttcgtatcggcgactggcacttggtcataccccaagcgcaatgccatgtcccaggcacgcacaccggagaccatggcgacaccggacgcgcgtaaagaggtgaagtccacgtcccatagccagctcatgtcgcggccgtcggcatattcgtcgttgatggcgatcatggtgtccgcgttggccgggtcgaagctggcgagcgagaggcggaagcccatcgggttcttgaccagcagcagttcgaccggggaaccgttgacgtcgatgacctcgccacggccgaaagccggcgtgacgcgggaaacggcggcgatgagctcgtcggcggacacggcgcaggcgttggctgcggcagtggccttggatgcggcggcattgtcttgcatcaccgcacgtaccacggcgagcgcggcggccgcgttgtacaggttgtagacgccttcaagtttgacgtcggtggcgtagtcctggctgtccatctggaaggtggccttgtggtcgcccacggcggtaagtgtcacgtcggcggggagttctgccgtgcctgcggaagctcccctctccgaggggagctgtccgcgaagcggactgaggggagtactgactgaagggagcggcccggccataccttccaccgacacggtcgtggccatgtcgtcatcggacgggaaatagtggcgcaaatcgtcggcgaggccgaagtatcgcactgtggtgccagccggggccttcgcggcgagcgcggcgatacgcgggtcctcgcggttcagtaccacagtgccggtagtcgccgcagccacatggctgagcagtttggccgtggtgtcgatttcaccgaatcggtcaagctgatcgcgcatcacgttcagcagcaacgcataacggggcttgacctgcttgacgaagtggacggcgtacgcctcatcgagctcgagtacggcgatgtccgcgtccaatttgccgccgaaagtgacttcggtgagcagtgcggagaccacgccgcgcacgaagttcgagccggtcggattggtgaacaccttcaatcccagatcggagagcatcgaggcgaccatgcgggtggtggtggtcttgccgttcgtgccggacaccaataccacgccaagcggcaactgcccgagcgtacgggtcaggaagccggggtcaatcttttctacgactttgccgggcaaagccgaaccgccatgtttggtgacgcgggatgcaaaccgcacgaagcggcctgcggccacggtggcgaacgcataccacggtttgcgggtctgcaccacggacgattggtcttgcgaaacatcgcgtgaaacgttgcttgccatcatcacaccccctgattgctgttgtagtcctgcggcatgtccttgaatttggacgtggcaccgaggaaggcgaggtggaaggtttcggtcgggccgttacggtgcttggccatgatgatatcggcctcgccggggcggtcttccttgtcgtagaagtcagggcggtggaccaggaacaccacgtcggcgtcctgttcgattgagccggattcacgcaggtcggagagctgcggcttcttgtcgttacgcatttccgggccacggttcagctgggaaagggccacgaccggcacttcgagttccttggccaagagcttcagggcacgggagaattcggacacctcttgctgacgggattccacggccttgcccgaggtcatcagctgcaggtagtcgatgactacgagtttcagatcgttggtctgcttcagacgacggcatttcgcacggatctccatgaggctcatgttcgggctgtcgtcaatgaacagtggcgcattctgcatcttggtccagaactggttcagggtgttccagcgttcgggggtgatgtcgtcggcgcggcgcagggcggccatcggaatattggtttcggcggagataatacgctgagcgagctccaccttgctcatctccaagctgaagaccacggaagtcatgttgtggtgcaacgcggcggcgcgggcgaagtcgatgccgagcgtggacttacccatggccggacgtcctgcgacgacgaccatctgtccgggctgcaggccctgggtcacgtcgtcgatgtcgcggaatccggtcggcacgcccttgttgacgagaccctgctgcagtttgtccagctggtcgagcgcgtcgtggaccaccgggccgatggcggcatagtcctgacgcaccttgcccatcgacatctcgtagatctcggactgggcgaggttaaccacatcctcagcctgcgatccctcggcggaataaccgagctgggcgattttggtgccggcggcgatcacattgcgcaaaatggcccgctgatggacgatctccgcgtagtacatggcattggcggcggtcggtacggatgcgacgaggctgtgcagatagtccgcgccgccgaccttgtcgaggttgccatccgccaacagctggttggccacgagcaccacgtccaccggctgactggcggaaaacagatcgatgatcgcgttatagatcgtctgatgcttgggctggtagaaatcggtgacgtcaatggtctgcgaaacttcgccgatggcatccttactcatcagcatgccgccgagcacggccatttccgcgtcgtcatcgtgcgggggcactcggtcgaaaatcgggtcgccgaccgccgccgacgtctgcgcgccgccccggcccgcgcggtcgccacgatcgccacgatccgagccactgccgaacccattctgatacgagtgttcacttccttctgccatagccctcaagtataggaggtggcgtggcgagcggaagatatcgcacgactacgttcattaggtcgattcctcactcattaggtcactgtgcttggtaacaccacaaaccatgcgcttggaatggcggcattctgaggcgctcgatcaatatctctcaaagtccaccgacctaatgaatgcacaatcgacctaatgaacgcatgaaagtgcaagtcgtgccgaatcatcgcgcaccaatttcatcgttggttcaccttgcggtcagcgcggcgacacgctgaagcgtcaaatgtggatagaaaaaatagttatccacattttggggataattctggggataatccactaagttatccacatactggggataacttggtggatagtctggggataacattccgcgtccacaacaggtgcttgcgcaatgtagtcaggcgtgatatgcgtgtgagcgtgcacatagactcttccgacgccaaagccaccagttccggcgataccacacgccgcgatggcttcggaaccccgcatgccggcgcaaacacaaacaccagcaacggcccggccgacgcccgctccaccaaccgtcggatcatggcgctggccctgccgaccttcggccagctcatcgccgaaccgaccttcatccttatcgacacagccatcgtcggccatatcggggatgcggcgttggccggcctgtcaatcggctccaccatcatcctcacggcagtcggactatgcatattcctggcctactcgaccactgcgcaggtggcgcatctgctgggagcgggtcgtcgtcgcgagggactgcaggcaggcattgacggcctgtggctggccttgagcatcggcaccgtactgggattgggattgttcgcggctgccgagccattatgccgggcactgggcggtcagggcgaagtattggaacaagccgtgacctatacgcgcgcaatcgtgctgggtgcgccaggcatgctgatggtatatgcggcgaacggcattttccgaggattgcagaaggttcgtatcacgctgatcgctgcggtgggcggcgcggtggtgaacacggcgcttgatgtgttgttcgttattgtgctgaattggggcattgccggctccggagtggcgacgctgatagctcagtggttcatggggctgttcctggtaatccccgccattctgtggtcccgggcggacggtgcgagtctgcggcctcgtttggccggtattgcggcagccgggggcgacggactgccattgttcattcgtacattggcgattcgtgcggccatggtggctacggtcgcctgtgccgcgcgcatgggtactgccgtgttggccgggtttcaggccgtgaactcctcttggaattttgcgatgaacatgctggattccgtgggcatcgccggccagacgctggtggccacaacgctgggcgctggcagcgtgcagcaggcgcggcggttgacgcgggcgaccgggcgtgcggggctggtcaccggcgcggtaatcggcacggcttttgcggtagtcggcctgttcgccgggcacttcttctcccctacgccaaatattcagacgttgattgccgttggcatggtgacgatgggcatcttcttcccactgcaaggctggatgatggcaatcgacggcattcttatcggcgcgcgcgactaccgctatctggcaggcacctgcacgctgaccgccgtggtgtatgtgacgctcatactcatactggccaatatggtgacgccggcgctgacgagcgacctgatgcgtaccgccgtgctctgggccgcgttcaacgtggtgctcatgggcgggcgcggcctgtccaacgggctgcgcgtgcgctcggacgcatggatgaagtaggtatcggccgcgcgaagtgctgggcgattccgtttacatcgcggcgcgagcggcggaatacatgccgcgcacgatttgttcgcgccacttggaccagccgtattgcttggtgatggtctcaccggcggtggcaccgagcgaggagccgtcggcccgggtcaggtcgaacagcatatccaacagcatcttgtcgtggtgcaagcggtcggccaactcctccgccacggccggatcataggggtccttacccgtggcgaattcggatagggtcaaatgctcacgcaccagcacggtggcccagtcgacgatgtccggcgcgtagcccatacgcttgagaatcaccggcacatggcgggcaccctcggcggcgtgatcggccacgaacgcgcgcttgccgatgtcatgggtaataccggccaacagcaacgccttgaaatgatcgtcatcataccgtcccccggacggtgtctcacgacccagacgcgacgtgacctccaccatatgccgatcgatggtgtaccggtgggcggccgaggcggacggacggttgcggacgccgagccattccggcatccatcgacccggaatgtccacgaagtcgatgctctcccacacttccataagattcggcccgcatgcaagcagacgaataaacagctcgcgcgattcgtcatcccactggttgtcgtgaatcgggcagtgcttcagattaaccaaggtagacgggttgatgggcaaaccgaattcgccggccgccacggccatacgcaacgccagcttggcatccttggcaggctcgacaccgggtgccaacaccaattcgccttcgtgcttggccacgccgggagccaccacgtcgaattgcggggcttcacgcttgccgccagagcgctgagagaacatctggaagaacgcgaatcgcggcttttcgtgggtcagcgaatgtccagcgcgggatgcggtggaatcaagcgagaaggagatgcgccggccgatacgggcaagcagcgtctgcaaatcgtcgatcgagtaggcggcacgctcgttttcgggccaagtcggatcggcaaggccaagcatggcagccactttggcctgatagggcgtcagcatcaggttggtatccttgccggccaccagatggatgcagtcgcgtacgtcgagcagacgttccacggcttcgtcgtagatgccgtgcgggcggtcggccagccatgagacggcgagcgcggagacgagcaccgaatcgcgcaaacccccacgggcctccttgatgtcgggctgattgacgtattggaggcggccgaattcgtcgagtcgggctttggcggagtcgagcagttcgggcaggcgcttgcgggcggccttgcgccaacgttcgaggatggacgtggcggtggtggtaatcagagcagtgtcgccggcgatgggcttcacgtccagccagcccatggcggcgggaaggtcatggtcggtgacttcctcgcattgggcgcgcgtgcggatggagtggtcgaggtccagaccgctgtcccatagcgggtaccagagtttgttggccaactcgttgagctgctggtcgttcaacgtgcgaggctcgtagatgatgaccaagtcgaggtcggagctggggcccagttgaccacgtgccagcgagcctaccgcggcgaagccgatgccggagtcgggcacggggaaagagacatccttgcaggccgcattccacagctccgtgaggcattgcatggccagttccgtgcgggctttacgcttggtcgcaccattccggtagacaccatcgtcatccggctggctcatatccatgaatcgttgtttcaagccatctactgctgaagtcattgcttcatctttcattgccaaaaaggtccccgcacggcgtcaattcgcggcgtgcggggacctttcccatgcagtccatcccctgctaggcatggacgtctgtgttatcagatcgcggcggaaccggtctcaccggtacgcacgcgggccacggagtccagcggagcgacccacaccttgccgtcaccgatggtgccggtgccggcggacttgatgatcacaccgaccagcgtctcggcatccgcgtcatcggacagcacttcaacgcgaatcttcggaatcaggtccacggtgtactcagcgccacggtagacctcggtgtggccgcgctgacggccgtagccgttggcctcggacacggtcagaccgtgcactccggcggccgcgagggcctccttgacgtcgtcgagcttatggggctggatgatagcggtgatgagcttcatctcacctcacctccttgagaacagagctggcagtaccagcaaaatcgtaagcacgttcgccctggtcggcaagatcgatgccgccgacttcctgagcttcggtgacgcgccaaccgatggtcttctccagggcgaaggcgatgatcgcggtgatcaccgcggagtagaggatggcgacgagagcgatgaccagctgaacgacgagctgcttccagtcgccaccagccagcagaccagtgccttcaccgaagaagccgatgaggacagtgccggtgaaaccaccaacgccatgcacgccgacgacgtcgagggagtcatcgtagccgaacttgaacttgagaccgcaggccaggcaggtcagaacaccagcgatggcacccatcacgatggcccacagcggggaaaccacatcggcggccggggtgatggcaaccaggccggcgaccatacccgaggcggcacccatagcggtgtagtggccggagcgaatcttctcggtgaagccccaggagagcatggcagcggcagtggcggcggaagtggagacccaagcgtagccagcggtgccgttggcggcgaaggcggaaccagcgttgaagccgaaccagccgaaccacagcaggaaggcgccgagcatcacgaacggcacgttgtgcgggcggaacggctgcgtgccgaagcccttacgcttgccgatgatgagcacgataatcagggcggcgactgcggcgttgatgtgcaccacggtaccacctgcgaaatcgtgggcggccgcgccgatagccttggagatggcgccgtcagcagacagcagaccaccgttccagaccatgtgggccataggagcgtagtcgaaggtaacccacagcgccacgaagatcatccaggtgctgtacttcacacgctcggcgatggcgccgcagatcaggccgacggtaatcatcgcgaaagcgacctggaaggcaacgtccacggaaaccgggtagttgttgtcgttcagaccggtggcggtgaacacgccgtcctgcgcgaccatggaatccttgagcaggaagccgctggccgggtcgccgaaaataccgccgatgtcggaaccggcgtatgcgatggaccaaccccacaaagtccaaataatcatggtgaccgacagcgcggccgcctcaagcatcagcatgttcagaacggccttggcacgaaccataccgccgtagaagaacgccacaccaggcgtcatgaggaaaaccaaggacgcggatgtcaggatccatgcggtgttaccggaatcaatcgctcccatgtctacctccctctctttcgttcagggcaccgggggctttgtgcggccggcgtcttatttgtctctacaatgccgtcccccttatgggggctaacagtttgtcagttaaagccggccgcgttttggtttcgttacgccaagttacgcgattgttaagcgcacctgacagttaggttgatgtcgggtgggctgattccggcatgattccaacgtatacgggaaagccccgaatcatgtttcgaatatgattcggggctgggtttggtgcgttgcgggcgtttcccgcgcccacaacgtggacggacgcagggctcccctcgctgaggagagctcgaccgtctacgcgagaatgccgtccacgaaaccttcaggatcgaaaggtgccaaatcgtccggaccttcgcccagaccgacgagcttgaccggcacgccgagctccttctgcacgctgatcacgatgccgcccttggcggaaccgtcaagcttggagagcaccacaccggtaatgccgatggcttcggcgaacaccttggcctgggccatgccgttttggccggtggtggcgtcgagcacgagcagcacctcgtccaccggcaggttcttttcggtgacgcggcgaatcttgccgagctcgtccatcaggttcgacttgttctgcagtcggccggcggtgtcgatgatgagcacgtccgcgttcgcttccttggccttggcggatgcctcgaaggcgacggatgccgggtcggcaccgtccttgtcggaacgcacgaccggaacgccgaccttggcgccccaggtttccaactggtcggcggccgccgcgcggaaggtatcggcggcgcccagcatgacctgcttgttttcggccacgaacagtcgagccagtttgccggccgtggtggtcttgccggtgccgttgacgccgaccatgatgatgacgctgggcttggcggcacccggcttttcggcattgagtcggcggtccgtatctcgaccgaccagatcgagcagcttctccttgagcgtggcgcgtacttcggctgggtcggctttaccagtgatgcgggcgtcggttctcaggtcatcgaccagttgggcggaagcatccgcaccgacgtcggcaagcagcagtgtgtcttcgacgtcttcccaatcggcctcggagagattgtctttggcgaggatgtcgaacagggccttgccgaacgggttgccggacttggcgagtttggccttgagtcgggtcagtcgagagccgaccgattcggggggctcggatctggcgggagtgggcttggaggcaggttggggctcgggcttgggcgcagctgccggttcgggttcggcctgcgcggctgacgcggactcggctttgaccgattcggctgacttggccgactcggcggcggccgcggcagtcgcagccttggcttcctcggcttcggcggccagccgagcgtcggcggcggccttggcgtcgcgagtcttcttattgtcgggggcaaccttgcccatcgcacgatccaaatcgcgcttgcgggacttgcccaaccagatgctcagggcgattaccacaatcgccactacaatcacgccggcaacggcgagcacagtattcatatccatatttgccaagtctacgcatgacacagccccactgcagatttggtagaaatccacggtagggctgaacaaattgttattcgcgattatcgaatcatcgttatcgcatgtttaatcccttccaaggtctccagcgagacatcagaaggagattgattagcggtaattaccagctgcatagcctgctgatagaacaatgtcgtcgatggatttggattcagaggcagtgaagccactttctgttcgataatcctcatggcggcagccttatccgcgtcgctttcatccacacgctgcttaagaagtaatacctgccccttgaactggtcacgctgcgcaatcttgttgtgttgctcgacatgctgagtcaccgtatgtccattggcgcgattgttgcccatccacagcaccacaactaccgcggtgatgatgagctcaataatcaaggggatgaacagtcccttgggcaacaccaaacgcaaccaagtagatattgggttcggcaccgtgttccacgcgattccgtacaggatggcgaacacgcactgaatcgcatatccggcaatcgggaaaacaccgttctcggcaattactcggtaatacagattttcgccgatagtattattcgcagcgttccaatccgacacccacgtcaaaacgacaaacagcagcatgaagaccagaacaatgtactgggcaagcggcgcgaatgcgaatatggacagttggaaaccgaaagccaaagctgcgacggcgaagaacaccgtcacaataatcgaagaaatatatcgcgtcattatagctcacagttccttgaggatctctgcctttttggactcaaattcctcagcactgatgagtccggcatccgacagtttcttcagctttgtcagtctttcgactgggtcttctttgccagctggagccgagcccgcggtctgcgaatccgaagcgggctgtgcgcctgcagcggcttgtagagtctggcccatcagtcctggcaacatctgtcccagtcctgcacccatcgtcagtcccatgccggcacccatcaatgagccgccttctgaaccgggatttgccgcggtagcattcattgcccgcagcatctcggcctgttggtagttcgtgccaagcgtctggtatgcctgctgctggccttgtgctcgagccgcttcacctgcaccggctgccatgttgccgtaatactgttcacgattcttggtggccagttcctgagcttggcggcgttcttcgttgtcgaatatcttcatccccgagatgttgaagttcaacaaatcaaggccatattctcctacgattggcgccagttgcccctgaatagcctgagcataagtcagcacattggccggagcgctaatcaatgggccattccagttggtgagttcctgcgtcaggagagccacaatatggcttaggaactggttcctgaagaagtcacgcaagctctcctgctgggacaggtcatagttgccgccaatcaaattcgtcaggagcacgcctgcgtcggataccttgacgcggtaagatccacgcgctccgacctcagtctctatgcccacgccggtgaactggtcggcatatgccttatccatgactttaaccggagtatccgtgccccaggtgatctcacggcttgatgcaatgcgtacaaagtacaccacgcaatggaatgacgagataccacccgacagcgcattacgcagacgcgaaataaatgggtaattggaagtagtcagtgtatacgtacctgaatcgaatacctgctcgatgttaccttcattgacgaataccgcctgctcaccgggctgcaccaccaacgtggtgccatgattgaaatcctcttccggattgcggaaaatcaaggtatcgttgtcggatcgatttttgataacgtcaacgaaatgtttctcgccaccggcatagttcacttcatttgggttctttgcgaatagcgccatgattgcgctccttaccgttttggttgtggtacttgctgctttgcaaaattggcaaaaaccaaatgcgtattgtcacgcatcacgacacatatttcagtcgtcgtactcatcccacaggctgaccaatcctcgcgcggagaacaggaatgaacccgcgccttcgaggctgtttgatttgagttcaagtttcttgcccgttttcaacgtaatcacgcagccatagttgtctacgcgaatgtcgttaatgttcttgaagcggtacacgtcaaagaaggccttgccatgcggagccgtgggatcctcccattcgcccggcaacagctctatcatcgcagagtagattttcttgttgccgaacagccatacggtgacgaatgtacggccggcaccatactcgatgtaggaaatcggctcaatacggccgacttcctcttcatcgaagatgccgcaagcgttcatggccaattccttgcggtattccaacaggtcttcaatacgatatgccgtcatggcaatagtctccttttatttctcacgagccaccgcagagcgcctatttggccgcaagcaacgattcgatatctgttctatcggcatcagtaagtcctgcagcatcagcttggcgcaagatgctcgccgaactttccctgtatcgaacgaaacgacgctcgaatagcagattgatgagctgcgccttggcaaacagatattgtggccgtgcctccatagtgatggctgaatcaagtctggctataatcgattcagcttccttgagcttgatttgaaaaggcttcttggttttaaagtgagcaagagcagcctgaaacaatacatctggatcatctgcgccattgctacacgccttgtccaaagcgtcggcagcctcttcgtattgtccacgatcaagcaatacgtatcccaaagaagcaagcacttcaggattgtccggggaacccttcaatgcatttttatacgcatttaggaattttgcggattccttgaacgtagtacgacgtacttctttgaagttcagtgaggtaaaagtgagtttgcgcccacaaaacgcacactctttatcctgcaaagagacggaagccccgcaaccggggcattccatctcactgttgacagtaggcatgatattcagcgatgcagcatcgaattggtataacgctgctcgttgaccatttcctgcatttgcgccatttgagcagcctgcatcgccattgcctgctgatgctgctcattctgagcttccatctgcttctgcatctgacgattctgaagctcaaaaccacgctgctgatcatcaaggctgcgaagatacaaatcatcaaccttcttgtacaagcccgttgccggagagtgcaacgtctccttgtgcccgaagataccttgatatgcggcaaagaatgcttgccattcatcagacaaagccgatgcagccttctgatccatagaggagaacacgaaatggcatacaacaccagcaatcagcagaacccatccgaatcctgcagcatcgctattggagaaggcgattaccaagccgataataatcagagccagttttaccgcaagaaaaataaggtgacgcttcttcaaatcgtcacgcttaggcgtcagctctgcgagcttctgaggcttttcctgagtgaacttagtgtacataccatcaagttgattgcccagatcatctggcaaagcacgatccgtgccctccaaattcgcggtatgcacctgagacaactgctgctttgcagcgttatacgccgcgattactccaccggagtaatcattgtccaacacagcaatgtcagtcttgtatgtatttgccattagattgccttcttcgtggttctccgaaggccgaccgactgtatcagctcagaagaggagcccccccccaagcatgactagcaccgatgatggaaatacgcgctctcatcatgccaacctcctttcaagctgaactggcactttgccggctcatgacctatgttctaccacatttgtatgacacatacggcattcatgcctgttttttcggacaatgtacctgtcgcttgaaaagctgctgaagataggcccctaattcatcctgtattcgtgacaaactgacgtgtatggctaattcttcacgtatgacgtcgctgcagcgccgcgagcagttgattgaagtcggacgctcgctattcgccgccaaaggcttcgaggcggtaagcgtcgaggagatcgcagcgcacgccaaggtgtccaagccgatcgtatatgagcatttcggcggcaaagagggcctgtacgccgtcattgtggaccgtgagatgcgcgcgttgaccagtgtgctcaccgccgcgcttgacgatccgaccgtgcacccacgccagatcgtggaacgcaccgcactcgcactgctcacctatatcgaagaggacgccgagggattccaggtgctggcgcgcgactcgcccagcaccgaaccgtccggctcgttcagctcactgctgggagacatcgccgtgcgcgtcgaagacatcctttccgaaacattcaaacggcagaaactctccaccaaaggcgtgccgtactatgcgcagatgctggtgggcatgaccgtgttcaccggccagtactgggccgaccggcccaaggtgagcaaggagcagctggccgcgtacatcgtggacctggcatggcatggcctgagccggctcgattccaagccgcagctgttgtttgaaggcgtcaaggcccggaaggaggccgagcgccgggccaagcgcgggatcgatgccgaaacaccggccccggacggcaaggcatcatcgcccttagagcagacggacctcgaccacacgctcagggaagattcagggttgcagaatgtgagttcaggggcacaggttgcgcaacactctgccgagtcgggagacgaagtgctacggtttgaacaggaaactgaacagaacgactaaatatgtgaggacgtaagactttcatggccagcacggcaaagacgctcacctttgtgatccccgcatacaatatggagtcctatctcgaccgttgcgtgaactcgctgctttcggcgaacgacacccgcgacctcgaagtgctgattgtggacgacggttcgaaagacggcacgctggagtacgcgcgcaaactggaacgcaccaatccaggtgtcgtgcgcgcgattcaccaggagaacaaaggccacggcggcgcggtgaacaccggtatcacggcggcgaccggcatgtatgtcaaggtggtggatgcggatgattgggtcgacccgcaggccatcgacacggttctggccacgttgcgcgcgcaacgtgaggccagcgagccgatcgacatgctggtgaccaactatgtgtatgacaaagtgaccaagcgccacaagatcgtggtgaacttccgtcatgtgatggaggccggccgcgtgctcggctgggatgacctgggcaagttcggtctggcgcagtacatcatcatgcatgcgctcactttccgcacgcaggtggtgcgcgattccgggctgaagctgccggagcatacgttctacgtcgatttctattactcgtaccagccgttcccgtgggtgaagcgcatccagtatctcgacgtgccgttctaccactacttcatcgggcgcgagggtcagagcgtgcagaccgacgtgatgattaagcgtgtggatcagctgcggctcgtcaatcggctgatgaccgaggccacgcccgaacgtggtacggtgccggaggggctgtaccggtacatgattcacttcctgacgatcgaatcatgcgttacctcggcgttcctgattctctcgcgcgatccggccaactacgttaagaaaaccgagctgtgggatgcgattgacgcctattctccggccatcggcaaggatgtgcgctcgaagctgatgtcccgcgcgctcaatctgcctggtaaaaccggccgctggatcgtgcgcaacggctatctcatcgccgaacgcatcgtcggcttcaactgattcggattgcggctttgccctgctgacgcgttatcagcagggcatccctattacctccccagccgaggttttgctactcggcccaacggtcggacattgcgaagctgttgtgcatcaggttgctggaggtgtatagcacgtcgttcagcagcttggttgtatgctcgcgcaggtagtcggccatctcgtcgttggccgcttcgagcacatccgccacgccctgcacatccttctcatcgccgtggccgccatcgagcggccatgcattcgtacccgtcgattcggcatcgcttcgagcaagcaactgctcatccgtgcgctcgatgagccggtgcccgaacgcgcgcacgccttccgcatagccctcgatgaaccggttcgtctcataccaatgcgcgtcggccacgacggcgatcaggcggttcgtccaatacaggttgccggtggagacttcgggcgtggtgtcgcgcaggtaggcaggcgtgtcgttgacgttcgcgtagaacggcgcggcggcggtgaacggaccggagccgaacgatacccacatcaccgtgcgattggccgccggcacatacgggcggacctgaatcgccaccatatggccggtgcggttcacgccgatcggacggtaacggtggcgcgattccgccgtgccggtcgtgccgtacgggtcgtacggcgtgccttcgaagtgcgaggacagcaggaaatcaacgtcttcgaggctcaccttgtcttccggcacgcggcaccacgggatgtcgtcggattcgggcgtgtagcgggcggccggcgaatcccagtcctcgctggggttgaggcggcgttgcatgtaccaggcacgcggcgtgttgtagatatggtccttcggcgtcgcggtgccgaaggccttgcgcgggttgaagcgggtgggaagggcaacggttgttccgaatccggcgctatgcacgtgacggccgttggaagagaccgacgttcccattgtgcggtcaaggtgatgcgtggccatgaactcgcgcaggtcggcgctgcataggtattcgcgctgctcgccgaacgcatcggcgaggtcgaagtcgtcgatgccgagctggttggggatcgtggcatagcagtcgtcgggcactcggcgggcgatccaatgatggccgccgatggtctcgacgtaccagatctcgtccgcatccgaaataatcacgccgttcgattcgtaggtgccgtaggtttcgagtagttcgcccaaccgagcgacgccctcgcgcgcggtggtgacgtacggcagcacaagggtgatgatgtcttcctcaccgataccgccgggctgctcggcctgataatcggtgctgtccggcccgccgacagccggccgcaactcgaccatcgggtccgcaccgggcacgcgctcgttgacagcgatggtttcggtggcgctcatcgccacgttgtgttcgttggcaccggcttcggccagaatgccacgattattcagcacgttcggtgcgatggtgtaccggcaaggattgtccggtagttcgatttcgacatggctcagcacgctgcggtagtggcgcggctggtcgtcgggggcgacggcgacgaagcgcttgggatcgtaacggcccgagcccgaatcgtcatcgcgggcgatgatggtggaaccgtcgtaactggcatttttgccgacaagaatcgtggtgcatgacatggggcaccactctaggagccaggctggtcgaaacaaaaaatccttggaaccattgcgattccaaggatttgttgtgccccctgtgggattcgaacccacaacccacgacttaaaaggacgctgctctaaccgttgagctaaaggggcaactcttctaaaatacacaccgttttgggatatttcaactacggcgttgcgtacacgtttgcgtacgcgattggcccaacgcacggcacagcacacgcaatgtggcccaaatcgcagcccaaatcgcatatcgcctctaacgatagatagccgccggcgactacccttgtacattatgagtgaatcccccaattggagcaatcccctgcgcgattcgcgcgacctcagactgccccgtatcgccggcccgtgcagcctcgtcattttcggtgtcacgggcgatctggcacaaaagaaactgctgccggccgtctacgacctggcgaaccgtggcctactgccgccgagcttcggcctgaccggcttcgcccgccgagactggacacaggagcggttcatcgaattcgtcaaggccgccgtccgggcgcattgccgtacgccgttcaaggagtcgacttggcgcaatctggccgccggcatccgcttcgtgcagggtacgttcgacgatccggaggccttcgagcgtctgagcgccaccgtgcaggagcttgaccgcgaccgcggcacgcagggtaaccatgccttctacatgtcggtgccgccgcgcgccttcccgcaggttgccaagcagttggccgcctccggcctgtcgcgctcgtccgagggcgcatggcgccgcgtgatcatcgagaagccgttcggccatgatctggccagcgccaaggaactcgacagcgtggtatccgaagtgttcgacccgagctccgtgttccgcatcgaccactacctcggcaaggaaaccgtgcagaacctgctggccctgcgtttcgccaacgccatgtacgagccgatctggaacgccaactatgtggaccacgtgcagatcacgatggccgaggacatcggcatcggcggccgcgccggctattacgacggcatcggcgccgcacgcgacgtcatccagaaccacctgcttcagctcatggctctgaccgccatggaggagccggtgagcttcaccgccaaggacctgaccgccgaaaagaccaaggtgctttccgccgtgcgcctgcccaaggacctcgccgccaacaccgcgcgcggtcagtacgccaagggctggcagggctcgcacgaagtggtcggctacttggaagaaaaaggcatcgaccccaagagcaccactgaaacgtacgccgccatccgcctcgatatcgacacccgccgctgggctggcgtgccgttctacctgcgttgcggcaagcgcctcggcaagcgtgtaaccgaaatcgccgtggcgttcaagcgcgccccgcatctgccgttcgagcagaccgccgtgcgcgaactcggcaagaacgccatcgtgattcgcgtgcagcccgacgagggcgttaccatgcgcttcggagccaaggtgccgggcggctccaccatggaggtccgtgacgtgaacatggacttcagctacggccgctccttcaccgagaactcgccggaagcctatgagcgactgattctggacgtgctgctcggtgatccgccgttgttcccgaccaccgaagaggtgaacctcagctgggagatcctcgatccgattgaacgattctggtccacgcttggccagccgcaggcctaccgcgccggtacgtggggtccggcacaggccgacgaaatgctggcgcgcgacggccgccactggaggatgccatgatcatcgatatgccgaacacccgcacccgcgagattgcgcacaaaatcgaacagctgcacgaggagcgcggcgaatcggcgaccggccgcgtgctgacgctactcatcgccaccgaggacgcggacctagagcatgcgctggaaatcgcgaactcggccagccgtgagcacccgtgccgcgtgattgccgtagtaccggataccaatcctgccgatcagtccggcgaaggcgaaccgaacgagaccgaagtggccgccgaggtgagcgcgaatcgcgataatccggccgtcgatttgaccgacggcccgaacgatccgaacgattccaacctgaacgcccaagtgcgattcggcgcggacgccggtgccggtgagattatcatcttgcgtccgcgcggtggccttatcaaccacccggatacgctggttatcccgctgcttgtgccggatgcgcctgtagtggcgtggtggccgaccacaccgccgtcgaacccggccaaggatctgatgggtgcgatggcccgcagtcgcatcaccgacgcgctgcactccaataatccggaggccacgatcgagcgtttgcgccgcaattggacaccggaagacatcgacttgtcctggacacgactgaccgtctggcgcgcaatgctcgcctcgatgctcgatcagccgccgcacctgcccatcaccgccgtgaaggtgaccggcaaggccgacttcctgcctctggaaatgctgtgcgcatggctgcgtctgaaactcggcgtaccagtcgaaactgagttcgtgcccgacgcgcaggccgtgaccggcgtgtacctgacccgtgaggacggtgtgatctcactggaacgcccgtatgaggaccaagcgctgatctcgctgcccggccagactccgcaggaagtgtccgtgccgatgcgcaccatcgaggactgtctgaccgaggaactgcgccgcatcgatcccgatgagatctacgccgaggtcatcaacgaaggctgggatctgattcgtcactgaagtcggtagaaccgttgccacagcggcgttggcatgagttcggcaattgtggtcgagccatgccaacgccgttgctcatcgtttcctacctcatgcgatgccgaagctcatgaccgcggagtaataaagtgacatatgcgatgtcgcacaatgtacattgtgttgtcaactgacaacacatttcattgctgcaaatggctggattcccggcatgccacccgtattatgcgttgtcaactgacaacacaatccacattgcaaagtacgacacataccccatataaggaccatacatggcaactcgaaaactcattgtgtatccgaataaagatctgatgattcaggctggcgcgcaacgttttgtcttggcgctactcgatttgctcgccgaacgattgcctgatggcacgcatcgcacacgtgtggatgtggcgctgtctggcggttcggccgcacagccgttgggtttggcgctgaacgatccactggctgatgcggttgattggtcgcgcgcgcatttctggtggagcgacgaacgttttgtgccggcttacgacaccgatcgcaatgctctggaggcccgtcgcctgctgcttgaccagctggtggcggatggcaagctgcctgaatcgaatattcatgagatggcggccgatacccgttcagccgatgacatcgccgatgtgatggatcaggccgatagtgatgacgcttccgttcgcgccgccgccgatgccgcgaatgatgcgctgctggacgatgccgcgagcgactatgagcgcgagttggtgaatgaattggggccggaaccggtcatcgatctgatgattctcggcatgggaccggacggtcactatgcgtcgctgttcccgggtcatgatgaggtcaaggttaccgataggctcaccgtgggtgtgaaccactcccccaagatgccgccgttgcgcgtctcgttgaccgcgccgctgattgcccgctcgcgccgtacatggttcttcgccgccggtgccggcaaagccgaatcgctggcccatgtcttcgagcggcccaacaacccggattacccgtcctcctacgccaacggagtggacgagttcacctggttctccaccgaagaaaccgtcaccgagttgtgatggcgcctcctgtgggccggaccctgaatgaggggcccggcccacagattgtcgcagacgctcaagcctgctgttcctcgggctggccttcctgcgcccagagggtgtggaacacgccgggcttgtcgacgcggccgtaggtgtgggcaccgaagaagtcacgctgggactgggtcagggcggtgggcagacgcttggagcgcagaccatcgtagtacgccagggagctggagaacaccggggtcgggataccggcctccacggcacgcacgattacacgacgccatgcatcctgcgattcgccgatgatcttctcgaagtacggatcgaacaacagggaagccggcaaattatcgcccttgaaggcctcggtgatgcggtcgagcaggaactgggcgcgaataatgcagccgccacgccaaatgcgggccacttcggacaggttgatatcccagccgtattccttagcaccgtcctgaatctcgttcaggccctgagcataggccacgaccttggaagcgaacagggccttgcgcacgtcctcgacgaacgcggccttgtcttctccggccagatcgatggtcttgttcgggccagccagaccttctttctgagcgtcttcacgcagctcaccgtgcgaagacagtgcacgagtgaacacggcttcaccgatagcagccacaggagaaccaaattccagaccagcctgcacggtccaagtaccagtacccttcatgccggcatgatccacgaccacgtccacgaacggcttgccggtctcggcatccttgtggtgcagaatctcagcggtgatctcgatcaggtaggagtcgaggtcgcccttgttccattcagcgaacacgtcgccaatctcctcggtatccatgccgagtccacggcgcagaatgtcatacgcctcaccaatcacctgcatatcggcatactcgatgccgttgtgcaccatcttgacaaagtgaccggcaccatcggtgccgatgtgggtcacgcacggttcaccgttcaccttggcggcgatggactgaagaatcgggcccaaggtcttccaggattccgcagtgccaccaggcatcagagacgggccgttgagcgcgccttcctcaccaccggacacgccgcaacccacgaagtggaagcccttggcacgtacttccttctcacgcttgatggtgtccttgaagaaggagttgccaccgtcgacgatgatgtcgcccggttcgaacacctcttccagctgcgcgatagttgcgtcggtcggagcaccggccttgaccatgatgatggcggtacgcggacgcttcagggacgcggcgaattcctcgagcgtttcggccggcacgaagttgccttcggcgccatgctcgttcatgagcttctcggtacgcgagtagtgacggttgaacaacgccaccgtgttgccatggtgcgccagattacgcgccagattggagcccatcgtggccagtccaatcacaccaatgtttgctgtagcttcggccatgtgccttgcctttcgtttgattgtcccatcgtcatcacgcgcgtcacaaaacagcgcatcagcggagggaatcattccttcaacgctcgaaagtgtatcccacttaccacccacacgcgaaggctgtcttaggttctacgcaccttctgcccgcgaagcgtaattacttgacagccattcacatacgcccggccttggaagggtcgatatgcatggtctggaagcgattggccatgtaagcgtcgctgtagcgttcgctgaaccacatcgcgaccggtgaatcctgcggctggccggccatgcgcccataccagcaatccaaggccatcagcgtgaaggcaatgtcgatcaccatcagcaccgtgcataccgcagtcagcgaataccgtactttccatggaatgcgattaatcagagccagcagtcgcggcaacagccacttgacccacaccacaccaatcagtccccagaagaacatgaattggcccgaagtacgtccgtcgatggacagccaacggccggtgtaatcccacgcggtaataccgaacgccacttccatgaaccagctggtgcagtattcgaacgcgccgccgatcaccgccgaagcgcagaagatcaagaacggattcgccttccacaggcgattcaggcacacggttaccaataccgcaccacagccgtaaatcggcgagaacgggccccacagcaaacccgcgcggtcctgaagttcaccgttatacagcgccatatggtagatcgtctccataatcaggccacccaccgaagcgatggtaaacagccagaagatattgaagaagtccagtgcaatatagcccttgccggattggtcgcggcccagcatgccggccgccaccgccgattcataatcatcgcgatcgtccatgcgtttgagcgcgcgctgcaaacggcgttcctcgctcagggagggatcggcggtcaccgaaatcacgacgagaataatcatctgaatcagcggcagcagcaggttgaagccaaggccggtcagggccagcgacagcatgccgtcggccaacgtcaacggcatcagcacgtaggtccagcgcgcggcataccggcgatgattgcgcagcagcatcacgccgaacacaatcaggcatgcggcactgactaccagcacaaccgcatgaatcgcggacaggatgaaagtcaggctcatcgcatcgacgtgcacatgaccatccagaatctcgcgcacggcatagaggatggaaatcaccataatcggcaatgtggcgagtccgtccagcagcacgaccgcgccatagatgcgcgccagaatcggtaatcgcttggcgttcgggttcaagccggcgtcgtccagttcgacggccaccagatcagccacgactgcggactcggcgtcacggttctcccgcggcttgccaggggtagtggccgtgccatcgtccttgaattcaaccatggtttcctccccacatagcgtccccttacactatcacccgattgcagttttgccgaacttgatggatagccggtacatgtctgtctacattgccggacaccgagcccactatcgctttcaggaaacatccaaaaaccatccagaaatcttgtcaataagttccagaacgcctttcgctccagccaaggcactgatggccagtccggcaccggcagcagctccggcacaggttctgatacttccggtaactccaactccgaccagtcatccagccagaacgagcagtcggccattgatggccaatccggcaccatcgaaagctgatacaacggtttacccatggggcggtagctctctcatgaggcggtaattaccccatggggcggttagcccaaaaccgcattccgcggaataaagccattttaagccaccgccccatgggaattttaccgccccatgggccacttaccacccaatgaaggttttaccgccccatggagggcagcctcacaccaacacacacagcacacccggccacacagcaccccagccacaaaaaattaggcacactgcccagcgacacacgataagccgctgggcagcggcgttattccgccaaaaccatcatcaatcaccccaataatctccggcagccgtattacgctactacaaccgtagcgctacgattaacgtatcgctacggaaaacgtagcaatcaagcaacaccaagctccggaggtatcagtgggcaatatcttcaaggtcctcaaacgcgacttcctgcgcctgttcaaggtgccggccgcatgggtgatcctgttcggcatggtgtttatcccgccactgtattcgtggtacaacatcgtcggcttctgggacccgtacggcaataccaaaggcatcaccgtcgccatcgccaacaatgacgacggcaccgacaacgcgctcatcggcaagcaaaacctcggcgatcaaatcgtcaagcagctgaaaagcaacgaccagctcggctggaccttcgtcaccgaagccgaggccatggaccaggtggaatccggcaaggcatacgcagccatcatcatccccaaagacttttccgacgatctcgccggcgtggtgaccggcggcaagagtcggcccactctggagtattacgtcaacgaaaaagccagcgccatcgcccccaaagtcaccgacgtaggcgcgtccactgtggaccgcacggtcaattccacattcgtctccaccgtatccgaagtacttaccgaagtcatcaatacggttggcggcaaagccatcagcaccgaagacaccaccaaagccaaggccctcacggcccttgccgaggcctccggcgacgtgcagcacacacgcagcaccatcgccaagctcaccaccaaactcaccgataccccggagcagacacgcaccgcacgtcaggcgctggacgacgcgcgcgcacttggcatcgacaccgcggaaggcctggccggcgtctccaccctgatcggcactacccagaccaacctgaacggcttcgtcacctccacgtccgaagcgcttgaccaaggctcaagcctgctgagccaggccgcagcacaggccaaccaaagcgtgggcacggtagccggaaccatcagcgccgccaatcagcaggtaggcggactgatcaatacggcggaagacatcaaccaagcgaacgccgacatcatcgaccaactcaaagggctgccgaacgccgatcgagaaccgctgcaatccgccattgccacactggaaagccacaatagcgagcttgccggcgcactgggcaacctcgatagcctgaacaccactatcggcaacgcctccacagacaccgccggattggcgcagcatctcaataccgccacccaaaccacggtgcgcgaggccaataccgctcgcggcaccatcatctccggcgccattcctcagctcaacaccggcctcaacaccctcagctcgaccgccaacactctgtcgaccggcatcacgtcgcaaggctcactcatcgatcagtcgaagagcaccctcaatcaactcgacaaagccgcctccaccacggtgaccgccctgcacgacaccgataaggcgctggccggcgtgcaaaccaagctcgaaacgctgaccaccgatatcaaagccctgagcatctccagttcactcagttccctgatcggcaccgacggcaaactggatgccgccacaatcgccgacttcatgctctcccccactgttatcagcgaacgggccgtctacccggtcgcctcctatggttccggcatggcaccgctgttcaccaccctgtctttgtgggtgggcgcgttcgtgctcgtggtcattcccaaactcgaaaccgacgacgagggcatcgacgatctcacgccaacccaaggctatctcggccgtttcctgctgctggccacgctggctgccgtccaaggcctggtcacggccatcggcgatcttgtcatcggcattcaatgcgcgagcgccccggtgtttctgctcacctgcgtcatcacctcactggtgtatatgtcggtgattttcgccctctccaccacgttcatgcacgtgggcaaaggcgtgtgcgtggcgctggtcattctgcaggtgccgggcgcctccggcctgtacccgattgaaatgatgcccgcgttcttccgcgccatctatccgctgctgccgttcacctattcgattgacgcaatgcgtgaaaccatcggcggcttctacgacggcctctggttcgcctatatcggcaaattgctggttttcgcggttctggcctttgtgcttggcctcggcgcccggccgaaactggccaatctcaaccgcctgttcgcgcgggaaatcaaggaaagcgacatgattatcggcgagccggtgcacctgcctggcagcgaataccgtgtcactcaggccattgcggcactggccgaccgcgacgaataccgtcatgccatcgaacgtcgggccgccaaattcgcctaccgttatccccggctgctgctgggtgcgcttatcgccggattcgtggtgccggccgcgctcattatcgtgtttgtgctgaccaccagcgagaaaatcgtggtcatgggcacatggctggcatgggtgctcatcatcatgggcttcctgatggtcgtggaattcatgcgcgattccatccgccgccaaaccgagctcggcaacctctccgacgagtcgatccgcgccatgctgtacgggcataaggccaagcgtcgcgacacctccgccgaacgccacgaagaagcggacccgagcgccgccgttaccgcaatcatccccactattccgccgaccaaggaaggcaggcacgcacgatgaacaccatgtggaaactatttaccggcgacatcaaacgcctgaccagcaacgtggtctccatcatcatcgtgatcggcttggtgatgattcccggcctgttcacctggttcaacgtggccgcatgctgggacccgttctcgaatatgaagaacctgaaattcgcggtggcgaatgtggatgaggggtatcgttccgacctgatcccggtgaaagtcacggtcggtgatcaggtggtgaacgcgctgcgcgccaacagtcagctcgattggacgatcacgtccaaagccgatgccgtcgagggcgcacgatccggcaaatactacgcggccatcgtaattccgaagtcgttcagcaaagacatgatgaccttcttctccgacgatgtgcagcatgccgaactgacctattaccgcaacgagaagaagaacgcgctggcaccgaatctgctcaacgagggcacggacgaggtggcggcggaaatcaacaccacgttcgccaagaccatcacttcggcagggctggaaatcgcgtcttcgctggccgatcagctgtccaagcccgaagccaaagagcaattgaataccttcaacgccaatatcgccgatttcgccacacggcttgacgatacggcggatttgctcggcacatacagcgcattgaccgatacggccggcgccttgctcgacacctcgaactcgctgatcacgcaggtttcctctgccgccaaacaaggaggcaaggatctcgccagcgccaagcagggagtcaccgacgtggtcggagccctgggcaccaccgctgacgcgatgagcagctcactggacgcgagcgcctccagtttcggcgcggtgtccgattccatagacaagctgtattccgacgcgaatgatggtgccaccacggccgccgacgaattggaccgtcaagccacggccattggcaagcagacggagaaatacactgaaattcgcaacacgttggccggcatactgggcaacgactcatccatcatcacggcgattgaccgttcaatcgcacggcagaacaggctgcggcaagcgctgaatacggcggcgaccgatattcgccaaggtaatcaggacgcgcaggatcagcatgcgcaggtcaaggatctggccgatcaagcgcagaacagtatcgccaatatcaagtcggatttcacggccacggtgaaaccgcaaatcgactccctgtcgtccaccgtctctgacgcctccggcatactgagttccggcgccacccagttgggctccacgctcggcgacctgaaaaggacttccgacgacgccagcgatatgctcagcgacgctcgcaccacgttgggcaaggtgtccggcaaactgcgttccgccggtgccgaactggcttcgttcaacagcacactgagcgacgcactaaacagtggcgatatgagcatggtcaaagaggtgctgggcaatgatcccgaaacgctggccagtacgttggccgcgccggtgcagctcaggcgcaaggccgtattcccggtggcgaatttcggttcgtcgatggcgccgttctacacgctgctgccgttgtgggtgggcgcgctgctgatggtggtgacgctgaaaaccaccgtgtctcgccggacacgcaaagcattgggcgagccgcggccgcatcggctcttccttgggcattacggggtgttcgcgctgattgcgctgctgcaatccacggtgtcgctcggtggcgatctgctgttcctgcgcgtgcaggccgtgcatccgctgctgtttatgttgtccggatggctggcctcgctggtgttctcgttcttcacctatacgatggtggtgagtttcggcaatgtgggtaaggcaatcggcgtgcttatgctcatcgtgcagatttcgggtgcgaacgccgcctacccggtgcagatgttgcccgacttcatcgccaaagtcagtccgttcttgccgctcacccatgcggtgacgatgatgcgtgcggccatcgccggcatctacgacatggattactggcgggccgccggaatgctgctggcgttcgtgccgccgctgctgttgcttgggctgttgctcaggaagccactggtgcggttcaaccagtggtatgtggccaaagtcgagagcactaaagtgctgggctagtaggtattatccgggggttgcctacaaacggcatggacttaccaccctcagtctggctttgccagtcagctcccgccaacgggagcgtacgggagcatatttcgaagagaagagatgacggagatgacaggtacgacggcgacaccgcgcggtgagcgcacgcgcgaggcgacggatcgcaagctcatgcgagccacgctgcagattgcggtggaccgcggcatcagcggcgtgaccatcgaggaggtggcccggcgctccggcgtggccaaaaccacgatttaccgtcgataccataatgccgacgagctgctgcgcgagatcagcgcgatgtatctggccatcccggattccgacccagtgcccagccccacgcgtgagcatttcacgcaactattgcagcgattggtcgattgggtgcgcgacaacgacatcgacgtcaagcgcgtgggcattgtattgtccagtgaggccgagttcttccagcacatcgtcgaccaggtggtgaccccgtggctggagcatgtgggggcgttcctcaagcagggagtcgcgcagggcgtgtttcgcgaggacgttgacgagaagttgctgttgtccacgattatcggatctttggtggcgtatgaggccatcgagggcaaagcgatggacgacgacaccgcctgggcctcgcgcatggccgatctgctgtggccagcattgctgaagtagcggtcttactcctgaatcgaagcctcctggcgggcgacttcgagggctttgttgaaggcgtcggaggtccagctggcaccggcgaccttgtccactttgagtcccttcaggggcttgccgtccactacgccgttgatggctttggcgaagtcgtcctgatggttcttggaaatcgtggtgaacgggtgcccaatgattttgacggtctcgacgttgccgtccttgatggtcagatggacgtcgatggaatcctcgccgaccgggccgtactggccgttgatcgagtagttgccgtccttgtagttgccggtgtccttcttgtcggacgtggtggtggacgggtcgttgtgcgatgagccggaatcggagccgtcggagctatcggagccgttcgactgggattgcgactgctcttcctgcgacttctcggtctcgcccgagttgccggcgtacgcatcgtccatcggcgtggccttggattcgccgcacccggccagcagcgcgccagccacgaccagtccggccgccgccaatgtcgcggatttcttcaacgtattcttttcggtcatattcacgctccttaagccccctctgacgagggggctgtcagcgaagctgactgggggagagaccatcagcttgccatgtattcctcacatactgctcgatgcccctgacggccctactcctcgccgccggttttcgcggccttggtggggtcagcgaaaccaatggcggtctcgccgttctgcgcgccctcgacctgtgcacccgtggaggcgggcttgccgccggccgcctcgtaggccttgcgcgcatcctcgtcattccacttctcaccgacgagcacgccatggttgagcatgatctcgcgctgcgcgcagctggcgacaagcgcatcgtgggtgaccacgataatcgtggtgccctgctcgtgcagcttgcggaacaggtcgagcacgattttctcgttcttctcgtcgaggttgccggtgggctcatcggccagaatcagcttcgggtcgttgatcagcgcgcgggccacgcacacgcgctgctgctcgccgccggagagctggccgggcaggtggtgggcgcggtccttcaggccgaccttttccagcgcctccatggcctgcttctcatcgaccaccgaatggtagtactgggccaccatcacgttttccacggcggtcaggtgcggcaccagatagaacttctggaacaccagtccgatgaggttcttgcgcacgtcggccagctgcgtggcgttcaggtcctccagcttgcggccttccagcttcacggagcccttggagggcgtgtccatgcagccgatcatgttcatcagcgtggtcttgcctgagccggaggagccgacgatggcgagccattcgccttccggcacggtcaggttgaggtcgtccacggcatgcaggtcgccgtagatcttcgagatgtggtcgagttcaagtagcatgacgtttctctttctttattcttcgcgaagcacgacggcggggtcgatgcgggtggcgcggtggacgggcgggatggaggcgacgatggcgaccagcgcgctgaacagcacggagatcagcgccagccaccagttgaatccgatggagcgttcgaacaccgccacgcacagccaactggcgagtccgtagccgattgcggtgccgatgaggccgccaatcaggccgtagagcgatgattcgatgtagaactcggtgccgatggcgcgcgagctggcaccgagggccttgcgcaggccgatctcgttgcgtcgctgcgagacgatcgagctgattgtggtgccgacgccgacgagcgtcagcaccagcaccaccagcgagacgatccagaacagcgtctgcagcatggtgatgatgcgggtgtcggaggcggtgatcttggtgacctgctgcgccttgacgtgcatggaggtcatgtcgttgatgctggacaccaggcccgcgaggtcgctggagccggccgaatactcgatgacgtccacgccgcgcgtgatgccggtgagcttgttgacgtcggcgttggtggcgtagatgatcgagtcttcgctgccgccggtgtccacgatgccggccacgcggaattcggtgccggaggtgtccatgatgtcgctggaaacgcggccgtctttggtttgctggtcgatcgaggagttcgacgaagtgccgttggtgctggcgttatcggatgcacggtagccgatggtgatggcggagccgattctcagaccgatggcgtcggcgatgtcacgtccgaccagcaccttgccgtcggtcggccacgagccgtcgaccacccagtgatggttgaggttcttgacctgcgccgcattcacgccggccatcacgtacggcgaggcgttgacgcgcacgttctcgtagcggtaagtggcgtatttcgcggaacccttggccttgaccatttcagtggtgtgctgcaccatcgccttgtcgatgccggccttgccgtcggcattggtcgattcggtgggtgtgacaatcaggttcgcgccgtacgcacgcatctcctcgttcatctgctgcggcacggcgaggcagatcatcgccaggcagaacagtgtggccgcgccgaccagcgacgccaccacggccatcaccgcgcgcgaacgccggcggaacacggcgctgaacagcattctgaagaacataccggtgttggtcatcggtttcctccttccacacctacgtagataaactcagcggccatggagcacctccgcgggcttgagattcagaatcgaacgaatcgaggaggcggacgccagcagcacggtgacagccagcagcacgaacaccagcacgaacaccatcggccgcatcgtgatgccggaaccgaataccacccggcctatcagctgggccacgccggaaccaagcaacgcgcccacaatcgcgcccagcagcgagattgccgccgtttcggccagcatcaggcgggataccgcggcatcggtggcaccgagcgccttgagcagcgccagctcgccagaccgttcgccgatcgaggcgaccatcaggttggccacggccacggctgcggcgatcaggctcagcacggtcatcagaatcatcacggcctgcgtcttctgcagcacattgccctgcaacgcggcgacctgacgcacctgcttggccaccgcgcccggaatcacctcttcgatctggtaggcgatcgagctcgggtaggcggtgcagtaccaggtctcccattcctcctggctcagcgcggccgggttcgcggcggccttacgggccaggtcgttctccggcgtggtcagggccttgacctcgattttgtcgaccgaatcgggcaggtcggcgaacacctgggccgtggaggaggcgatgtagagcgagccgttgtcctcgtcgccggaatcgtagacgccggtgagcttgattttctgctcgttcttcttgcccgaggcggtggtcttgttgagggtgatggtgtcgccggtggtcacaccgagttcggaggccagcgtcttgccgatcacgccctgatcggaatcgtccttgggccacttgccgtccagctgccaccacgagcgcatgccttccacgcccacgacggtggtctcgccggtggaaatcttgaggtccttgttgaaccacgtgccgacgaccggcacgttggtgccgttcaccatggcgtggatgttgagctgcggcgcgaagttggtgatgttgaacgaccagaagatcgtcttgatcttggccgcgtccgattccttcagaaaggcggtcgggtcgctggtggacgccgcaccgcccgactcggtgttgtacaggtcggaaacgaccgcgtccgccttgggctgcacggtgatgttcgaaccgtaggtggacagctcggcgttgagcttgtcgcccacgtcgaacacgacgcccagcatcgatacggacacggtcgccgacaggcatacggtcagcgcgataagcaggcgccggcgcagctgtcgggtgaacgagcgagtaatcatacgcagaaagaacatgattcttgcctcctgcctgactcactggaagtgggcgctcagcgcgtccagatccgtagtctgaatggtgatcttgccgtggccggtcttgtacgggaatggtatcgggttgcagccacccttgaagccgatggtcgccaggttgatggccacctcgcacttcttgcagatgatcttgccgtccttctcgtagtagccggcgtcgccgcagttctcgcaggcgtccaggccgatgccgtacgcgccaccgttctttcggatgatgatgaagcgcatgacggtgccgtccttggccttgtattcgaagcggtgcaggtggccgtcctcgacctggctgaagggaatggtggccacgccgtccttgagcgagtaggcttccggcggcgaaagagtgatggtctgatgggtcgcggcgacgccgacggtgagggtcagtgtgacgccgatcatggccacgaggctccagacggcggaggccacggcgcggcggcggaacgccttgtgcttgcggccgatggcttcgttcgcgccggtcagcggcatgcggaagccggccaccacggaggcgacggccggaatcaggaacacgaacgcctgggccatgatcatccagtcgttgtggttgatcgaccaggcgagggccacgaatcccgtgtggcctatcgggaaaccgcgtgcctgcaggatctgcatgacaccggtcaggtgctggacgaacagaatcaccagcaccgcgagaacggcggcggtgaacgaggcacgcaccgcggtcgaacgcatcgtacggaagatcgcggccacgatgatcgacatggccaggcccagcgcgaagccaagcgcgcgcagcaacatgtcggacgtgaagatcgggtcgccgggctccacccagatggtcagctgcaggatcacgtccggcagcgcgtagaacagggtgagcgcgatgtcgatggcggccacggcgttcgcaatgtgcatgaacaccttgtgctgctgccaattggtggtgatgcggcgtgcgaacaccaccacgacgatggtgaggatgtcggcaatgatcgcgcaccacagcaccggatagttgacgaacgtgcgctggttgatcacggccgaggcgcgcaggccggcgaatgtgatagcggcgatcaggccgacggtcaggccgatgagacgccaatgcgagcttatcggcttatctcgcccctcgccgaccgtgagcatcacgctcaggctcatcaccagcaatgcgggggccaaggtgcccggcatcactgccacgaattgttcaagcattcgcgtcctttctctgttcatcttaggctcccctccctgaggggagctgtccgcaaagcggactgaggggagtttttagaccgtcctaagaattatctccctaaagcggcgtaaagccccctctgacgagggggctgtctgcttagtcaatcaccactgacgcggggtgtagtcccagttgtcgaaggtgacctcgatgggctcggtccagaacttgtggttcttgacaccggtctccgggtcaacgtggagcatccagccgttcttctcaggggactcgatggagagcttgagttggtaggtgccggccttgtcgagcttgacgttggcgccgtagtgcgggccgtcggaggcgttcatctgcatgaaggtaccggaggtggcctggccgccctcgacttccttgccggtggacttgtcgatgatggtgtagttcacagtaaggtcagggacgaagtcgcccttgccgtagccgtagtcggtgccttcctgggaggcgtggatgtcggcttccaggtggaaggaagcgtcagcagccttcagacccatggaagcagggtacatgtcgatgggctggaagtagacggcacccacggtcagcggaccagcggccttgtcctgctccttggcggtgccggaggggccgaccgggacctcttcgaagccggaggtctcagtcggggcgtcggccttcttggagtcgtctttcttggcggtgtcggaggagctggtcgaggacttggtatcggaagcgttgttggtggaaccgcaagcagccatcgaaacagccatggagccggcgagcagcacgccgagcagagcggcaagcttcttgttcttcatcatttctcttattccttctgttgtggtgaatggattattcacgacttatctgtttttagttgtggcggcgtgggctggaatcgcttccattgccatgtcgcaagttgtgttgcgcgagatggtcgcaccgggcgttgtgctacgcctgcgcgctctcctcgtcagccttcgcgtccgacttgctcgcaccggccgcaagccgggccttggccttacgctgtttggcaaagccgaccacgaacagcgcgatgacggcgatggctgccagtacctgggcgatgatgcattcggcgtacgggtagaatccgagccagtcgttggtgggaacgcccggcaggtagttggcgggcagcaggtcgccctcgatgagcgcgtgcacgccgccgccggcgaagacaaccaccagcacggacatgaggatcgaggtgaccaggaagaacgggccaatcggaatctttacggaggtgaagcgaatcaccaggaagatgatcacgagcaccacggcggcggcgagtgcgccgaccaccatgccatgcgtatcctggctcatcgtgtagatggactggtagaagatcacggtttcggcgccctcacggaacacggcgaggaagctcagcatggcgagcgaaatcaccgtgcgggaagccaccttctcgccggattcgacctgcgaggagacagaggccaccgcggcttcggtcttttccctgatgtagcggttccacgcttccaccgaggacttgttgagcatccagttgctggtccacagcagcatgcacatggcgacgagcgcgcacacgccttccatgatctcctgcagcgggccggagccgccgaacgcgagcatgaagatgaccgccacgatgcctgcgccggccagaccggcgagcacgcccacgtagatccacttggtgaagcgcttgttgccggacttgacgaggtaggccaccacagcggcgaccacgagcagggcctcgagaccctcgcggatcagaatcaggaacgcctggccgaccgagctggtgatgaacttgaggaagccaccctcctcatcggccgcgccgccgtcgagcttggcggcatcggtggccagcatgttcttcaggtcgtcgatgtacttcttgacttcggaagcaggcttgccggtgttcatcgaggagcggcacagcttgaactggtattccacctgggagacgcggttgccgctgatggcgctcagcacggtcttctcgaagccgagcttctcgtagtgctggtagtaggcgtcgttcacgagcgtggcgcccttggcggcgtcgccaccctcataggccttgtaggcgttgtccaggatcggaagcatcgcatccgcgacttccttccaagtcttggccgtttcctcggtgcgcttcttcttggcgtcgagctccttgcgctccttggcgatctgcttctggaggtcttcggagtactgcttcgggttggcgaggctggtgttggcgtcgagctgctgggccgtggcgtcgaggtcggcggtcaggtcgttgaccttctgggtaagctgatcggcctggtctgacgtgaacacctggctttgcaggtcctggaaggcctgctgctgcgcggtctgcttgtctgcgccgatggtgtcgctcaccactttgttgaagttggacgtcacgtagacggtggtgtatgcagccccgaaatcggacttggcacccattgggttgccgtccttgtattccttaaggccttcctgcaactgcgcttcgacggccttggcaacgtcggcccaggtcgcgtaatcgacgctggtggtgtcgtcgctcttgacggtggcagcagtggcagtggttgccggcgtcacggcgaacgcggactgcggaatgatggcggaggggaggaaggtcgcggcgatcatcgcaaacagaaaaacgatgaccgcaaatgcacgagccgagaccgtggccgactgcagacgacaggcgctgcccgacttcgcgcgcacgcgagaaacggcaacgcgcgtatcacgttcccgcatcgtgttcatttcagcggactgcgcgcaggcgcgacgaaccatgctgaattcctctcacttcaagtactcgaatggtccaaaaacaactatgaactctatagaaaaaaaatcttgaacaacagtcttgattttttgacgggtgcgaggtaatagaaggcgttttagtgcttttcaaccccgcaattatttcactatctgagataactatgctcagagaggatggctttcccggaatgtgaacggcaacaccacaaaaagcggcaacgtgaggaataccggaatcggataccaaaatagtgccacgggtgaggcatacagcgacagcaccgtgaatgccagcaagccgtaagcggccagtgcggggccgtagcgtcgtcgcgcaggccgcaccgccagcgcaagaccagcagccagcggaatccacgtgacgtacagggccatcgaagtcagcggattgcctttgcgaacaccgacatgaccatccgaacgcacccaccgatgaatcgcccgcaatatgtttttctgccattgcggcttgtcggaggtacccctcagcggcgcaaggtcatgttcgatggcggcaagccgtccggccgccacggtatcggcatcgccgtcggaagtatgcttccaagcaccttcagtcaggaaagacgcccattgcctgagatagctaggcgtgaacaggtagtcggaatcagtggggtacgcgaaattgacgcgcgggtcccaccatccgcgagtcaccccggcataggccgtggcatattcaaccggatgcgcgaggccgagctgcgcccagacctgcagggccgcgagttgttgcgccgcggttggcctagggtgctcgcgcagagtgcggaaggtctcatcggtgcggtgcgggttgatgccggcggcggcccagtcgagatccatgatcgcgttcagtcgccgccgctgaaccttgtctatcgcactgggatcatcgtgcgcgagccgggccacgggctgggtgaccaggccccacacctcacgtccgggcgatcgattcgcatgcgtggcggccgcgcttaatggcgtccacacgccctgcgccacaacgatggcaaccgcaagacacgcgaacgcacgacgccgcgcgcctttgggcgtgcagacggcgagcaaacagcagccggcgcatagcacgattatgagcgccgtccgcttggagacgatggtggcgaacaacaggatgacgaacgcgaatgccaccgggcggcgtgccagtaccgagccgcgcgtcagacaagcctccacgaacagcacggccaacggcagatagaacacggcgtgcaacgagtccttgcccatcgtggtgattgcgccgaccaccacatagttggtggcaagatagacgaggccgagaccgatgagccagcgcggcgagccgattttgcggatgtagcacagcagaagcgcgcacccggcggcgagtagaaccgcttgggtcacggtgtacagggcctgcccgatcagaggggagccgagtgcgctgccgatatgccagaacaggccgaacgtgagagtatcaaacagcggatgctgggtgtagtagtggtgcagaccggacgattgcagatattgggcaagcgtatcgtcgcgcatcgagcccggccaggtgagtatgagccacggcagccaagcgatagcgagcgtgagcaggtaagggaggaatcgcgcgcgcagcgatgtggataacgtggtcgggcggcgggccgtgagccaactaaggatcgcggatatgctgcggtacgtctttgagtgtttcttcgattggcgcgaccggccgccatgtgctgcggttacgtcggtcgctgtcccctcgttcatgactccacagcctaggcgcgattgcgggcgcgcgccgggcgaacatcgaaaattcacccggacacggtgatttctttaccgggggttgtgtaggtgcgcgcgggtgtgtgggccctgcacaagtatgcggtccttgtgcgggtgttgcgcgggactttccagtgagtctttcactcgcagtgatcattcttcacatccgcgtcgcgacacgcgccacgccgaagcgtgcacttatccgaaacctgtggtaacttattcgagttgcctgcggaacacagttcaactgcgcgctgcaaagcatggaggattcgcctagtggtctatggcgcacgcttggaaagcgtgttggtgtaacagcctcacgagttcgaatctcgtatcctccgctagcagggctttcgaagaaattcgaaagcccttttcttttgccgaaaacagcttcctctcaacgattccgaacggcttggactgtcggaatagtttccttgtagtgtcttcagagggtgttcggcccgacgatatcggtggcacgttacgtggtgcatccggtaggccaaatcggtgcaccactttatgtctgaagggagccgctcatgacattcgatgatcgatcggcgtgccatatgagaacgtctccgtcgattccgacggtgtttacacttttacatcttcctacaccttcttacacttttccttcaggtcgaaaagtgttggaagtattggaattattgggattgaagaccattttcctttacacttttgctcttttcgcgggtctattgcacaagggatcctcaaaatgcgttggaatccttggaatctttgggattcagggatccggaggaatgcgatgagcgggcgccgtaggattcggttcggtcgtgtccagaacctctagggacggaaaacgcaggtatgtggaggcacgctaccagccgccggtatgggcctatgccaaatggcccgatttgccgaagcattattcgagacgattcgacgccgactacaccgcaatggcggaggcctggctcgctgacgttgaacggcatataagactcggcgactgggaaccgcccagaatcgtggtgagcaagacgagggcgacggcgggaacatcatcggggctatcctcgccggccatgacggcagacggtcacgcatctatcacactgcggtccatcctgaagcgcgcggcatgggtgttggctcacttttggccgggcatgcggtcgaggcgcttcgcgcactcgggttgccgaagtttgccgtcggcgtatatgcggacaacaaggccggcaacgacttctgggagcagcagggctttgcaatccgagacgacctggtctatcgcgagctttccttgtaaggtgtccacccgcaatccggcttttgcggtcggtcattcactcgtttcgttgccgcacgcacatttcatgtcgacgatctgttgactctgaatcgtgattcaaatgatccgggccgtatggcctatggattcgatgtcggtttgcttcaatcgcacagacgtctgatgcacacaagtccgcaccggatattgaaacactcagtcttcgatgacgctgggatcggcgccactttttgcgtggcggccgcttacgaaggtgcatatgccgtcggagacggtagccttccggccgtatgacttcctcatagatgcaagcagcagaccatgggactacggtctccccggttctgctagatgtatagattgtttttaagaaaacatagaaagtatgggagatataggtaatcgtgacacctcttgtcggcgtgaaggtatggaaaagcgcaagtttccttctggcgggctttgagcggcgaacagagtggtacactcattctgggaattggtagaaagccttgctgttgctgggtttgtgggtttcggtagatagagtctccatgatgtgcgcagacctcatgatgcgacgggctcgcctgttcgggccgctgctcgcctccggctgcgaggtgctgatctcgggggaggggacgcgccgcgtgcgattgttcgacggtgagcgggccttggtcgggaacgccacggccaaacgaagaagggaattcacggagacgcgtcttttggcccacgaggccttacgacgtatcggccatgacgggcccatactcaaaggttcggatggtgaaccgctctggccatccggcatcgtgggatcgctgtcgcattgtccgtcgctgtgcgtcgccgccgtggcgtcggcggaaagaatccgtgccgtgggagtggacgtggacgattcggacggattgtccgacgggatcatgcggttcgtgttctcttccgaagagctcgcatcattgcgtatggcctcctcggtggaacgtagggcggccttctgcgcgaaggaggccgcctcgaaggcgttgtccgcattggacgggacgggggacttccgtaaggtatccgtgagcctgaaggcggatggaacgttcgccgctgtgagacgggatgtggcgttgcgcggccaatggcgattctacgatcggctggtatccgcgatggtcgccgttccctcggagaccgtctgaggggcgcggacccctcgaatgagcagccggagcagaaaggcataggccgcatcgtcatcgtcgacgggcgtatcatgttcgggtcgtgtctcgaattggacgaatccgtgcacggcggaccatatggaccatgcgatgaggtgcgggtcatccctccggatctttcccgcggcctgcccgtagcgcactagctcggtcatggcggcgaggcatgcctccgaagcctcgcccgcatgccatcgccacaacagggcgtagatgccgggcgacgccttggcgtgcccgcggtatacgactcccgcatcgtagagtctttgcaggggatcctcggtggtgacacgcaggagcttctcccgtaacgtctggaaactgtcgtcgatgagagcgttgatgacggcctgcttgtcgccgatatgccggtagatgctcgcgggggacacatccgccttttccgagagaagccggatggtgaaggcgtcatagccgtcctcttcgatgattcgtttcgaggcgtcgagtatgaggcccctgatctcggtggtgggcgtccgctggctttttgtcgttttccgaatagtcctcatatgcttctccgcatcatcccgccgttacggatgaaaaacgccatccggcccgtaggtctctgcaccgtcccatgatgggtggggtcgaaggtccagccacgctcttggaccgcgcctcgatgggtgtgatggctggtcccaccgcattgagattgccaccgagccaagacatgtcggggaacgctggccggcgcggccgtggaacatgccgacgctctggctgccgtgaccggggaagcatgccgcgatgtcaccgatggggttgcgtgtgtcctccgctatcgcgccggccgtcaggagacggtccgtcatatccgtgtccttgatccgtgggatccgtccgtcgtctttcatgatggatgttcctttctattgggggagattgcctgaatcgtgtttgggaagtgtgatccagcagagcagcgcgaacgccaatgcgagggcgcaggcgatccagcatgccgcatgcgtggcgctcatgaaactggtcgagacggactgctccacggtctgtcggatgcctgccggcaggtgcggaaggatcgatttcgcggccatcaccgaatcctccgcggctttcgcgatggaagacgggatctgcagtccggacaacgagtccgagagctcgtcggggtagacggaggagatcgcggaccccatgacggcgacgcccagcgtgccgccgatctcacggatcgtgtcgttgacggccgatgcggcgccggtcgagctttccggaacggtgctcatcagggcgtccgtggcgggcccttggatcagggcgatgccggccgccatcagggccatggtgggtacgaccacgaaccagtagctgcaatgggcgtcgacacgcgtgaccacgaacatgctcgccgacaggaacagcagtcccgtcgagacgaccgaccggtatccgaaacgtttcgccaattgcgtggcgagcggggcgaccgccgccatgaccaccgcgaagggcagcgtcgcgaccgccgtctgcaatgcggtgtatccacgcaatgcctggaaccattgggtggtgatgaagatgaagccgaacaggcagaagaacgcgacgcagatcgcgcaggtgctgctcgtgaacgtggcccttcggaacaggccgacatcgatgagcggggcgtgcgtatgcccctcgaccgccgcgaacaccgcaagtatgatcagggccgcgcagatgccgcctatgacctgccaggagaaccagccgtaagtcgggcgttcgatgatcgcccacaccagcaggcccacgccggccaccgataacacggtgccggggaaatcgaacctctcggaacggtacgctcgtacctcgggcaccgccaccgcgatgcaggccagcgccaccacgccaatgacggagcacacccagaaaatggaattccacgcatagtgctccagcaggacgccgccgatgatcgggcccagggcgatgccgacccctgatgtcgccgcccacaggccaacggccaggctacggtacctggagccttcgaagatgacgatgattgatgacagcgtcgccggatagatcagcgcggcgcagacccccaacaccacgcgcagcgtcaccagctgccacagggcccaggagaaggccgtggctgcggagaccacggcgaatcccgccaatccgacgagcagcatccgtcttcttccccatcggtcgctgagtttgccggcgggcaggagcagcgccgcgaaggacagcgtgtaggcgtccaccacccattgcaggtccgtggacgaggcgttcaacgcgtcgctcatcgtgggaatcgcgacgttgacgatggtgttgtccatcacgaccagcagcaccgccagacacagggcggtgagggccagccccctgttcccggaccgcgcgtgtctccggaccggcatggggataggaatcaacgaacgttcagattgcatatcaatgctctcctactgtgtaacaatgttatctacaaatgaaacaatactcctctccgtgggggatcgccaccatccgtcagcgaggcatggaagcgctccgcgtgcggacggacccaccgtcggcgccatgaaccacgccgccgcccgtggcgcgggaacgggaaggccatgcggcgtcgcccggggtccgcaaaccccatggcatgttccgggcccgggaatgccacggccgatgggtcctccaaaatcagcgccgtccgcttccgggcggagagttcgtgcggtcgctttgatgacacggccgccgtcccgtcgggacgttcggcatcacccgattaccggtccaaccctcacggcgggaccatgacccgtcgaacttcaatgaggaaagcgccggccgaccctttgccggaaaacgcgaaccgtcggcatgccccgctgaagcgacgccgacgatggtttcggatggtgggcggtcccgatcgcccgatccttctcgatccaccgcccggcgatcgccgaacgcccgtggcggctcacgatggttgcaggcccatgcccatccaaggcgttgggcgcatcctgcaaaaaaccgggtccatcgtacgcccgaacatgcgaatctccgtacgccggcgtggatatctcgcataggcgggatatccgtcggggagattccactgacagcgtgaccagtcactcatgcgccggcgggagacgccaccatgaagacgcgaatcatgtgaatcatcacgcaaaggagcatgacgtgaactatctggaacatcgccgacagcacaaggacgcgctatgggaacagctacgggaaccacatcaagccccacataggaagcgtaccgataaagcggctgacggcatcgcaggtgcaggccgcgttcaagtcgtacataattcctgaagcggaatagccacatcgcacactggttttctctgaattccgagattctttctctgaattcagagataaatctcgggattcagagaaaaccgttcaagaatgatctgcgtatctcattcaacgtactgccgcataccgcacgttgcgtccactgccgaccttcttagcgcgtccttcaaggactagttttcgcaactggtagtacgcctgattcccctcaagatgcagcaattccatcacatcgttttttctcactgatttctgttcatgcattaacttgatgatcagttcgggataccgtaccctatcgatgtctgattggcgaacgtaatccatcgccctaccgctgcgccgatacactttcgcacccaacatatacgtgcggcgagctccaacgccagcgctttcaacaagccccgcctccgtcagctgccccaatacggtgcgcagacgctggtcactcatgtccagggagcccgacaacacatcaaagccacaacgacgttcactcttgagcttgtccaaaataagcagaccatcgagagacatggacttgccgctgcgctcacgttcctcggccagcagttccacaaacgccttgtcgggcacactacgaggcaacagcaccgacactccacgcctgttggacctcgaataatcaggcagaggacgaccatagttcaaagcaccctcgaatatacggtcgatgccgcgccccgtacgttcggcgagaccggttcgcttcaacgcatccatcaggcagggattgcgaccatgcggttcggcggtaagcagattatggatgttgatgccctccacgaacccgccgggattggcgatggtaagccccgcatcatccaactgcacgcgcacacgtcccagcagggtgtagtcacgatggccgaaggcgttcaccagcgcctctcggaacgcccgatggtcgaattccggcaccatcattgagaacagaccgacggatagctcgacgcttggattccaaggagagaacatgtcgttgatttgctcgatggtcttcagcaacggtccggcatagtcttggttgactttgatatccgtaccagacatgacttggaaagacgcccgatgagtcggaacgaagcgtttcagagactcccccttgcccagcagcagcaaaccggtcagcgtcggcatggtcttgccatcgacggtcaccgtcaattgcagggatttctccagctcctcatcggtcagttccaacaaattacggtcactggattggtaggtgccgataatccggcgcagacggtcgcgttcaaggggatcgaaatcatcacgggtcgcatccggcaccggctgcgcggaaaagtccaaacgtcccaaatcggacaggcgcgtggcgatctcgtacgggtacatcggcacgctctccggcgtaccatccaccttcatacggcgtcgcaacaccttgcccgacttggtcgagaccacgctgcgggatttcggcacatcgatctgcatcaccggcgtcttctccgtcccgacgatctgcgcacgagcggaaaccggaggaaccgtacgggagtagagagtagagtggcggcgtcgaccgacgcatgttctcgccataatttcaatcccgaaaaggagcctcgtcgcaaccatgacatcacatcttgccgaagcaggacgaacgttggttccccgcaaggaagacagatacggtctgctctcccccgccttggtggtgctgacgttcgtcgccgggctggtggacgcgctgagctacctgtcgctggggcatgtgtttgtggccaacgtgaccggcaacatcgtgtttcttgggttttcgatcgcccatgcccaaggcttcgtctggtggacgtcggcgctgacgctcgtctccttcatggtcggcgcgcttatcggcgggcgcatcatccggcgattcgaggagaaccgggccaagcatctgttggtttctacctgcgtgcaggcgtcgttcgtactcgccgcgctaatcggcgtctatcttttgaaccagctcatcaccggccccgcagacgatgcgtccggcgtctcctcgattgcacggcttgcacagaccacccaggcctcacaggcctcacagccgagcctgaacttccccaccgcacggcacatcgacctgcacatcatcctgctgatcgtgctgctcgccccggcaatgggcatccagaactccaccgcccgcaagctgtcggtgccggacctgcccaccaccgtgctcacgatgacgctgaccggcgtcgtcgcagacgcttcggcacacggccaccagcagtcgaagctcgggcggcgcgcggtcgtaatgctggcgctggcgtctggcgcgctgaccggcgcgcttttgcgggcgcacggacacgagaacatcatcttgatggtgatgctcgggtgtctgctggcggtcatcgcgatgatgattccgcacgtccattcggatgcgccgtgggtcaccggccggcaatagcctctggcgcatactttcgccatatgagacaaaaacggccacgccacagcgcgaccagtaggaaacgctcggcaatctcggctctcctcgatatgttggatacccgttgtttgaaacaggccctccgcaagatacaaacaggggcagtgagaagtagaggtaaatatgactgacgcacagcaggcgaacggcaaccagcccgaatcccagaaccaagcagaagcgacggcacagccgcacaacaagcgagtgacgaagtgggtcgctatagtgattgccatcgtggcggcggcgattatcgccgcggtcgcggtgttcggcacccgcgcatacagcgcgtctcagtacgatagcgcagtggccgcctgcgccgccgcctcggaagacgtacgtaacgccaccaacgactacaacaacttggtcaatggcgatgctgcagaagccgccgctctgaccaaggcagacgtctcggacgcctccgctctcgacgcgctgtccaaggaactgaccgtggaactgccgacgtacgaaggctgcgtggccgacgacaccaagggctaccaggccgcgaccaagaaactcgaacagcaggtcacgtggtaccacgagcacaccacgtcgctgcagaaggctgttgacgccatcaacgcggtcaagaagtaagacgaggtcggtctccctcacgttttcaggatcggacagcgctcaagtcgcggcaacgcgcgatgtcggccggtcctgcacggcccgaaacggcagaaatcccgcgccccttacgttcggacgcgggatttctgccgtttttgagtcacggattgggactatagcccagtctttgccccagagttgtctattcaggattaccctctcggccgtatctcatgagcaggacgtgtaaaaacaaaaaaccctcgctaatccgcgagggttattggctggggtgcctggactcgaaccaagaatggctgaaccagaatcagctgtgttgccaattacaccacaccccaatttggcttggcgcagcaactccgaagagttgttcgtcgtacccccaaccggatttgaaccggtgttggcgccgtgagagggcgtagtcctagaccgctagacgatgggggcatattcagtttttcaaccggctgcgaggcgaaccgcgcaacaggtagatatattacgcgctaccctgctctcacgcaaatcccggcgtgtcgcgccattttccgccgttctgcgggaacaccccatgcaacgcgaaagcgggcatccgtatgtacggatgcccgccatgcgtcacgctcccatcatccgccggcgtgcggtggacgacgcatcacagatgcgcccgcaggcccttgagacgggcgacggtgatcggcttgccaacgatctccatcgattcgaacagcggcggggagacacggcgtccggacatggccacgcgcaccgggccgaaagcgaggcgcggcttgtagccgccctcctcaaccagagccttgttcagggtctcgtgcaggttgtcggtcttccaatcggcctcatccacgccttcgagagcggcgatggcggcatccagcacctcgccggcggaatccttgagctgcttcttggcgtcgtccgcgggctccagatactcctcggtggacagcagggagccgaccatgccggcgacctcgcccagcaggcgcacgcgcggctggaccagcggggcggcggcggtcagcacctcacgctcacggtcggtcagggcatcccagttgtcggcggaaaccacaccatcgcggtgcaggtacggcaccgagcggcgcaggaagtcctcgggctcgagcatacggatgtgctcggcgttgatggagatggccttgtcgatgtcgaagcgggccgggttggccttgacgtcgcgcacgtcaaacttctcgatcatctcgtccatggagaacacgtcgcggtccggggcgatagaccagccgagcagggccaggtagttgagcaggccctcgcggatgaagccgttgtcgcggtggttgaacaggttggactccgggtcgcgcttggagagcttcttgttgccctggcccatcacgtacggcatgtggccgaacaacggcatctccttggcgatgcccagctccatcaggtaacggtacagcacgatctggcgcggggtggagctcaggaggtcctcgccacgcagcacgacgttgatttccatcatcgcgtcatcgaccggattggtcagcgtgtacagggggtcgccgttcggacgcacgatcacgtagtccggcacggagccggccttgaactcgatggtgccacgaatcagatcgtcgaaggcgatgtcttcatcaggcatcttgatacgtagcgcaggcttgcggccctcggcgcggaaggcggccttctgctcatcggtcaggttgcggtcgtagccatcgtagccgaactcggccggacggccggcggcaaggttgcgctccttgatttcctcgggagtggagaaggactcgtaggcgtagccggcttcgagcagcttggcggcaacatccttgtagatggcggtacgctcggactggcggtacgggccgtgagggccacccacatcgatgccctcgtcccagtcgatacccagccaacgcagggattcgagaatctggttgtagctttcttcggagtcgcgcacggcgtcggtgtcttcgatacggaagatcagcgtgccgccggtggcgcgagcttccgcccagttgaacagagcggtacgaatcatgccgacatgcggggttccggtcggcgacgggcagaagcgaacacgaacgttcttgggcagttcgggtttggtgttttcagcatcagtcataatcccctattgtgccgcgcgcgccggacgcggagagcagcgctcctcgctcttttgcttcgttattgacatttcgggccaacaccatcccaaaacggccattttccaacgaaatctcttttgcctgtcttgggtagtgcccgatatcttgatgcctgtcttcacacctgttttgacacctactttggcgccatccacacgcccgcacgcaaggcttcgacaccatttggcgcaattgttgagttttttacccaaacgatggaagaataggagtcgacgcaatcgtcttatgaaaggggaatcaatgaccgatcccaacaacgtgccgttgccgcagatgcccgcgcccaacggtaccccggcccagcagaatcccagcacgccgcaatacggcgcacctgctccggccccccgcacagccagattatgggcaattcgacgctccgtcccccgcacagccggcctacggccagcccgcatacgggcagcccgctcccgattcttccgcacccggcgcagcgcccggtgcaactcccgcctatggtcagcccgccgccgacccgtacgcggcgaatgcggctccgcaattccccgctcccggcgcggctcctacctacggccagcccggaccggacgccaacgcttacggtcaggtgccacccgcatacaaccagtacgccgctcccactgccacagcagccgtgccgttgaacaagccgtattacgactgccccttccctgaggcattcctccgtttctggaagaagtatgtggtcttcaagggacgtgcctcccgcagcgagttctggtggtggacgttggcctctgtcggcatcagcgtcctgctgagcctcctcagcagtgccacggacgacaagctcgggttcctttccagcatttggagtctggccatcctgattcccagtctggcgctcgccgttcgccgtctgcatgacacggacaagcccggctggtgggtcgccatcttctatggcgcgatggccctcggcatgatcatcatggttgccggcggtggcgcagcactgtatggcgccttcggcagccttagcaactccagctatggagccatggcaaccggcggcctcggtgccatggccattggcggactgattacgctcgctggttcaatcgtctacatcgtgttcatggctatgcccagcaagccggaaggcgcacgtttcgacgatgacgcagtagctgccccgatgcctcagggtgcttacggcgcaccgtacggcgctcccgcaaccccggacttcaaccaggccgctccgggcaccgctccgaacgcacccgctcctgacttcaaccagccagccccagcctatggtcagccgaccgcaccagctcctgactacggccagcccgctgtgcctacgcccgattacggtcaggtaccggttccgcagtacggccagccggagaccccggccccgcagtacggccagcccgacgctcaggccccacagtacggccaggttccgccgattcccgaaaacgttgatgatgggtccaccgtgctgtctccgcacacggctcccaccgatgacaacgcacagaaaccctggcaaggccagtgactgacgccggcgaagttcgcttaagaagttcgcctcatcactcatgaagcccaacaatgaggccccactcatcaagcggcggtagtattccccaccgttcagtaagccaatgccctgtgtactggatcattccagcacacagggcattgtgcgttattgcggcccctctcttcgcgcaacattccccggaatgcgttacggtggaggatggacgctgcgccgagctactcctacaagctgcctacggagagcgtttgggagatcacatgggattctcccgggcccagcgtcacgatgcggtcgcggcataccgccgcttcaaccgccacgaaaccgcgccattcgcccggcttggtgtagctcatattgtcgccgtccgctcccggattccacaccacggtttgcggcgacccggtacggctgatatgaatcgcacgccccaacatgtcatcgcgcagttccagacgcgcatccgagtaatacacacgattcaccggctgctcgccaaacgtcaccacttgcgcgtcctgtgttttcggcggaaacccttcttcagtggcatccagatacgtcgctccctgcaatccgaccagctgagcaccggatacatcgccgacatgcagataggaatgcaacgcggcctcgtacgacataggcgccgtgccggtgttggtcacggtcaggctcatggtcagcgcattgcccgtttgcacgtcatacacggcatgaaactgagcacccggctcgtcatcgaaccaaggcacttcattgtcgttcagctgctgcgaatccaacacataccgtatgtggctgtcgtcgaatgaaccctcgtccaacgcccaccgacgcagacgtgcaaaaccgtgggatggattgagtgccagctgcttgccatgcgcaaaacccgggccgaaccacgggaagcagatcggcactcccccgccgagcgacttaccggcttcgatatgccacgtactcggcgtccacaccacatccgcctgcccggccggggcccagcgcaacagatgcgctccgtaatcgctgattaccacgctgccgccattgttggcgagcatacgcaaatcgacaccattgcccataagtttcccattcccattgtgcgaacgatacttttcactaaataggatacttccttaacaaaaaagaatcgcaaagtatggccgcaggatgcacaaaggccgtgccaccccattcgccgacgaccgccacgcgccaatcgtgcgcaagatcatcggatgcgactggcaatagatgctggtcacgcgggccagtgcccggctcaagcacgacttccccctcgcgcaccagttcgccgtgctcccaatggtgcacataaacgcgatccgcacccaaatcgctggtcagcacgcggccgtccggcactggctgcacccagtgggcgacggcgcgtccgacagcagccgttcgcggcgtagcaccttggcgtcgccactgttatcgccgccggcatccaataccaattgttcgatgccggggcaagccacatgatgcagtttgccgaatccaccaaccagaatatccatgaggatgttccgttttactacgaactacgaaactcttttcgccacacaatacgccgtcgccggcggggcaaaatatgccaaaattagccaattgcagaaaaagggcgatccccgtataggaatcaccctttgcgcacacactcaggcggagggaagtgcctcaggccgtcaaaccggcgaagagcgccgaccagtcctgagactcatcctcaaggtcgaatcgttcggtgttcatcagtgcctccttcaccggtccgggagccctcccctcaagtttgtgtattgagtaatcggtgagatcactgatcgtggcccccaatgcccatccggaatgcggcaaatacacgtggaattggattgagcagacgaagacgccgacagtgatcatcgaacgtgatctgccgctgctgggttcccgctacgtcgattcagtgcgcaccaaccatccctatggcgtgcgtaaggcggcggtgcgcttcctgcaacacggtcacacccgtgtgggcgcggcgttcaccgatacaccgacttcggagctgattcaggatggctggaagcaaatcgtgacggaaagcgacgccatcgaatgcccgttcaccatcaccggcattcagccgtacaacaccagggacgtcaaccaaatcgtggacaccattctggattcgggcgtgacggccatgctggtgcactccgattatctggcgatcgccatcgcgcagaccctggagcgccgcggcaagcgcgtaccggacgatatctcgatgatctccgtcaacggctttgccacgcccagctcccgcccgctgaccgtactgcgctcgtccgataaggatctggccgaggcggccatcaacctgctgatcaaccgcatccaaaacccggattctacaacccgccacatctacgtggacccgacgctgaccgatcgcggctcggtaatcgataagcagtaaccccacctccctctgacgagggaggtggcatcgcaaagcgatgacggagggagaggcaccaggcctctaaccgttacgagcgaagcatcggccagagcaacgcccttactctttacaactccacggtctctttgccgggatcatccttgacatgcgcgaacttggcggccagagcctccttattgcgcttttcgtcttcttccttggcctgacgcttagcctcgtccgggttccagagcacatcctcacggtgcttgttccattcggcaacggccagaggagcgatgtattcggcggtggcggtcagggtgtctgcgtcggcggctttggcacgggcattaagcaacccgaggatctgctcgtcggtcaggcagatgcgcggcaccgagcactgctcgcgcagttcgttgacgtagagcagaatcggcagaatcttggcggcagcattggcgacactgtccgctgaaccatcggccacagcatcaccggacacctcacccaataacgcatcgcacacggcgagcgcggtggcgaaccgaacagccacatcggcgggcttggcagacgtggccagacgaccatcggcttcagcgtcggcctcgacctgggcttccatggccgcgaccgcctccctcaccgattccgccgtcgcggaatcccagtcgattcccaacacgtcggccgcctcaacgatcagcctggcatcaccggactcggcgtagtcggccatcgtgtcgtaggcgtcattggcggcgagcagggcgtccacgatgctctgcgggcgaccgggaatctcatcggcaccttcgtagacgaactcggcgtcgggcacggtgacgtcctcgccggtcaggatgcgggcgaatgcacgggtgacgcgcacctgcaggttctccgcgtacttggcgtcattgtccatttgcatggcttcggtcagcggccacaggctgatcagcgccgagccggcttcggcggcctcagttaccgccggcaatgccgcgacctgtgcgattgcctcacgattgagttcaatggtcatctatgctcctttgcgtccaccactcgattgcagtgcgtcttagctcccctctctgaggggagccaatgtcctaacaccagtgtgccgttacttgacgttggctgctgggtcgacatacgtgattgacatcacacggccggtttcgttgtcgtacgtcaccgaggtcacggaggcgagcgccgtgtgccgcaggaacatccagtgctcggggtggccggtctccagataatggcgataactgaaaatcggcgattcgtggctgaccaccacaatctgctcgccggggtgctgggccaccttctcgcgggcgaagtcgtccatacgcgccgcgatgtgctgataggactcaccccagctcggcttgtacaggttggtgacgagcttccagttgccgttcttccacagcgcgccctcgccatggccgatgcgcttgccacggaactcgttgccggcctcaatcacccgttcatcagtggtgagcgtgagcgaagcctcgccacgagcctcgcgcacggggttcagcgcatcgagaatcgcgccggcggtctcgcgcgtacggtcgagcggcgaggagtagacggctgcaatcgtattggtttggggattcttggccaagtacgtggcggtggcttgagccatgcgacggccaaggtcggaaagatggaagtcgggcagtcgctcatagagcagatggtcggggttatataccttgccatgccggacgaaatggatggtggtagcgctcatgagccgcctttctgcttcccgccctgaagggcatgagaacgttgtcttaatatctccaatctaccgcgtgtcgcggagtggacacccgtagagtatccgtgacgcaaatatgcggatgggaaaatccgacgcaaactttgcgcgaccatggacaacacatcattcgatgagggcttcgccggcaacgccacgccagcgggggacatccaatcgggagcggaaaggagcgtagtgctgttatgtccaataactcgtccaactcgaactcgagcaccattctggccggcatcaaggaagtaggccacaaagtctttggtgggtatgcggaactactgcgcattccgcataccgcccgttattccatcggctcggtcatcgcctgcatgccattcccgatggtcggcatgaccatcaccatttccgtacagcattattacggcaactattcgctggccggcatgctcaccgccattcaggcgattgcgctggccgtggccacgccgctgctgggcaagctgaccgacaagttcggccagaggcaggtctcgattccgacgattatcgtttggattgtggccgccatcgcgctggtgacggcgattaccaaccgcgcgccggaatgggtgctgtactgtctgacgccgttcctggccgccattccgccgtggggcgcgatgagccgcgcgcgctggaccaagattcttaagggtgaccgggagcgcacgaaccgcgcgctgtcgctgtgcggcgtgctcgacgaatgcatgtgggtgatcggtaatccgctggcctccacgctggccgtgatctccggtttgctggcgttctcgttcaccggcatgtgcgtggtggtcggtgcgctgatgttcctgaccgagctgaccactgagccaccgtcgcagaccgcgctggcgcgtgccgagggcatctcccgcaaggaataccgtgagcgcgaggccgccaaggctgaggcgctgaaggtggaaaccgccgccgaggagacccgccgccgtcttgagcgtgaaggcgtgaccgatgaggccacgattaacgcagccattaagcaggcggtcgccgatgcgcgttcgggcaagaaggcgtccatttggggtccgggtctgattgcggtgtgcgtcacctggttcggtttgggcgcgttccagtcggctacgggcatctccatcatcgcgtttgccaccgaagcgaatatgaagcagtacacgggctttgtgtttgcctgcttctccttcagctcgctgatgggcgcattggtgtatggcgcgaagaactggtcgattgccctgtggaagcgcttctacttctgcctggccgtggtgaacatcggcatcagtacgttcctgttcgccaagcatctgtgggtgatcatgatcatctacttgattattggcgtatgccaggccccgacgtggatcaacggcaaccagctcatgttgcatctggtgccgccctctcgcttgaccgagggcatggcgtggatgggtgcgatgaattctatcggctcctccgccggttcggcgattgccggccagttcatcgaccgcatgggctcgcacggaggcttcatggtggtgaccaccttggcactggcctcgctggtgattgcactgatcggcttcaagcagatcaagggctccaccgagcagccgaccctgactgaagtgagtgtgtgagacgtatgctagccccctctgacgagggggctagcatacgtcaaaacgctacttcggccagcctttgggcgtgtgctccaaggaccagatgccgagcttgtgggagaagctgttctgccacttggcttcaagctcctcggcattcagtcgattttcagcggacttcagacggttcatcgcattggtgtgcgtatcgtcgagcagccacttgcgaatcaagaagttccagatcattaccacggcagtggccaccagcttgccgatattggtgcgcaacagatattcggcatgctgcgatacataggcatcatggttcataccataggtggaaatccagataatcgcgtcattcatgaacagaccgactacagcgcccgccacgaagataaggatctccatccagcgtgccatgtcatcacgatgcttgaatacgaatttcatgctcgccagatagttgaaaatcagcgagatgatgaaagagatggtggcagccagcacgttgtgcatgtggaatatgccaaccaataggttgaggataccccagtcgataacaaaggcgataacgcccacaatgccgaacttcatcagctgttcaatcagttttctcacaagagtattcaacactattgggctgactgcggaacgtgtattggctggaaaggccaataatatccccaattggccttgccccggtccgttctgcaagcagcttcctacgtccgcatgccatgttcaacagcagccgctgaggctagactggaagtgaaccgaatcaaggaggaattatgcccgttattcacactcatgtgtccgtgtccaccacccccgagcagcgtgaggcactgaaggccgcctacggcaaggcgattaccgctgtgccgggcaagtccgaaggctggctgatgtgcccgttcgaggacaatatgccaatctacttcggtggtagcgatgaccagcccgccgcctatgtggaggtcaacgtattcggccgctctgtgccgggctctgcttgggaaaagctgaccgaaagcattatggccgcgctgaactccacactcggcattcccgaggaccgcacctacatccgctacaccgccaccaccgattggggctggaatggcggcaacttctagttgccaccattcccctcgcagcatagctgttcgcatcgcctacggaaagcccagtgggctttccgtttaatggctcagggtggcaactagtttgcgtattctggctcccctcagtcagcttcgctgacagctccccctcaaagagggaagctcagatgtagaaagcccgccggtgtcgggctttctacgtttcaaggggctgatttccaacattcagaagctctactagcgtttcaaggggcttttaaaacaagaaacccggagtataaacattgcaatttcaatggtcatactccgggtttcgcaatcgaagagcccctcgaaacgcagatagacctccggaaaaccggaaatccgcccctcgaaagcgagttacctcacctcatgcctgtcatcacacaatcttgggcatgggggtggtgaggctggtggtcaggttgacgtggaccagaccggcaccggcatgcacctcgaccttcttcagggtcacggtgcgctcttcttcgggggcgcggtcgttgtcggtcatggtcgccggggacttgaccgccacgaacgccagatcatccagcgagatgcctgcgctctggcacagttccatggcctcggacacggactcggtgaagcccggcttgtagatcacgcgctcggccggtacgccgtaggcgttctcggccacccacttggcgttctcggtcagggccatgcccttgtgcgaatgcggttcggccggcatggagccgttctgcagcgcgtcgacgaaaccgtcaagctgcgggaccagcgcctcgccgccgtcgcggaacagattgccgacgatcggcgtgcggaagcccagctcgtcggcggtggcctgcagggacgggacctgatcgtcctcgccttcccacaggttgatgagcgggaaggtcggaatgtccaggttctccaggcgctgcacgtggaacgggtagcgccaggccagctcgggatcgtcgcgccaggtggaggcgcgggtcactacgatggcggcggacggccactgcgcgccatactcgcgacaggcgatgtccagccacttctgggcaccggcgtcggtgccgtaaccggcttcgacgacaaccacatcatgcagagcgcaggccatttccacggaaaccagcgtcgggatgccgatggacacgttggcgaacgggccaccgtgcacgtagaccggggagccgttcacggtctcggtcttggccggcttgaccgcgtcggccagaatgccggtgatgcgccacaggtccacgaactcgccgaaggtcacggccttgccgtccttggtgccggcgatcatcttggatacacgctcggaaatctcgtccatcgagcgggagagcaccatgatctgcatgagctcgcaggtcggcgtgagcacgaccttctccggcacgttgcccttgccgtagtccacggcggtggagcgcagggagcggctcggcacctcggagacacgcggcacgagaatcgtgtcaagcttgccttcatcgatggccttctcggcgaaggagacgagcaggttctgggccgcctcgatggcgcccatttcgccgcacagaccccagtcgatgagctcggggtgggtcagggatgccttgccgccgccggaggcaccgcccttggaaccggctgcggtgatgcccatgctcggctgacgcagcacggcggccgcatcaatgccacgcttgttcagggcgtcgatcaaggcgatggtcgtggtggtcttgccttcgccgcgcgatgccttgagcggcgtatcggcggtgacgagcaccaccttgccgtgcttgcgcggggcgtccgggttctcagccaggtacttcatgtagccgaatgcgtcgatcttctggaccaggccgtactggctggtgaagccttcgatggtggtcatttaatgcctttctgtgttgatgatggcggagcggggtggtggggcggccgccgccgcctcttcgcctagaaacagcccactgggctgtttcttaacagcttagcccctcagtccgcttcgcggtcagttcccctcagggaggggagctcaatacggactaaaagtcggacatgtggaagccgttcttcatttccatgctgcgagtgtacagcacggagtcaagcagcttgtcggtttcctccttgagctggtcggccatggtctggttggcggcggcgagaatctcgcgcacttcggggttacgcagcgcggcgatggtctcgtccggggtcatcggctgcacatcaccgtctacgttatccgcctcgaattcctcttcagcggcagactgcgcggcttcctcggcggccgtcaagcccagacgggcgatctgctcgtcggtggcggcgaccaagcggtgacccatcgcaccggtcttctcctggtagcgctcgacggcgttggacgtggagcggaaggcgccatcgcacagggcggcgatgatgcggttggcccagtagaagttctcggacgtcacgcgggtggtggtgtcctcaaggtaagcgggcgtggtgtccacgttcgggaagaacggcaccagcgtgttgaacgggttggagccgtatgccatccactggatggcgcgggaggcctgcgggcggtacgggcggatctgcatcaccgcaagctggctctggcggttgatgccgatcgtgcggtacatgtggcgggtgcgctcatcgcccagctggccgtatggatcgaacggggtgccctggtagtgggagctcaacacgtacttgatgtcctcgatggtcaccttgcgctcgggctggcgggcccacgggatgtcgtcggaggtgggcttgtggtcggcgtccgggccgtcccacacctcgtcgtacgggttgaggaagcgctgcatgtaccaggcgcgcggggtgttgtacacgtggtcggagtcggagtgggagccgaaggcgtcgcgcgggttgaacggggtggtgttctccaccgcgaggtccaggtggttggtttcgatgaattcggcgagatcttcggagcacatgtgcgcttcttggtcgcccagagcgtcctcaaggtcgaattcgtcgataccgagctggttcggcatggtcacgtaggcctcgtccggcacgcgcttggcaatccagtgatggccgcccacagtttccagccaccagatttcgttggagtcggagaaggcgacgccgttcatctcataggtgccgaattcctcaagcagcgcgccgaggcgctggacgccctggcgtgcggtcttgacatacggcagcacgatggtcaggaagtcctcttcgccgatgccgccgggcacctcgggctcatcgcccctggccggcgtgtattccacgaacgggtcggcgccgagcacgcgctcgttggtggtcagggtctcggtggcgctcatcgccacgttcgcctcgttgacgccggcctcgccccagatgccttccttgaggtccgcgttcggcacggcggtgtactgcagcgggtcgtccggcagagtgatggtcaggtgggagatcactgatttgtattcgcgcggctgttcctccggtttcacgacgatgaagcgcttcgggttgaactcgccgttcgcggaatcctcgttgcgggcaatgatggtcgaaccgtcataactcgcgtctttgcctaccagaatcgtggtgcaggccatagtgtgatggtgtcctttctcttattcaagctccccttgtcaggctgagccgttcagcaaacagcccggtgggctgtttgtaggcgagggtgggagataagtcccaccacagatgttgcgggcggtagcccgtccgtaattgcaggacgagctgtctcgcaaagcgagactgaggggtagtcactctagctgtctctcccccagtccgcctacggcggccagctccctcatcagagggagctcacatacgccaactaaaaatcacgccttaccggtcaggaagatgccgtcggtgtcgggcgcttcgccgctgttgcgcagcgcgtgcaacagctcgttgagccagaagccctgattcaagccgggcaacggcttcttggtggcccacacctgcaggtagtactcgtggtccttgtccggcggctgcggaccgttgtaccgcatgatcaccgctgggtcagtgctgcggcccaagaacttggaggccgaagaattgcggccttgcacggtctcgggaatcatggccggcagctgacgggagaagtccggcgggatggccaacgcatgcgaatcattgaagtcgtacatcagcgcgtcaatcggcagattggccacggaccagtgaatccactcgaagccgcagaccggaatcgaatccgggtccacgaactcccagtgcaggtaacgggcctcggggttcacatcaccgatgtagaacgggaaggagacgaccggcacgccgccgttgaagtactcaggcgcggcggccttggcaaaatcgtccggaatgacggtgaaatcggcggaaatcttcatatgtcccagtatcgctcatatgtgtgacgtactgggggctgtgcgttacgggggtctctcccccagtctcgccgcgctcgacagccccctcgtcagagggggctggttgcgtcgggttatggaattagggcgcagaagagggattcgaataccagtagcgggttgccgttgccggctagacgcttgcgggcgtgggccacttcgtccagacgggtcacggcaccggcccggttcaaccgcaccgacaattcggtgatcggcgagcggttctccaggttgatgaggcccaccgaatcctccgcattgttctgcagcaccgccacatcccggtagatggaggcgatggagttcagcgcacgatccaatacgtcgcgcgtacggcgggtgaccaaacgcttcacatcgtctttcttggcgatctggttgaacgcgccacgcagtttcggcgggatgcggtcgttcggtgccagtccgttgatgcggcggaattccgcttcctggccggcggtgatgcggcttgcgtccgcctcggcctgggccttggcattgtcgataaggctgccggccagcagcaccgcgtccgaggcgcgagcgaggttcagtacgcccaccaccaattcgtcgcgatccgtcatcacctgctcgtcagtggcgtacaacttggcgatgccgatgtgtccctcggccagacgggccgcacgctgcgccacttttggctcgacattggtggtggaggtcaggaatccggccaccgcctgggtggagggcacggcgaggttcacgatgcgcgtgcgcgagcggatggtgggcagtacatcctgggcactcggcgcacacagcagccagatgcagtgttcagccggctcctcgatctccttcagcagcacgttggtggtgcgctccagcatgcggtccacatcctcgatgatgatgatgcgccatggtgccgtggcaggcatttgctcggaggcggtgatgatctcgcgcacctggtcgatgccgatggtcactttgttggtggccagcactgtgacatccgggtgggtgccagcgagcacctgttgggtgacgcgcgtgggctcatcgttcatgccgtggtcggggctttccagcgccgccgcgaatgctcgggccatattggaacggccggagccgggaggcccgcaaatcagccacgactgggtgatctgacccgggtcgccctgcgcgatgcgactgagcatgtcgattaccggctgctggccgactagtgaatcccatacgctcatcggacaccgcccatcgtcacggctcctgtagacgccccggatcgcgccatcaccgtatccacatctgcaacattgtcccgcagcagtgtctgaatgtccgcttcgatggcggaccacacctgttcgatggactggctggcatcgatcacgtggaaacgattcggctcggccacggccaagtcgaggaacgcctgacgggtgcgggactggaagtcgctgctggccgactccatgcgatcttcggcatgctcaagacgattgtgggaaagcgccggatccatatccagcagatatgtgcggtcgggcagcaggttgttggtggcccacatgcttaaggctcgaatctcttctggcgtaagttcgcggccaccggcctgataagccaaggaagagtctaaatagcggtcggtgatcaccacttcaccgcgctccaatgccgggcggatggtttcggcaacgtgctgggctcggtctgcagcgaatagcagcgcctcggcgcgcggtgcgatgtcgacggcgcccccatccacaccgtgcaacagcagttggcgaatggccttgcctagcgcagtgcctcccggctcacgggtaacgaccacggtacgcccctgagcctcaagatacgcacgcagccgctcgacttgcgtggtcttgcccacgccatcgacaccttcaaacgaaacaaacagaccgctcatgctattgaccttagcgttaggcgcagagttgtgcccaacaggcagttaaaccagctctacctccgtttcaaggggctgatttggtcttttctgaaggtctacttccgtttcgaggggctgttacccaagtagacaacgtcccaaaacggcggaatgacgttggcgcggagtcgttcatactcgtggttcagcagatgaccagccccttgaagcggaagtagatattctcaaaacgagaaatcagccccttgaaacgcaagtagagcaataattccgctcagccacgcttgggaattacggcggggcgctcgtagccctcgttggcggtcagccagtcgacatccttcttgacggtggcggcggtggagctgagcttttcggcgatgcgctggttggaccagcccttgttcgccagcttcttcacctcggcacggcgtccggcgcgcttggcctcggcggcattggtcgcagccgaagcagcgcccttcttggctcccttggctcccgacttcgcggcaccggcacgcccagcaccgcgacggccacgggtggagggaccagccgcacgcttttcggcgagcagtcggaaggcgtcatcaggggtgatggattcaggcgtgtactgacgcggcaccgtgcggttggtctcgccatcggtgatgtacgcgccgaaacggccgtccttgatggtcacgttcttgccggtgttcgggtccttgcccaaatcacgcagcggcggcttggcggcaccacggccacgcccgcggccgtacttaggctgcgagaacagttctttggccttgtcgatatcgaccgtgaagatctcgtcttccgaggccagcgagcgggtctccgacttgccgtcggcacccgtcttggtcagataggggccgtagcgaccgttgttggcggccaccgtgcattcggatacctcgccggtttcggcgttggtttcctcgtatgtgcccacttcgcgcggcaggctcagcagctttagcgcgtcttccagcgacagcgattcagggctcatcgtcttgaacaacgaggccatcttcgggcgcgacgcggcggcggccgcggccttcttcgaacccttcttggccgcagaagcaccagcagtatcgccagcagcgccagccgaagcctcagccggcggcaccagcgccacatacgggccgaaacgcccattgcgcacctcgacggtaccgccggataccgggtcaacgcccagctcgcgcggtccaccggagtggttgtcgatcaaatcgcgggccacggccaccgtcagctcatccggcgcgatggtgtccggcagagacgcgcgcttcgggttgccttcgacgtccagatgctccatgtcttccagatacgggccgtaacggccgacgcgcacgtgcaggccgtcgccgatgtcgatggtgttgatggcgcgcgcgtcgatctcgccgagctgcgcgacctgctgttgcaggccttcgtgcgcctcgtcggcgttgcgggcggcgccctcgccggaaccgaagtagaagtgggtgagccagtcgcggccggattcctcgccgtgggcgatgcggtcaaggccgttttccatctcggcggtgaactggtagtcgaccagcttggggaagttcgtctcgagcaacttggtcacggagaaggcgagccagctggggatcagcgcacggccacgctcgtatacgtaaccgcgatccatgattgtggagatgatgctcgcgtaagtggacgggcgaccgatttccttggcttccagcgtcttgaccagcgtggcctcggtataacgggccggcggctgggtttcatggccgtccggttcgatgtcgcttgcctcgacctgctggccgacgctcatcggcggcagggaggtgttggattcggaggcgtcacccctgacggccttgacgtccgtcttgccggcggcagcagcctggtctgagccagccccagcgccgggagcggcggctttgggcttgcgcccctcccccgtggccttcataaagccggggaattcgatgacagtgccggacgcttggaacacggcctcgccctcggtggggccggccggcgcagacaggcgcacggtggcggtggagccggtggcgtcagccatctggcaggcgagcgtgcgctgccagatcagcgtgtataggcgcagctggtcgccgggaagtttggaagccagctcatccgggtcgtggaagcgcgagcccgccgggcgaatacactcgtgggcttcctgcgcgccagcggttttggtggcgtactgcttgggctcggcggagaggaacttgtcgccgaaatggtaggagacggcgttgcgggcggcggtgatggcctcctgcgacagcgtcaccgaatcggttcgcatataggtgatgtagccgttctcgtacaggctttgggccgcgcgcatcacgacgcgagcacccatgccgaggcgattgccggcggtctgctgcaaggtcgaggtggtgaacggcggctgcgggcggcggcggtacggcttggtttccatcgacatcacagtgaaatcggcggtcctcagcgcttcagccacggcagtggcaccagcctcatcaagctggcgaacgttcgccgcgaacccgtccggggtcagctggccgtcggcaccgaaatccttggagccggcgagtcgcttgccgccgagcgcgatcatgcgggcggagaattcggcacgctcccccagcgcgtcaggcgcggccaacatggcgacgatatcccagtacggcacacgcttgaatgccatgcgttcgcgttcgcgttccacgatcaggcgggtggccacggactgcacgcggccggcggacaggcccgggcccaccttgcgccacagcaccggcgacagctcatagccgtacagacggtcgaggatgcggcgggtctcctgtgcgtcgaccatattgccgtccacgtcgcgcgtgttgttcagggaggcgttgatggcgttcttggtgatctcgtggaacaccatgcgcttgaccggcaccttgggtttcaaagtctgcaccaagtgccacgcgatggcctcgccctcgcgatcctcatcagtcgccagatagagttcgtcggcgttcttcagggccgatttgagttcgctgaccgtacgcttcttgtcgccgtcgacgatgtaatacggcttgaacccgtcgttgacgtccacgccgaacttgccgaacttggccttgtctgccgcgggcacctggctgggctgcgcgaggtcgcggatatgaccgaccgacgccatgacggtgtaccccttgcccaggtagtcaccgatcttgtgggccttggtcggagactccacaatcaccagtttggtagccatacccactccttatgtattgcgcgaaacacacgacgtttctggcgtcataatactcatgaatcatatccaactgccaaattccgccgttgtgccgggcaaattcggccgttcgcacctcatgttttaccgtttgggcggtgccggcggagcgccgatcaggcccagcctgcttaagggcgctgcagtgatctgacgtagggccagcaacagtccgaatgcgagcatggccacacccgtaatgcccacaacagcgctgacattcgccccctgaaccgcccaactggcgctgacattgagccccggcaccacctgccagatcacataaccgctgtaggcgagcaacagcaggcccccggtaatcaacacgctgccgacgatctgcacactcactgaggagacgcggtggcccggctcgtccatgccggacttgcgtgtaaccgccagagcgagcagggccaatcccgccaccagcaggatggacatcgccacatccgaagggcgatgccattgcccgtatatcacagagacaccgacggtcgccgcccaaaccacgccgatgacgcccgccaaagctcgaaccgcgcgaggcacggtaagcagcagaatcaccgcacaggctgcggccagcatcgtgtgtccggaaggcgcggaattagcggcaggcgattcagtgttgatgatgaacggacgcggcaacagacccttgatacgggtgacggccaagcagaccacggcgaacacggcgatttgcccggccaaccaccagcggcgtcgaatcagcgccgtaataatgccgattgcggcaattgtgcagctgacagcgataaccagccaggattgtgcgacggcgttcatcatgccggtggtccaggacggtacatcgttgtgcaggtttttccagaccagttcgtcgtacgattgtccgttttcggtaaacacgcacccccaccacacgccgaagccaatagcgatcaggagcagaccgaataccacgcacagtacgcggctggagattcgcgggcgcacggtaagcgggtcaagccgggccaagccacggtcgatatcagatgccccatccgcatcgtccatgcccagcggcctgaaatcccctaaggagcctgatgtggatgccgatgcatctgaaccggagaccgggccgagcgcagccaatgggtcaacaacgttcgacgacgagtcaggctgcgctgcgcctgagccgaccagattgaccgccgcatgcgggtcgcgaattctaggggtctgtgcgtcattcatacgttcgactgtacggccgcgccccggacagggagccgtgctcgtgccagctcacggccaaatccgcacaaatggaaaacctccacgcacccgtcagaggccacttacccttgctgcattcctgccctgggggagttgggtgacatagcgccgcgtggaggctggggataagtctatggagacgtatggaccagcgcagcgacacgaaacgtgcgcgccgggtcgcacggcaggccaaccagcgcattcaggcaatattcatgcagcatcaaggaacgtgcccaattgtaagaattccggaaaaataccggcataaatgcgtgtggttacgctcacgtcaaacgattgttcaaggccaacagttacggtggacaccatggcttcttatactcgtcgtgcacattcgggaggcaatggccccgctctgaggcaaccgcgcaccgcgcaaagcagagccgaccactccgcacaggagggcccctatacgccccaggagagccgttcccgccacgcaagccacaaggcttccaatagccatcgagccccgaacaggaagaaaaagaacacaggaaaaggcaagcaccgtgtactgaaatgggtgctgggcatcttcttctccctgattggactgggcttgctggccggtatcgcagtattcgcatacctgtacaccaccaccgaggtcccgcaacccgaaaagttcgcgttggccgagaaaaccaccgtgtattacgcggacggcaccaccgcgatcggctcctacgcggaacagaatcgttcaatcatctcttgcgaggggctgccggactacatcggcaacgcgattgtggcgtccgaaaaccgtacgttctacacggataaaggtcttgatctgaagggcatcgcccgcgcattcattaataatgtgaccaagggcacgcgccaaggtggttccaccatcacccagcagtatgccgagcggtattacatgggcgaaaccacatcctatgtgggcaaggcgcgcgaggccatcgtggccatcaaaatcgcgcaaaccgagtccaaggacgaggtgctgtgcaattacatgaacaccatctatctgggccgcaactcctacggcatccaggcagcggccaaggcatacttcaataaggacgccaaggatctgacgctgtctgaagcggcgatgatcgccggcattattccgtcaccgtccacgtgggatccggccgataacgccgatatggccaaatcgcgcttcaagcgtgtgctgaacatcatgcaggaggatggttacatcactgccaagcagcacactgatgccaagttcccgcagactgccgcggtggcgcagcaaaacgaatacgcggggccgaacggttatctgctggatatggtgcgccgtgagctggtgcagtccaaggcctttaccaaagaggatttggataccggcggatacaagatcatcaccaccatcgacaagagcaagcaggaccttatgcagtccatcggcgacacccgtctggacgacatgcctgaatccctgcaaatcggcggcatagcgctggacccgaagaccggtgaagtattgtccgtatacgccggttcagattatctgtccaagcagctcaacaatgccgatcaggccgtattcgaaccgggttcgactatgaagccgttcgctttgctgggggccgcgcaatccggcgtcagcttcgatacgttgttcaacggcaattcccaccagcacttcaccggcttggatcaagaggtgaataacgctctggagaacaactggggcaacatcaatctgtatcaggccaccgccaactcggtgaacacggtgttcatgaacgtcaatgagcatctgacgccgaagcgcacggccgcaatcgcccatgaagcgggcattcagggcgatatcgatgaaaactccatgtacaacgtgctgggcatcaacgccctgaccgtgtgggatttggcgcaaggccattcgaccatcgccaacaatggtgtgaagagcaccttgcacatggtgtccaaagtgcttgattccaacaataaggacatgtacaatgcgcccagcaaaggcaccaaggtgttcgatgccaacgactgcgctttggtgcagaaggccatgcagggcaccaccacgtacggtacggcggccggcacatccaacatgctgggccgacccatcgccggcaagtccggtaccgccaacgacgaaatggcttcgtcgttcgtgggatacacccccagcatgatgaatgtgtgggctatctggaacccggacgataagggcaatccgcaggcggtgccggccttctccggatacggcatctcttccactggataccccgcccacctgttccaggagttcatggctcaggccttgcaaggtaccgaggtggagcagttcccgaccgctaaagacaatggcaagatcggtggacccgacggcacttggggcttgggcaagggacagagcagcggcctgtccaacaacaccaacaagcagtccaccgaagacgcgcagaagcaggctgagcaggacgcacagcagaaggcggccgaagaggaagccaagaagcaacagcaggcccaggagttcgcccagcagtgcctcgccaatccgagctattccaccgagtgtccgaattatcccggcaccactaccggcggagatggcaacaatggcaacaatggcaacaatcccggcaataccggcgggaacaacgggaacaataccggcaacgataatggtaattccggaggcaccggcgggaacaccggcaccaacggcgtcacccagtagtaagtaagcacagacaacaaagctccctctgatgcaatcagagggagctttgttttgttgttagcgctcagcgcttgcgctgggaacggttgatggcagagataatcgacttcagagcgctggtggtgatcgacgaatcgatgccgacgccccacacgatctgcgcatcatcggcctcgccgacctggcattccacgtacgaggcggccatggcgtcggtgccgacggacatggtgtgctccacgtaatccataatcgaggcgtcaacgccaaagttggaaatggcgttgaggaaggcggcgatcggaccgttgccgatgccggagacctcgcgctccacgggcgcatcgaccccgacgttcacgccgcggtcgagcaggcgagccttgagcacggtatcggagccatcctcaccggagctgacggccaccttgagcagcttcaagcggccccacggcgcgagcgaggcgtcatgagtatcgcccacaaccacaccggcggcggtcatgccggactgttcgatcggcaggtactcgtccttgaacagacgccagatatcctcgtccttgacttccttcttggtcgtgtcagcgtagtcctgcacgatcttgtcgaattcaatctgcagacgcttgggcaggtcaagattgtggttggtcttgagcaggtaggccatgccgcccttgccggactgcgagttgacgcgaatgatggcctcgtacgtgcggccgatgtccttcgggtcgatcggcaggtacggcacaagccacacgaagctgtcgagatcggcgccagcgcgctcggcggccacctgacgagcctcgagacccttcttgatggcatcctgatgcgagccggagaacgcggtgaacacgaagttgccggcgtacgggtgacgctcggagatcttgatctggttgcagtactcaaccgtcttgcggatctcgggcacgttggacaggtcaatctgcgggtcgatgccttgggtgagccagttgaggcccagcgtgaccaagtcgacgttgccggtacgctcgccgttgcccagcaggcagccttccacacggtcggcgccggccagcacggccagctcggtggcggccacgcccatgccttcgtcgttgtgcgggtggagggagagcactacggagtcacggtcgtcgaggtgggtggagacgtactccacttcgtcggcgaacacgttcggcgtggtcatttccacggtggcgggcaggttgatgatcatcgggtgctcgggagtcggcttgataacaccgatcacggcgttgcacacctcgacggcgtactccggctcggtgccggtgaaggattccggcgagtactcgtagtacaggtcgatgcccttggcctcgttctcgaggtccttgcacagttcggcggcgtcggtggcgagcttcttgatctcttccttgttcttgcggaacacgacctcgcgctgcagcacagacacggagttgtagaagtgcacgatggcgcgcttggcacccttgagcgcctcgtaagtacggcggatgaggtgctcgcggcactgggtgagcaccacgatggtcacgtcgtccggaatcagctcacgctcgatgagcatacggatgaagtcgaaatcggtttcggaagcggacgggaagcccacctcgatctccttgaatcccatggagacgagcaggttccagaaacgcagcttgcgctcggaatccatcgggttgacgagggcctgattgccgtcgcgaagatcgacggagcaccagcgcggcgcgcgctgcagtcgcttgcccggccacgtgcgctccgggtaatcaaacgggatctgcttgtcgtaggcggcgtacttgttatacggcatacgactcggcttctgcggatcgccgatgaatcgtgccggaggcagcagcgggtcgttgttccccccattggacgccgcagccactgccgcgagatcaaaaacggatgattgaccctgacccattgttcctcctttactggttattgcgcgggccctcttgcggacgcgactgcggcgttgtgccagggcggcgccgggccacgcggatttgtcaatacgcacgtaacatcctacaggccggttcgggcaaacccgcgggaaatgccgtatcgtggcatttgcttatgcacctggctgatatgagggcactcagcgtcgtcagcggaccacgctttgactccggcacaacaccccgcctgcgataccccaccagatggccctccatacgtcggcggcgggccaaatattggtactgcaccgacagccaaactgctcagcgtcgtcagcggaccaacttatggcgaaataccgactctgggaaagcttatcgtcggcaaattgccaggctatggcacactatcgacgctacgaggcccacaaccatcggcaacgcgacaaatattggcccaccgccgacgctagcctctttgagcgtcggcgccgggccattccatgaatcagtaacgacgccaatggtctcagaacgtcagcatagggacgctgtctggatctccaccgacgctgcatgacaaaatcgcggcaccatcaagcaacaacacggctgcggcaccccgccctgccccgtcccttgctgtgccagtcctgtgaacgcgcgggcgatccgccgcccggcaacatagactgaagagctatgacgagcttgcgattccgcgaagacggcagcttccgcgtgctgcaaatggccgacgtacaggacggccccgatgtgttgcccgacaccatccgcctcatccgcgaggccatccgcgaagccgatccggatcttgtggtgttcaccggcgaccagatccgcggctatgatcccgcctacatcgacacgttcctgcgccgccgcggcgaggagccgggcgctcgcgtgcgcgcggtcaccgagatcgaggccaaaatccgcgggatcaagcgtcaccccgtaattcgcaaagtatccgatcgcgtggccgatcgtctcaccgaagccggcaagcctgtaccagccgcgctgcttgaccccgataccgtgacgaacgccgtcgccgctgccggcgccgattcgaccgacgtgatcacgacttccgaagtaggcgattccgttgagaccagccccacgcccgagacggtttccaccctcgtatattcaacgcaatccggcaaggccagccccgcacacgagacgccggcgaccctcgacgaactcatgaatgagacccgcgaaaaggtccgccgcacgttctccggtttccttggtccggtcgtcgaggccggcgtgccctttgccgccacctacggcaaccacgacttccaatgcggcattctggccgacgaacaggatgacatctaccgcgaataccccggctgcctgaaccccgacgacagtctcgagcccggcacgttcgcgctgcccgtcgagtcctccgatggttccggccgcgtggccatgtccgttatgatggtcaattcaggcgattatgccggcaaacccgaagaaaacgatgcccaatacccggcgtatgtggtcaatccgcgaggactcgacctggccgacgccgacgggtacggcacccccacccccaaggccatcgaatggctggggtccgtccaaaccgagttgggcgagcgcaatggcgacggcaagcccgtgccggccatcgccttccagcacattccgccgcaggaattctacgattgtctgaaggaagtacccgcatggacgccgaacgccgtggaaggcgcgcgcacgcacgccgggcgttgctatgtgctcaaccatgaggtctgccgccccggctcgcggctcggcgaggcaatcggctgcgcggacgagaatgtgggcgaggtggatgccttgcgcgaggctggcggctatttcgcgctgttctgcgggcatgaccataagaactctttcgttggtcatgtgcatgatatcgatctgggctatgcacccacgtgcgggttcgaatgctatggccccaagtcgcggtaccgcggcattcgcctatttgaattccatgagagcaatccggcgggctatgtgacccgcatgctcacatggggtaatctggtcggccgctactccagcaacgagctgcgcgtctggttcgaggatcattgcgttaccggagcggtcagcgcacgcaacgagctgcgccgcccgcaggtgttcgccgtggtggccggcgcgatgagccttggctttatagccatcatccgttcgctgatcaaggccgcgcgctaaacctacttaaacaggctcaccccgcgacgggccgtgcaatacgcgttgcccagccaggtatggcgggaattgggccagacagctcccagtcgcggtgcgttctggctcatccagatgctcggcacgcggccgtctgcggagcgtgagccgagcagattgaagccgttcttttccagcagccactccgggtgctgggtggcgatggccaagccttcctcgagggtgagcggcaggcgttcatcggagtcgataagcttgcgggccacgtccggctcgcgattgatatagcacgtgccggtgtgcggattgacgaccagatagaacgggccttccggcggcatgaagccgtcttgaggcaggaagctggcgatgtcacgcggcggcatggtggtgaagccggccatgcgattgatggaggttcgtgcgatcagtgactcaggcgaaaccagttcgcgcgtgggcaccagcaggatgttcgatcccaaatcggaatgctcgagcgccccgatcaggggtcgggccagcgagcggaatgcggcggcggaaatatccgccacatccggatagccgagagccacgatacggtcgagctgtttttgggcctctactgatgcgatagacatggctaccagtgtagaacatcaccttcgcttcatcgggcagtcaccatctgggaagaccgctactgttgttccgcacgtttcatacaatgtcattgttttacggtcacccgtatgacggccgtccgaacgcaagtaacccatcgaaacctagaggtcatagaggtcatcatgtccgaaaaattgaaggtcggcatccttggtgccaccggtatggtcggtcagcgttttatcacgctgcttgagaatcacccgtggttcgaggtggtcacccttgccgcttccgcgcacagcgccggcaagacgtatgccgaggcggtcggagaccgttggaagatggaaaccccgatgcccgaatacgtcaagaacatggtggtcgtcgatggcgacgatgccgagtccgtggcctctggcgttgatttcatgttctctgcggtaaacatgccgaaggaccagattcgcgccattgaagagcgttatgccaagaccgagaccccggtggtctccaacaacagcgctcaccgttggaccccggacgtgccgatggtggtgccggagatcaacccggagcacttcgaggtgatcgagcaccagcgcaagcgcctgggcaccactcgtggtttcatcgccgtcaagccgaactgctcgattcaggcctacacaccggcactggccgcgtggaaggaatttgaaccgcgtgaggtggttgtgagcacctatcaggcgatttccggcgcaggcaagaccttcaaggattggcctgagatggtgggcaacatcatcccgttcatctctggtgaagaagcgaagtccgagaaggaaccgctcaaggtgttcggccatgtggacgccgaaaagggcgagatcgtgccgttcgacggcgacctcaagatcacttcgcaatgcatccgcgtgcccgtgctcaacggtcacaccgccaccgtgttcctgaacttcggcaagaaggccaccaaggaagagcttatcgaccgtctggtgaactacacgtccaaggcttccgagctggagctgccgcacgcgccgaagcacttcatccagtacctcaccgaggatgaccgcccgcaggtcaagctcgacgtggactacgagggtggcatgggcgtttccatcggccgtctgcgtgaggattccatcttcgattggaagttcgtgggtctggcccacaacaccctgcgtggtgcagccggcggcgccctcgaatgcgccgaaatgctcaaggctctaggctacatcactaagaagtagttgaatctcgttaaaatcgcaaaagccctccgcaaggagggctttcatcgtattaggcgcggaattcgcggctcagcggccagtaccgccgtacaccacggcttcgatctgatcggcatcgagaccgtatgcagtgtgcagcgccttgacggcgtcgttgagctgatcgagcggcacgagtgcggcgatacgaatctcggaagtggagatcatcagcacgttgatgccctcatcgctcagggcctggaagaacttggcagccagaccggcgtgggtcttcatgccaacacccaccacggctaccttgccgacgttggtgttcacatcaaaggagtggtaacccagcacttcctgcttgtcgagcagcgtgttctgcacctgcttgacggccgattcgggcacggtgaaggagatgtctgcagtgccaacggatgcgccggcctgcacgatcatgtccacgttcacgtcggcggtggccagctcggtgaacaccttggctgccatacccggctcgttcggcacgccacgcacggtggccagcgcctcggaacgatcgtgggcaatgccggaaatcaccggtgcctcggggcccaggtcagggaacaggtcgcccatggatttcgcttcttcttcagtcatgtcttgccttgtcttggttgaaattacttacgattattgttcgctgtagccgcgctcagtcgaggttcggcagcgtgcgcgggtcaatgccgtcaggcacaaccagcgtgccggggcgacgggagaacgaagagcgcacatgcagcggcatgttgaaacgctgagcgtactctacgcagcgcagtgccagcaccttggagccgcaggaggccatttccagaatggcttcgtagccgatggaaggaatacggcgggcggaaggcacgatgcgcggatcggcggtaaagatgccatccacgtcggtgtaaatctcgcagatgtcggcaccaagggccacagcgagtgccacggcggacgtgtccgaaccaccgcggccgagcgtggtggcgtcacccttggcgttgatgccctggaagccggcaacgatggcgatgtctcccaatgagagcgcgttcttcacgcggtccggtctcacggccttgatgtgggccgcgccgtaacgggtgtcggtgaagaagccggcctgctgaccggtgaaggagtgggcgcggctgccttcggcgtgaatggccatggccagcaggctcatggaaattcgctcgcctgcagtcatcagcatatccatctcgcgctcgggcgggttggagtcgatgctcagcgcctgatcgataaggtcatcggtggtatcgcccatggcggagaccaccacggccaccttattgcccttcttctccgtctccacaacgcgcttggccacacgtttgatcgaatcggtatcggcgaccgacgagccgccatacttctgcacgatgagagccactgctgtccttcgttcttctcttagggatttgtttggtcgatattctacgcaaacgcaacgattataagggctgtcgcgttcaccccgcgaccccgcgccggcatgcggacacgggtatggcctacgttgttcagcaaatattcaagttttcaccggtggttctttgagacagccgcatccatcctttgagattcgagcggttaactatcaattaccggcaaacgaaagcaaaccagcgaggtttccgcagaaccccataactgaataccttgtcatgggcgaaactttgggctacaaagtggaccgcatttcggtgattttgccggatgacacgtcgaagctcaagattgtgccgggtgaggaccatgtcaccttgatgacctgtacgccatacggcgtgaacacgcatcgactgcttatctccgggcaccgcgtggcaattccgatgccggcccccgagccgaatgacgtgcttgacgcgcgcaatatcgcccttggtgttggcctgggcatactggcggcaggactgttcattatctggttggcacgacggcacaaggccgcgcgcatcatccgccacggcgcattctggccgtggatgcgccgcaagggcgaaagcgccaatgatacgctggcctaggcctcacgccgaccggccagcgccctgcccagcgtgatttcgtcggcgtactccaagtcggagcccaccggcaggccgctggcaagtcgggtgaccttgacacctacgggtcgcaatagctgggtcaagtagctggtggtggcctcgccttcaatattcgggtcgagcgccataatgacttccttgacctcatcgccttctaagcgtttgagcagactgggaatacgcaggtcggcagggccaacgttggccattgggttgattgcgccgccgagcacatggtataggccgcggtattcgcgcgtgcgctcgatgctcatcacgtccttgggctcttcaaccacgcagatcaccgaacggtcgcgtctcgggtcggcgcataccgggcaggggctggattcgcacacgttgccgcaaatatcacagaagcggatcttggccttgacctcctcgatggcctcggccaaatcgcgcgcttcatcttcgggcgcggacagcatgtagaaggcgatacgctgcgcgcccttcggcccgatgccgggcagccgcccgaaagcgtcgatcagtcgctgtattgcgccgtcataagcaagtgccatgggtattcctcgttattcgtcctcattattcatccgagtgcttcttggcaggctggatgttcttggggttcttcggatcatctgccgcgaattgctcgacttttttgacctcgaatagctttttcagatcgtcaagattcatggccgtcgcctcgccgagcgactggtcgttcatcgagtattcgtcgtcctcggccgcgacttgcggttgcggctgcggctggctattccacgggtcggcattcggcgtcggctgtgcgggctgcggttgattccacgggtcatcgccggcagccggctgcggaaccgattggggctggttccacgggtcatcgcccgacatattgcccgacactgtctgaggaaccgaagaagccggagtctgggactgcggctgattccacgggtcgtctcctggctgcggagccgcctgagcatggttcccctgcggctgattccacggatcatcgtgaggagactgctgatatggctggttccacgggtcggcttcgaccggttgcagtgccagcgaggccgtagcctgagattgcggctgattccatggatcatcgcttgcgccggcaactgccgtagcgggagctgcggtggctggctgccccgtggactgtccagtgggtccagcggacgcaacggacgcagcgggtgcaacaggagcagccggagcggcccacggatcaacaccatcactgatgtccggaaccgcaacatgcttcttgtgatgctcttcgggcgcaggcgcagcagcgggctcgttaggtgcgaacccgtctgcagattgcggtgaagcgttgcttacggccggcttggcccaagggtcatcgtcactccagctcttcgccgccgtggatgcactggattggccggctcgatggctgtcgtccgtatcctcggcttggcctgttgcagtcggcttcggagctttcggctcgctccccatatgaatgcccagacccgcgcccaaactcgacgcggccaatccggccttggccatggcaatctgctgcttgaccttggccaattgctccgggctcatacgtttgacggattcgactcgctcgccattcgccgcgaccgcagaaggtgcaataaccgcattggcaccgaactcgttgcgcacggcatccaacaccacggacgccgccttcttaccgctgttgtccacggccaaggcgaaagcgtgctggctcagcgacttgtcgaacgtcatcgacaggcaaggcagactcttacggttgggaccgaattttacggtcggcaccttgtctcgtgacacatattcacgaatggtttccggcaaagcggcgacggctgcatcccacttctcgtcgatggaccgattatccgatgccgcaggcgaggtcaccggttgggccgggacggccggcgacgtggcgggagcaccccaggcattggcagcagcagttgctgcggcaggttgcgcagacggagagcccgcgggccggtcgctgactgggctgctgacagggccattgtctcccacagcggattcatgggaagcggtgctctgaggcgcggctgcttgctggttgcgtgcagcaccggagaatccaccatgtgaggctccggcaaacccgcctcgcgatgcgccggcaaaaccactggcacccgtaccggaagcggctgacgtagtcgaagtcgaagaagcagccgcaggcggcatgccagaagaagctggcgcgggagcggctgttgcaaagcctgattcactgccggccaacaatcgtgcggccagcagttccaagcgcatacgcggagaaatggctccggtcatggcacccaacgtagtgttgatgatgtctgccatggcggtcagtgcgcccagtcccagcgccttggcttggcggtgcagatcgtccatatcctcggcctcagccgtgtcggacagcacggattccgcacggtccccggccaacgtaagcaccagcagatcacgcacacgagccagcaggtcttcgacgaatcgtctcggatcgaatccgccgaccacgactttctggataacgccgtacagggcttcgccgttgtgattgattaccgcatccactgcctcaccgatcagcgcctccggcgtgaagccgagcagggctacagcggcatcatgggtgataacgccttcgaccgaaccaaccatcagctggtcaagcacagacagggtatctcgcatggagccgccaccggcgcgcatcgccagtttcagcacaccgggctcgggcttgatgccttccttgtcgcagatcgtctccaggtagggacccatgacttcctgcggcaccagacggaacggatagtggtgggtgcgcgaacggatggtgccgatcaccttgtctggttcggtggtggcgaagatgaacatcacatgttcaggcggctcttcaacgattttaagcagcgcattgaagccctgctgcgtgaccatatgggcctcatcgagaatgaaaatcttatagcggtcgcgcgcaggggcgaaaccagcgcgttctcgcaattctcgagcatcatccacaccgttgtgcgaggccgcatcgatttcgaccacgtcgatggaacccggaccgccggtggccaggtccttgcagctttcgcattcgccgcaggggtgggaagtcggccctttggcacagttgacgcaacgggccaggatacgcgcggagctggttttaccgcatcctcgcggccctgagaacagataggcatgcgtaagcttgccttcgtccaaggcgcgcatcagcgggaccgtgacttggtcctggccgatgaccccttcgaaggtgtccggacgatagcgacgatacagtgcaagtgccatagctactaacctacctttgccctcagaattaaccgataaaaagtcaagataaaccgggctcatagctgccgaatcgggaaaactctttatattccaacgacattcatctgacaacggttaccgcatttttattgttattaaccgctttctttgtattaacatagtgtcaataacggttgtagtcaggaggtacccatgagcgatatcctcgacaagaaacgccccacccgtggcgatgcccggcgcgacgccatcgtgcaagccgcgcgcaaggtgtgtctggaaaaaggcttctccaaaatcaccgtttccgacatcgcaagcgaagtcggtatgacgcgttcgctgttctaccactacttcgaagacaaggaagccgtagccgacgcagtactcgatgacgtcatcgacgaaatcctcaccacgttgaagcagtggaaccaagcgcgcgaaacaggcaacgtgaacaaggcattagacgacatcgtgcatgtgctccgttccctaatcgccgacgagagccccttctcaaaccgtatgatccaagatggcaacgccgaactgtatatcaagttcattgaccgcgcggcggaccgtattgccgactacattgcccagaccaccgtacgtgatttcgagcagatgcatggtctgccaatcaccaacgtccatgagacattcttcacgctaatcgtggggcttatctcgctggttcgctcgcatccgaacatcagcgaccgaaccatcaaagaggtcatggcgcagacgctgcatatcgaaagctatgtcgtctgaggtctgacggccattggctctggtaccgctctcccgcactcccctcagtccgcttcgcggccagctcgtccgcaattgcgaacagcctacggctgactctcttctggttcgactatcgtcgaaccctcgcctacaaacatcccgctgggctgtttgctttacggctcagcctaatgaggggagccaatataatcaggtcaggcgaactggccggttacggggtcgcgaccgtctcgggcgatggcgtcgagcacttcctgtcgggagtccacctcacgggcggctacggccggcggtaccagcacgcgtagcgcgcagtcctcggccactaccctgaatggcagatgcccgatgtattcgccgtccgccatcagcaccggtggctcgtcgccttctgcggctcgcgtgacttcgatctcgcgtatgcgcttccacccgaacacctttgaggcgagcagcttgccgttataggcgttcgagatggccaccgcacattcgccgaagttcggcacatgattcatccacaccaggtccaacagcccgtcggagaagcaggagtacggtgagacctcgataccgccaccgatatgacgcgaattcgcaatcgtcagcaacggcgtgatgatgtctcgttcatccgtggtaccgtccgccagcgtggccttgacgtggtacccataacgcttcatatgcgtcagctccaccagcaccgccgcaaagtagcgcatggtgccggtcggcagatgcgaatgattcgcacggtcgttgatacttgcgtcaagaccacaggacagcatgcccgcatagtaccggtcaatcgggtgctcggcagacttgttctcccggtactcgtattccccgccggtggatgggttcacggcatagccaccatccaaagaggtcacgcgtcccatgtccacatcaatgtgtgatccgcgcacgatagcgccgacgataccttccactgcggtttcgatgcgattgaccggcagcttaagtccccgagcgaaatcgttgcccgagcccatggccacgatgcccagcggcttaccgccgcaacccacggcattggcaccgagtgcgatcatgccgtcgccgccgaccaccaccagatagtcgtactcgtgcgcgcgttcacgcgcctggttcagggaatcgtcgaaacttacgccggtgatgtcgatgacgtcgaagttatgggcacggccggcgtcctccagcagtcccaatactcgcgcatccaccttggcaccacggcccttatcggaagtgggattgcccaccatggccaccacgcgacggcgttctgtgcgttcactctcgctcatgctctcaccttaaccaaaggtccagaagcccgccagagcatcagtgcttacggtccattattgtgataattgtctccttccgtacaattcaccggtccggcccgagccatccgctccacggatgatgccaccggaaccatggtttccaccttgatggttaccaacacgtcttcatcccgcacggagcaggagcccagcgtgacgccattcgcttcagccatgtttgcagcaagcgcgcatggatcaccgatatccacatgccacagcgcatacgcggcgtcaaaggcgatgagatcggcgagggaacgcgctcgattctggcagatcatgaggttgcccacacttgccgccaccgcgagcgcaatgcccaccgccataaccagcatggctccggccatcgtgcccgatccctcctcataacgcattccctgcaccgcagttcctttctattgcggccgcccagccagcagccgaccagttattggcttatcgccgtagcgttgccggtgacccgcgttggagtgacatccagtgggccgggcagtaccgaacattcgaccatcacgctcgtcgattggccgttgtgggcaatgctgacgcggggatctccccctgcaacgtccgcagctatgctgcgcgcggatgattcgtcaccggtaaccacaaactcgcgtgcagccgccgtcgcggcaccttggcagtccatggaaacgatgaccacacgtcccattgccagtatcagcccggcgatggcgataacgctgggcaatacgatcgcgaattcggcggtggccgatcccgtgcataggtctggcggcagtctggcgagcctccaccggcatctcatggtcttcatggctgtcacccgactttcagagcctgtttgatgatgttggtcagcaacgtcttgatggcatccgacttcaggatggcgaccagcaccgccgcaaagcctgtagccgcaacgagtacgactgcgtattccgcagtggctgcgccttcttcgggctcagccatgagggcgcggatgcgtgcgtccatgaggcatagccgttctttcgccttggcgttcagcgtggccacacgagccttgctgtgcgcaaagatgccggcctgcccgtcgacgatgacggggataggggtattcattggcgttcctttcggtaaggaggggaagctgcgcagtggcttcgcaccttccccatgcgtatgtgagtggttggcccccgcgccgggttgacgcggggtgcataccactgtggactatcaacgcttcatgcaccaggaaaaacggggtatgtggttctagcttgccgagttatccacacctcgacgtgtcgtccaccacaaatgtggataaccaaacgcagccaagtacaataccgagcaatacaacaagattcagcctaagcgcactcagttcacgcctatattcacatcatgaaggacgcaatcgccggaatgactcctaccagcacgaatgccggcagaaaacatagccctgtaggcatcagtagctttaccgacagcttcgcggcattccgttcgatagcagcacgctcgtcacggtccagctgttcaatggcggattcgaggcgcacaccaggcatatcgccatgcgtccatgacgattccaaagccgattgcagcaggccaagatctcgttgcgtggtattcgtatttcccttggatggactatcagctggcgcaccctcatgctgaacagccatagcggcatgccacgcatcagcccagggaacccctctggtcagggagttcccgacctcgctcatgcgagcgccgcagtcgccgccgacggctttgcccaccatgtcaagcgcccggggaatcgaggagccctgacgcaaggacacctgcaacatacgcaatatgagtatggtccatgacgacccgcaatcatgcgctacggccggctcctcgcccggcaagcggctgtcatgacgagacagagccttatacagccaaccagcaatcgccgcacagcctgccgcggcgtgtacccacaccgtactcataatccgctgcctttcaacaatgcccgcatccatgccaagccggcagcataacaacatcctcccaatgtcaagcagaccacaccgcgtggcgatccaagcaagaacgccaatggtctagctcccagaagctcgcccaatgccacagtgacggccggaagcgcgctcagcagccccacagtggctttaggaacggcacatgcttgcgatcgcaagttctgcatcagcctcatctgccggtaagcagtcaataccgcttccagacatggcaccgcttggcaaccgagctcatcgctcaaaaccgctgcggcggcgaccccgcgtgcagcttcaagtacctgcgctggtgattcgtcgggcagacgccgctgttcgaacaccgttatgagccgttccacagtaatgcgatgagtggcgaagcgtctgctggattgttcctcgaatgcttcaaccaatgtgccgccacctcgcaatcgcgcgatggcggacgtaatcacctgcgcaacgcccacgcgaggtgagtcggcatatcgaggttcgtttatggctgcggaatcgatcgcgcgcccgcggtaagccagccggtacagcctcccggacttgttccccggccatatcagcacggcgagcgccaccagaacagcacaccacatcatcacccaccaccactcggcctgggaacgatgccccatcgttcaatgaagtgcccccattcggcggcataccgaggaggatggcagccattccataccgccagcggtgttcctgccagttcaccatgtgctacgcgcagttcgccgatctgcgtgatacgccgctgtccgttcactcgctccaaatgcaccaccgcgtcgaaagcgcctgccgccagcatggtcaacgcctgtggactgactccggcgagtaatccaagcgaaatcagcctggacggtactcggttcacgccgtccgcatgcacggtggtcatgccaccgtgatgaccagaattgaacgcgcgcaataggtcgacgatttccgcgccacggcattcgcccagcaccacgcggtcggggcgcattcgcaacgtcgctttgaccaagtccgccaggcttatggctccgacgccctccacattcgcctcgcgtgttaccaacgagacatgatcgtcgcgtcccagttcccccagttcgcgaacttcctctacggtgacgatgcgctcgttcacgtcgcattgcgccagcagcgccttgagcaaggtggtcttgcccacgcctgttccgccggtaatcagcactgtggcatgtttgcgcaccaatcccacgaacgtcggcagccaagcagccgggaatacgcctaatttgctcaggtgctgtagcgatgccatggttcggtcagggaatcgtatggaaatcgcggcaccttgtggcaccaatggggcaatcaccgcatgcacgcggatgccatccggactggcggcatccgctatcgggcaggcatcatccagtctgcgcccgagctgcgcgcacagttggacggcgtattctcgaactacttgcggcgagcggaacggcacatgcaatactgtttcgcgcatgccattgccgcggtccgcccaaacgcggccatcacaggtcaccgccaaatcggtaacctgcgggtcagatgccacgtcatccagcagaccgaagaatatggttctgagcgctgtgccagcctcattggctcgcgtgctgacggcagccatagcatcactggtccttgtgagaagctcccgaaaccgggcgaatggcctgttctacgagatcggcaagcaaattcatggctttgcgactgcctttggtcaccgatctgatgccgaggccttccagtacgtctccacacagattgacacttggcttgatgggccccaataccgtggcagtcaaatagtcctgcgcctcgccaatacccacgtggcctctcccacgtggagcgccacgtggttccacacctacgatatgtggcgcttcacagccccatgaatccaatctggaccggtgcga

SEQ ID NO: 3112 - DNA, 15922 bp, Unknown
  R215_18m  MAG No. k141_17600
acaccaacacgaacttctccgacaggctcagccgctcgtcctgcaactgccacgcccactgctccgccggcccgctcatcgcgcatcctcctcgcgacccctggcatcatggagccgttcgccgatgcggtcgcccaacgcggccgcgcggcacaacgcccacaccgccagcagacacacgacgattgcgacgacggccgccgccgccacagcccggcccatctcaggcgctccggcggcgacggcgcgacgagcgcgcgggatgcagcagcaccgccagcaggtgcgcgcgggcgatccgcacgcgcagcgacgggatggttttcatggctcccgccgcacgcggggcggaagcgatggtaggattggtcattgcgataactctctttcaatggagggcgaatcccgggactcttgtcacttgaatcgctcggaatcccgcccaaggttgtcgatcagccccgcaccaagcgccaacacggtgcggagcgctttcgttttccatgtttttcccggcccagttcgaccagaccgaactggggaggcggtcgtattgcgcaaccaagcgcaccgcccatagcatggtgcgcacaagctccaagggcacgcagacgaaaggaacggacatgaccggcaacaccacggcaagaacacaggccatcgagctggcagaacgcctgcgggaagtcgccgcatggaacgtgcgactgcacctggccaaggaaggactcgaacagcagaccctgtgcgaggcggccggcgtgaccaaggccaccatatcggccagaatgaacctcgacgccgcatgggacctcaatgccatcgcagccgcagccgtcaccctcggcatgccaccggccgaactgctcgacgacacgctgtacgacatcgtcaacaacgacgacacgaaaacaggtgccgacaaaggtgcatcgttggtggcagccctgacctcgacgctcctggcacgccacatcgccggcaggtgcaacccgttgaaaacaaaaggctcctgccgaatcacaatgatggcgacaggagcggaagcgtacccccagagagagtcgaactctcgttgtcagattgaaagtctggtgtcctaaccgttagacgatgggggcgaacaactcgagttactttacgggaggttgttcggttatgcaaatcgacggcatttcggcgtgtcgcaatcagtgcagggcgacggcctgataggtgaagtcgtgaatcacgcggccggcggccaggcccttcttttcgaagttggtgagcacgcggccctcgaaccgctcggattcggtgaagtcggcgtgcggcatgtcggcggccatgtcggcattgcccttgcccacgtgctccagcgggaggctgacggttatgctgcccaggttcttccagccatcgaggccgtccatcacctcgtgcacgtgcagggcgtagtcctcgatgtcggtggcgatgcgccagacgccgtctgtgaccagcgcgcgatgaatgtcgccggccatggcctcctgcacgatgcggcgcttgtggtgcttcttcttgggccatggatcggggaagaaggtccatacctcggccacggtgccgggcgcggtcaccttgaacagctcgggcgcattgacctgggccacacgaatgttggtcagcccctgcttgccggcgagcagcagcgtgtgggccacaccggggtcatagacctccaaggctaggaagttcgtctccggatgggccgcggctgcggccgccacgttttctccctgcccggtgccgatttccacaatgagcggattgtcgttgccccatgaggactccacgaacgcgcggtcgagcgtgacgccttcgcgcacgtccagcaggttgccggccgcaatatccaacagatatgtgtcggcatagttgtcccaggcgcgctgcaggcgatcgtccaaacgtccggagcggcgcacgaaggaaagcaccttgtgcagggggtgcgccggtgcctcggtgtggtccgcggccatcgcggtgacggaatcgattgctgtggattcgggatcggtcatatattcctcggattttccttgtgcgccgcaccgctgttcattcattaggtcgatttggcgttcattaggtgggtggtgtgcgataccaaccaccatatcaagccatttacccggtgttcgtgcgggccggctccgggccgacctacctaatgaacgccagatcgacctaatgaatgcagatattgcggacgacaccaccgttttgtgcgattatgttcgtgtgatatactcaaattgtttcaaaaggtaacaaagcggaccaaaagtgaacagccgctgaactccacacggccgacacttgcaacccgcataaggaaaggtcaactatgacagttctcgtcaccggaggctgcggctacatcggcgcgcatgtcgttcacgcacttcatcaggccggcgaaaaggtcgtcgtcgtcgacgatctgagctacggcaagcccacccgcatcgaaggctcccgtctgtacggcatggatatcgccgctccgggtgccgacgagcgtctggctgaaatcctcgatgccgaaggcgtcgactccgtgatccacttcgctgcccgcaagcaggtcggcgaatccgtggagaagccgctgtggtactaccagcagaacatcaacggcatgctcaacgtgctcaccggcatgacccagtccaagaacgccaagaagctcgtcttctcctcttccgccgccacctacggtgtgccgccggtcgatgtggtgcccgaggacgtcgtcccgatgctgccgatcaacccctacggccagactaagctgttcggcgagtggatggctcgcgcctgcgagcagccgttcggcatccgcttctgcgcgctgcgctacttcaacgtggccggctgcggcccggtcgaactcgaagacccggctattctgaacctcatcccgatgctgttcaaccgcctcaagcagggcaaggcccccgccatcttcggcgacgactacccgaccccggacggcacctgcgtgcgcgactacatccacgtctccgacttggccgacgcccacatcgccgccctcaagtacctcgaccgtgacgagcgcaagtacgacgccttcaatgtcggcaccggtgaaggcacctccgtgcgccagatcgtcgacgaagtcaagaaggtcaccggtctgccgttcaccgaggctgtcatggcccgccgcgccggcgacccgccgcacctgatcggctccccgaagcgcatcaacgaggagatgggctggcacgccaagtacgacgtggaagacatcgtcaagtccgcgtgggatgcctggcaggccaaccccgaacaccacatcgacgtcgacacctggaagcaggctgactgagattgacgattgctttgcggtggatgccgtgaagtgcttctgttcataagggcgtgaccggggttccggtcgcgcccttcgtcgtttgtggatgtttatggcagacgtgtccgtgtgctggtgatagcaaaaaccttgaaattacgcggaacacgccgaaatttgcacgaccggcgaatttcagtaatatatacatctgttgcctcacgcaagtgagaacaatggccccgtagctcagttggttagagcgccgccctgtcacggcggaggtcaccggttcaagtccggccggggtcgctggaatggttatgaaacccggattatccgggtttttgactgttcatggctctgtagctcagttggtagagcgagcgactgaaaatcgctaggtcaacggatcgacgccgttcggagccaccacaatgaagccccgccttgtgcggggcttttgcatatccgtcacgtacctactccggcgggctggccggtcaatgcgaaggatcgcgttcgccaacaactgtcttcctcaccgcaactacgcacgccaacagcaccaatgcgaacatcgggttagggttaagtaaagaaacgtgggtcttatccgcgcgtgtcatggtcggtgcgatcgtccgcctcagccgtttctggggctgtggcgctcatagagtcagtattgcagaaaaagcacccgcgagatgcgcgcgcaaagagaatcgtgtgggacggcacgtgattttgccgatttttgacgtgccgtcccacagcgttcgaagaacgccctcagagctgagggcaaagaacggctctattctgcggttctcggcttatgtcatgcgggatagcagatgcgtcaaccgattgacgtatctgctatcccacacttttgtgggacggcagatgaacaatggtaaaaaccgcgtgccgtcccacaaaaaggaatcaggcccgccaccattggcgcagggggtaccacttgccgtccgggtggcccacgcgatccggcttgacggccaggaactggtggatctggatgccgtcgagctcgaagttcagagcgcaggcggccatgtacataccccataccttggcgcgttcaaaaccgacctgcttgaccgcgtcgtcccaatgctcggagaggttctggttccagtgatgcagggtgagcgcatagtgctggcgcaggttctcctgatgcaccacgttgaagccggcgtcatggatgcacgattcgatgaagccgggcgcgccgaggttgccgtccgggaagatgtaacggtcgaggaattcgtcggtgccgggcttgccgtgaggcttgtcatggctgatggtgatctggtggttcagcagtcggcccatcggcttcaggagacggaacatctcttcgaagtagctctggtagttcttgacgcctacgtgctccatcatgccgatcgagcagataccgtcgaagtcatgctcgggcacctcgcggtagtcctgtacgcgcacttcggccagatcctgcagcccctcacgggcgatccattcgttggcgtacgcggcctgttccttggagagggtgacgccgagcgccttgatgccgcgacgggcggcggtgatgaccatcgaaccccagccacagccgatgtccagtaagcgctggccgggttgcaagtccagtttgtcgagaatcaggcgcagtttgttggcctgtgcgtcttcaagactcatgtgctcgttgtcgaataccgcgcaggtgtacgtcatggaggggccgaggaagtcggcgtagaactcgttggacatgtcgtagtggaagctgacggtttccgaatcggccttttcggtgtgcggcatcaggccacgcttgatgcgggcgaacttgcttgggccctcggtggcgggcaccggcggcttcttgaagccgtgactcagaatgccggcggatacgcgggcaatggatgcgggagcgagcgggcgaacgtatttggccagcgacaccagcttgcgcatcgccggatacgggtcggcgtagtcaatgtcgtccacgtcgaaatcgcccagaatgtatgcgcgcacgatgccgatttcattcgggtgcgcgagcagctggtacatgcagttcggcgtggcgattttgaccttcaaatccgcgtctgccgggccgaaatgcgagccgtcaaaagcgtcgatacgaacgggagtgtcggggtcgagaaacagggacgccatctcgccgaccgtcatagccttgccatttgccattatctgcctcattctcttatgatgatcaccccaattgtcgaggtatcttagtcctcttcaagagactgaaaccgttgaatacaccatctggtgaaccagttcgcgttcggctgatgaaacacgaatggaattaggcatctcgcatattgattgtgtacgcgcgaagtaagcggatgagagacgagtttctcggagagcaccaagcgactccggaaaatggtcttatcgttgagatctcgggcgattgaactggtttggtcaatggacaataattcgacaagtgcggaattccgccatttcttgccattattttcagtgttgttctttcagcgtgttttcaggtgaatgctcatgcgcggagtagactggggaaccgttggaccactcaaagagtgagtggaccaccagttaagacactagctcaaaaggagagtccctatggtataccgcatgattttcaaccagactgcatacttcggacgtggcgcgatcaaggaaattccggccgtcgccaagcagcacggcttcaccaaggcatttatcgtcactgatccggtactgctggagaccggcaccgccgagaaggtcaccaaggttctggatgaggccggcctgccctacgaagtgttctccaacgtcaagccgaacccgccggtagagtgcattaaggacggcgtcgccaagttcgccgagtccggtgcggacttcctgattggcctgggcggcggctccccgcaagacacctgcaagggcatcggcatcatcaccgccaacccggagttcgccgacgtgctgtccctggaaggcgtcgcggataccaagaacccgtccgtcccgatcttcggcgtgccgaccaccgccggtaccgcttccgagacgaccatcaactacgtggtcaccgataccgccaacaagcgtaagttcgtggctgtcgacccgcacgatatcccgatcgtcgccttcgtggacccggatctgaccgactccatgccgcgcggcctgaaggttgccaccggacttgacgccctgacccacgccatcgagggttacattaccccgggtgcctggagcctgtccgactgcctgtccatgcagactattcgcatgattgccaagaacctagccaagtccgccgacggcgacattccggctggcgagcagatggcgtacgcctcctacatcaccggtatggcctactccaacgtgggcctcggcctggtgcacggcatggctcacccgctgggcggccgtctgggcgtggcccacggtgtggccaacggtattctgctggccccggtcatggaatacaacaaggactacacgggcgagaagtaccgcgacatcgccgacgcgttcggcgtcgaggacgcctacaccggcgacctggagaaggtgcgcgaagaggctgtgcaggccgtccacaagctgaccgtggatctgaagaacccgaccacgatttccgaagtgggcgccaccgagggcgaccttgagccgctggctcacgacgccttcaacgacgtgtgcacccccggcaacccgcgtcaggccaccgaagaggacattctcgcgatttacaagtcgctgatgtgatcagtcgatgacggtaaacattagctccctctgatgagggagctgtcagcgtagctgactgggagagaagttgcggcgtagccgctgaataataggtatcggcctgcggccgattcaatgttttaacggctgcgtcgcagtctctccctcagtctcacttcgttcgacagctccctcatcagagggagcttgcataagcagagggggctcgtatatccagctacttttcgtgcttttcgtcgtagacttcgtcggtgggggtctcgtcgtacagctgcttgccttgcgcctccgccagtttcatctgctcgttgatccacgcggcttcagcaggattgatatccgcggaattcagcactttctgccacaccgggtagaacatatgcatcgccggatacatggcggtgaacaacacctccggcttatgcgtgcgcgtatgttgcggatgcgcatcaaacgtattcttaaaacgtcgcatgtagttcaggaatgaactcagcgacgtgtccatccgtcgcgcgctcatcgcggcgatcatgcgcggcgagtacacggttttcagattcttgcccatcagatgcagggaaatatcgatatcctcgtgcatcacatcggccttatctcggcagacctcattcgcgatctgatgccaggccgaagcgcgcaaggccatattcgagccgaacagcagcggctggccgccatcggcacggtagattcgcttgcgtaaggaattgtcgcctttcaacccgaaatgacgtgagggcatgtcgtaatacatcaccggaccagtggcacccatcgcggccgggtcttcggtgaagatgccggagaccacctccacccagtcaggccggatcatacagtcggcgtcaaaacggcccagcacatcgccggtcgcggcgttcaggccaaagttgcgggtgggaatcagcccctgttcatcgttctggtgcaacagtttgaccggggtctcgggatgttcggcgatgaactgttcgacaatcgcgcaggtgttgtccgtagaacgattgtccaccaccagcacctcatgcggcatgatggtctggcgagtggcgttcagcagacagtcgcggatgcgttcggcttcgttccaggctgggatgatgatcgaaacgttgagcataacatcaacaatagaaaagcgggtgtacgccgccggcgtatccgagcttcaaacccctcgctacaatggggagccatgagcgaacgcgcgcgaaacataaacagcaccgacacgtcgagaagcggtgccgcagaagccggggcagacccggacgacgagaatcgtatcgactttggtactttgttccccgccaagggagattcccgcaggccaccggaatggttcggccgcgcgctgctgtatgtggccctcgccgtcatcgtattcatgttctgctggcgctcgtggggcgacatctcctatctggtgttcgacatcatcatctcgctgttcctggcgctggccgtcgaaccgctggtggtggcgctggtggctcatggctggaagcgtggcgtggcttccgccgtcagtctggtgggcgtggccgtggtcgtgggtgtgctgctcacgctgttcggcaatatgtttgtacagcagatgattgccatggtccgcggtttgccggcaatgtatgggcagattcgtgagttcgtggaccagcacgccacgttcaagatgccggaaatcagcaatcttggcatggaaatcttcaacaatatccagacctcgtgggtcaccgatttcgccggcaccgccatgagtacggtgggtggcctgttctccttcctgctgaacctcatgaccgtggtaatgaccacgtattacatctccgccgccggcccaaagctgcgccgctccttctgccagtggctggcccccaacacgcagcgtcgattcctgctggtgtggaccgtggcccaaggccagatttcgtccttcctgttctcccgttcgattctggcgctgatcaacgccacctgcaccgccatcttcttggagatcctgcatgtgccctactggctgccgttggccctgttctgcggcgtggtatcccagttcatccccacggtcggcacctatatcggcggtgcgctgccggtgctgttcgcttggggcaaccgcgggtggacgtacgccgtggcggtgctggtgttcatcatcgtctaccagcagattgagaacctgattctctcgccgaggatttcgcagcgcacgatggacatcaacgcggccgtcgccttcctctcggtgctggcgttcggctcgctgttcggcgcattcggcgcgttcctggcgctgccggtcaccgcatcgctgcaggccatcttccgtgcgtacaccaagcgctatgagctgattgactcaccgctgatgaacgatccgactccggagaagaagtccaagatcgtcgaggcgtccgaggcgttcggcgagcacgtattgcagccaatcggcgagcacatgccgcgtgcggccaggggatccaccaaccgcgtgccgatgaatgaggaactgcgtttgctgcaggaacagatttatgcgattccgtcgcacgagacgaaagaatccgatttggacgattccgccaccgtggcgattccgaagaacgtgctatcctccagcgctcgcaagggattacgcggcactgagccggagtcggatgccgatgataccgataacgccgataatacagtcggtgcggatgcaagctttgatgagccggatacggcggcgattccgcagcgtggtgccgcggatacgcagcagtctgagcagcccgagcagcctgagcggtccgccgaacagcctgagcagcccgagcaacgcaagcaaaccaagcagtctgatcaatctgcctccagcaatcctagggcagggtggcgctgatgactctgctttccgtactcgatattcttctgatgatcgtcggcggtgccggcatgatatatcagggactgtgcatcgtgatgtccctgttcgccaagcccgtgcgcttccccgacgccccgatgaccaaccggtatgccgtgctgatctccgcacgcaacgaagaaaaagtgatcggcaaccttattgggtcgattcgcgatcagacctacccgtccaacctcatcgacatctggctggtggccgacaactgcaccgacaacaccgccgacgtggtgcggtctttgggctgccatgtggtggaacgccacaatcttgagctggttggcaagggatatgcgctgacgtatctgttggggcatatgctcgacatcggtgtggccgatgattatgaggcctacttcgtgttcgatgccgataacaagctggacaagcactacttcgaggaaatgaacaaggcgttctgctccggattcaagattctgaccagctaccgtaattcggtgaatctggcggataactgggtgtcttctggttctgcgctgtggttcatccgtgaatcgcgattcctgtctaactcgcgtatgattctcggttcctcttgccatgtgggcggtacgggattcatgttctcccgcgaggtgatgaagcggaacaagggatggaagttccatctgctcactgaagatcttgaattcactatggattcgattctgcatggcgaccgcatcggctattgcggtactgcgatcctctacgacgagcagccggttgccttctcgcaaagttggcgtcagcgtttgcgttggagcaagggattcctgcaggtattccgttattatggctcggcattgctgaaacgcgcggttcgcgaacgtgatttctcctgcatcgacttcacattgatgctgtgtccgtttaccgtgttgggcgcgattcgcgcggtaatgggcttgctgttcgccgcgtgtggcttcgtgagttggccgagccagctgcaatcgctggccagttggtccagtggcatcatcatatcggtgttgggcctgatggcattggctgcattgaccatcattgtcgagcgcgaccagatcggtgccacgaacaaggagctgctcgcctatgtgctcagcttcccgatttacattctcagctacgtgccgatctccttccaggccctcttctccaaagcccagtggaagcccatcgcgcataagggttgaccgagtccgctagtccggagccgctcagcggggcaatccaacagcaacccgggggtttgcttcgctgagggttggctggtggggtagagtggatgtatgagcttagacaatactcaaaggaatgtcggatttcagccgccgatgatgccagctgccgcccccgtgcctgcacagccgtcgcaaccgcagccacaagcatggccgccgaatccgaatgcggcggtgtccattcgtggcctgttcaagcacttcgaccggaagatcgccgtcaacggactcgcgctcgatattccggtcggctcgttctatggacttgtaggccccaacggtgccggcaaaaccaccacgctcaatatggtgaccggtctattggtaccggacgccggcaccgccatgattttgggccatgacgtgtggagcgacgtgaacacggccaagcgcatgatcggcgtcatgccccagcccgaccagatcttagaccgactgaccggtttgcaattgctcgtctactccggcatgctgcgcggcatgagccgcgatgagaccacgcgtcgcgcccaggacctgctcaatgctttcgacttggccggggccgccaacacgatggtcaccgattattcggccggcatgaccaagaagatctgcctggcctccgcgatgattcatagcccgcgcattctggtcctggacgagccgtttgaatccgtggacccggtgtccagcgccaacctcaaagacatcctcatcgaatacgcgaagaccggcggcacggtgattatctcttcgcacgtgatggcattggtcgaaaagatgtgcacgcatgtggccgtaatcaacaacggtctggtgtgcgcggccggcacggtggacgaggtcgccgccggcgaagaactcgaagaccgcttcctgcaactggtcggcggccgccacgaagccgcccatctcgcatggctcgacggcgggcaagcccaagcccaagcaccaacttcggtccagccggtccagcccattccgcttacaaccgccacgcccgccacacccaccgatgaggcccgccgatgatcagcagcgccatcaccctggtccgcctgcgctggacgctcacgctcgccaccctgcgaaaatcggcgtggcagaccgtcgcctatgtcttttccgccgtactcgcggccggcaccatcatcggcaccggcgtgctcgcatggttcatcggcatactgccgcccttcaccgtgaacgcggatggctttccgctgaacatccttggttccggaggcatcgtcaacatagtcgtcgtgctggtcggcgcgaccatgaccatcttcatcggcttcatccagctcatgatgcttggcgaaggctccaccatgaacccacgcaaattcgcgctctacggcatcgccgaccgcaacctgcaattcggcttgctgctttccggcctgtccggcatccccgcccttaccggcgtggcctcactgatgctctggacactggcctatcggcatatgggaccagccgtaatcatcagttccctcctcgccgcagtgctggccgtcatcaccatgatgagcatctccaaactgctcatcgccctatccaccacgctggtgaccagcaaacgcggcaaaggcgcgttctatatcttcatcgtgctgacgttcgttatcatctgtcagttgccgaacattctggtcaactccggcgtggccttcagcctcaacaccgaaacctggggcgcggcgaccaccatcgtcgcatggacgccgttcggcgcggccttccaactaccgttcgacgcgcttaccggagcctgggcggtgctgctcgcccgcatcgccatccttgccgtcacatggattgtctgcttcgccgtctgcacctggtgtctgagacatgaacggctcaccatcggcgcaaacagtccgtccgagaccgccaaaggcatcggcgcattcgcatggatgcccgattcggcatccggcgcggtttccgcacgcctgatcacctatctcaaacgagacccccgtcaagccatgaccttcgccatgccggtcctgttcctgatcatcttcgccttccaggcacacggcatcagcgcggtcgtctggcagtcgctgatctggtgcggctggttcatgtccgtcgtggaaagcaacgggctcgcatatgacggccgcggcttcaccatggaagtcatcgccggcgtgcgtggccggaccgacagaatcggccgcgtacgcgtctacgtcggcatcatggtcgtctacatggtgctgctctatctcgccggcatcgtgctggtcggcgcactgaccggacgctgggcgcagcccgatgacctcgctaccggcctgatcttcctcgccacgggcatgggcatcgccttgagcggactgggcgtggccgaagtcacctcctgtgtactgatgtacccggtcgcctcaatggacaagccgttctccgcgcctcaaggccgcgccatggcccaaggcttcttcccgttcgtctacatgcttggcagcctgctgctcatgctgcccactggcatcgtggcgctggtcatgctgctgacaggagccgaaggcggcatgtggctggcgattattccggtcgcgctggccaatggcatcggcattctggcactcgggacatggctgggcggtaagctgatggatgcgcgaatgctctcgattgtggcaacactcgactcgttcgcctcattgcagaaatgattgccttggcataaggagcacgatggtatctacagcggtatcacgccgtcagcgacgtgaagcgcaacggcggacccaacgatcgcatcgccgaacactgaccgtcatcatttccgcactgaccaccatcgccctgttcgcggggtactgcgccgccgacatcaccgacgtggcccccggattgttgacgttaaaacctgtcaccgcacctgttttcgccaatccggccaccgccaaatcaggcggcaccatcgccggtgccctgaacgcgaacaaggccattgattccacggccgcttctgcactggtcaacgaattgctgtccgcgcaaggcgtgggaaacgatacgtcggtgatcattgaagacgcccaaggcaccgtcgctgccgaacatgagtcgaacactccacgcgagcctgcatccacactgaaaacgctgaccgcgctcgccgcctcatccaccctgaacatggcatccaccttggatacccaagtgttcctgacccaatccgatgacggcaccaatacgttgaccctcaaaggcaatggcgacatgctgctgtctgcaggcaattccgacgcaaaccataccaacggacgtgccggtctgaacaccttggccaaggccaccgtggccgcgctcgcccagcgaggcatcacttccgtcaatctcgagtacgacgacaccctattcggcgactcacgcattcccgcaggtctgtcggaaggcggcgcggtcttaagcgactacaccgtctacttcacgccggtctcatcaatggcgattgatggaggccgccaacacaccgccgatacgcctgcgccggccgaccccgatgattcggccggctacccggaactgtcccagcacaccgccagcgacgtggccacgaaattcgccgaactactccaatcgaacggtgtggccgttaccggagacgtgacggcaaacaccgctccatccggcgaaacgcctttggcttcggtgagttcggcaacactgtccgaaatcatggcatacacgttacggcattcggacaatacgctggccgaggagttcggcagactcaccgctttggcgaaatcagcgacaaacagtcctgacggcggcacggaggcggtcaaatccactctgaacgatctcggtctcgatacatccggtctgaccatggccgattgctccggcctgtctcccggctcccggctcaccgtacgcacgctggcggccgtccaacaacgtaatctgaccaccaagagcggcgcggccggcgcggaagggctatccatcgcgggattggtgggcacggcgcaggatcggtatacggatgatgccgtggctggtctgctgcgcgtcaaaaccggcagcctcggcacggttacgtcgatggccggcaatgtgtcccgtaccaatgggggagcgttgtcgtttgccgtggtggtcaacaatcctgaggattatgccgccgcgcgtagcgccatcgactcgttcatcaccaagctcgcggggctgtaaaagacccatcaagggccatcaaaggctacaaaggccgtaaacgtccataaacgcacgagtgcctataaccagaaaagggtggtgagtacatggcatattccgcacgattgcgcaaggccgtaggcgcggtccgaacaacgctgagcgccgtggaactatgcgatgtgcaggctcccgaattcgcgcagcatggggaccatgccgttgcctccgatgcaccactcgtgctcgtggcctgttcaggcgggcgcgattcgatggcgctggccgcggtaagccatatcgtatgcacgtccatgggcgtgcgttgcggtg

SEQ ID NO: 3113 - DNA, 56162 bp, Unknown
  R215_18m  MAG No. k141_20082
caccatgctaaacaagctcaagccaatgtccgggaattcaccggcggccatcttggcgctcttctgctggccccacgcgttgtcggagacttcctgccacttgatggtgcagtcgcaggcggcttccagatccttggtgtactgggtgtcctgcatcggatggtcggtcacgttgcgacgaaccagaatgttgacaatcggcttgccattctcatctgtggtggcctgcttgttgccgcaggcggcaagcgccgtggccatagtcgcaaccgcagcgattgatgccaacaggcgaacactccttcgtgccatgattaggctccttcttccttgatgtttcctcctcgtaccgatgtaagacgcacctgtacgagcccgtcagccacttgctttgtgactgtttctttgcggtggtcaacactataaatcgttaatcgtttaatgtcaaacgttaatcgtttatctcaatagttaacactctcattgaccagtccacccagcgccgcaaacgtaaacttcggctccatactgccgttctcgcagaacaccggaatcacccacatcgcgacacgccgttactcgtataacgtatctttttccatcaaatacacgtacaacccgtccgttgtacgcacaaaagcgtagccgaacatgacggccaccaagtcggccgctacttacaaaaggtgctcccctccttcaggaggaagaagaagcgcacggatacgatcagacagcaccaaaccaaacagtagccgcacctgggagccaggatgaagcattcggcatcgtgcctgctggccatcgtcgtgggatacgctgtgcaccatctggcccacaagtaaatcatgcaaaaacgcgcgttggcgcccgtcctttttaatggacgtgcgccaaagcgcgtttttgcatcagcttccgcgagcaggcctcgcggcgcgcggaagccgcagcgaacgccggcaaggcgcgaggtgcgttgaaaccttccttttcgaagcggtcagcaatcttctgtgcaatctcgtggccctggcccttgtccaccaacgcgatgatggagccgccgaagccgccgccggtcatacgcgcaccgtaggcgccgttcttgcgggccacgtccacggcgatgtccagctcggggacggtgacctcgtagtcggcggccagcgaatcgtgggaagcgttgaacagacggcccgcagccttgatgtcgccctgagcgaaggcacgcacgaaggaacgcacgcgctcgatttcggtgacgacgtggcgcacgcgcttcttcatggtctcgtcaggcagggcgtcaagcgtttccttgagggcctggaactggtcatcggccttggagatgccgtcggcggtaacgcgcaggttggccacaccgagaatcttggcggcttcctcgcaggtggcgcgacgctgagcgtactggccatcgttgagctggtgcggagcctgggtatcgaccacaagcagctcgaggttgtacttgtcgaggtcgaactcctgctgggagacgttctccagcggggtcaactccgggcggcagtcaagcagcagcgcatggccggcggtgcaacgcatggaagcgttctggtcaagaccgccggtggaggcaccggccatctcgttctcggacttgatggcggcgttgatgagggtcacacggccggcgtcggaatcgccgtagccaaggccgtacacgtcgtccagagccagagcggtggagcaggtcatggcggcggaggagctcaggccggagcccagcggcacgcaggagacgaaggcggcgtcaaagcccttgaccttgtcgaaaccagcctgacgcagcgcccaggccacaccggtcgggtaggcggaccagccgtccacgccacgggccttgaggccatcgagatcagcttcggcgaccttgtcgggagccacgtcggagacgacacgaaccttggtgtcttcgcgcggcttcagggcgatgaaagtgcggtgcggcagagcgatcggcaggcacaggccggcgttgtaatcggtgtgctcaccgatcaggttcacacggcccggagcagcccacacgccctcgggcgcagcgccgtaggtatcgacgaacagcttggtagcttgcgagacgccttcctcatgggtcagcggctcaatgaattcaacagcagtcattgatgttttctttctatcagtcggcgatgtcgatggagccgagctcgtggaagcgcttggcgatgagttccggcgtggtgtcggagatccaggcggccatgccggattcggagccggcgaggtacttgatcttgttggcggcgcggcggaaggagaagaactgcaggttcaggcggtagttctcgcggcgggcgtcgtggatcggggcctggtgccaggcggcgatgtacggcagatccatgcccttgccgtcgcccttgtcgaagaaggcgttgccgcgcttcaggaggtgcgagtacatggaggcgaggtcccaacgctcttcgtcgttgagctggtcgagggtgagcacgtcgcgcaccggagccacgtggacctcgaggggccaacgggcggcggccggcacgtaggcgacccagctgtggttgcgcatcacgatgcgttcgccggcttcgagctcggcgttcatgatgtccttaagcaggttgccgccggtcttctcgtggtaggcctcggtgtgctggagttccttctccatcttcggggcgatgaacgggtagcagtagacctggccgtgcgggtgggcgagggagacgccgatttcctggccgtggttctcgaacgggaagatctgctcgatgccttccatcttggagatttcggcggtacggaaggcccaggcctcaaccacggtgcgcaggcgggagaccggcagatcggccggcaggccatcctcgttcgggtcgaagcagatgacctcgcagcggccggcggcgagcttcttctcccacagcgggttgccgtcaacgtaggtcacgtcctcggagacgccgggcacgcgcaccatggaggggaagcggttctcgaacacgacgacgttgtagtcggtgtccggcacttcgccgtcctggtacgggtcaccgggcttgcgggcggccagcgggttgcccttggcggtagcgccggggccggcggtgatcgggcggttcatacgggcggtggccatcgggatccagtcgccggtcagcgggtcgcggcgcatctgcggggcggcgtacggcacttcgttgccgtcggcgtccaggtgcggggcgaaacggtagtccagcgggcgcgggtccttgagctcgcgggtcttggcaccggagacgaactcggggtcgtcgtccaggtagaagaagtcacgaccgtcggcaagcgtcgtcggcgtgatgcggatgtgctccttcgcatactccccgggggtgtagttggcgaaatcagccatgggtttactcactttcctcaatgatctcgctctggtgggccagcacgagttcctttaccaaatccttggttttggcggcggagtcgggatcgagcccgtcgtcagtaatgaccgtgtccacctggtcgaagcgcgcaaacagcgacagcgatgtgcagctccacttggtgtgatcggtcaaaactatggtacgatcggcgatgtccatcatcgccatatcggttgcggcttccagcgaattcggcatcaggaagccacggggaatcgacaccgagtgggtgccgaggaatacggtgttgacacgcagcgaggcgacgaccttgtccgcgatcggaccgacaagcgagttcgatcgggtgatcacgccgccggtgacgatcacctccacgtccttggattcgagggcctggaccagttcggccacgggaatcgaattggtgaggatggtgatgccgctggactgctgcgattcgagcagatgctgggcgaagacataggccgtggtgccgccgccgatggcgatcacatcgccgggagccacatatttgatggcttcctgggcgatggcgtccttcaggccgagatccatctgggacttgacagagaacaggggttcgctgagcaaggtactggtagtcaccgcgccgccatggacgcgcttcagcagtcccttgtcggcaagttcggcgatatcgcggcggatggtcatcgctgacacacccagttccttcgatagcgccgtaatgcgcactgccccgcgcgtgcgcaacctgctcaagatgaggtgctgacgttgtgacgaaatcatgtgaacattatcgcacacaaaagctcacaaaccaaaccggcttgagcgttttggggacaatctctcgaaaattccgggcaattcaggtgttcatttccacaaaaccgcgcaaaatcgcacattgtgcgaaccgatattctcgcagcgaccactagcgcgatgactcacgaccgacgactctcccgagcgcgttgctcagcggcgagtcacgcctgatacctggtgcatcccgattcatgtatcttctgccgagccgacgcctgcgtgcgcctcgacacgcggtagccccttccccaattcgcctaggcaggaatcgcctagccgcaccagcccaagcgtgagacaataggcggtatgacttacgtttctgaaagcttctggcacgacgccgtcaacaaagccaccaccgatctgttcaccttcggctacaagcacatcatcaaaccgaacttcgtgttcaaccaccgccccgatgaggcacacgatcagatgatcgagttctgccacgtcgtcaagaacgtcccgccgctgctgctcgccgagcagctgatgctcgactacaccgaccccattctggaaacgaatgtgatgggcgtcgatttcaccaacccgttcggcctgtccgccggcctcgacaagaactgcgacatgcccgtggtgctggaccatgccggcttcggttttgaaaccgtaggctccaccacctcgcgtccctgcccgggcaacgccaagccgtggttccaccgtctgcctgaatacgattcgatgatggtgcacgtcggcctcgccaacatcggttcggacaaggtcatcgagcgcgccgagaaggcttggactcaggcccgccagatgcagctgtctgtgtcgatcgcccgcaccaacgacgaccagtgcggcgatttggacgaaggcattgaggattactgcatttcgatgcgccgcgccgccggccgcaccgcgatggtggaggtcaacgtctcctgcccgaacacgcacgtcggcgaaccgttcaccgcgactccggaagcgctcgaccgtctgtttacggcgctcgacaagatcgaccgcccgcagcccacgctggtcaagatgccgttgaacaagccgtggggcgagtacaaggagctgctcgatgtgctggccgagcacaatgtgcaggggctgtccatcgccaatctgcagaaggaccgcaccggcctcgagattccgcgcgattgggagggcggcctgtccggcggcccgtgcaccaacgccagcaccgagctgattcgcaaggtgtataaggagtatggcgaccggttcgccatcgccggcatcggtggcgtctttacccccgagcaagcctatgcgaagattcgttccggctccagcctggtcatgttcatcagctcgctgatgtaccgaggcccgcagcagatcaccgtgttgaagcgcggtctggcccagctgctgcgccgcgacggattcgagcacatctccgacgccgtcggcgtggacgtggagtgaactcacatattgccctattacccatggggcggttagccaaatttcacattccgcagaataccgccgttttgagttaccgccccatgagggttttaccgccccatgggaaagtcaccgccccatgaggattcagtatgcaccggccacgtattgcggggcgtaggggacctctgtggacggtatgcccagcttgttggccgcacgcaacggccagtacggatcgcgcaatgcggcgcggccaatttccacggcatcggcttcgccacgggccaaaatcttggccgcctgcttcggcttggtgataagacccaccgcggtcaccggaatatcggccttggacttgacctgctcggcgaacggcacctgatagttcggcttgaccggaatcgacactcccgacatgatgccgccagtggacacgtccatcacatcgacgccatgctccttcagcaccttggatagtgcaatggtctgatccagatcccaaccgccagcggcccaatccgtggctgaaatgcgcaccagaaccggcacgccctcggggacggccccgcgcacggcatccacaacctcgaccaggaaacgagagcgaccggtcaaatcgccaccatattcgtcatcacgctcattgctcagcgggtcaaggaactgagaaatcagatagccatgcgcagcatgaatctgaatagcctggaagccggcggccaccgcacggcccgccgccgcggcgaacgcaccgaccagaccatgaatctcatccacggacagcgcgcgcggcgtacgcagcccgccgaacgcgatttcagacggtgccatggtgggccagccgcccgcctcctccggcacactctgaccgtcgtaaccaacggcgaagcaaccggtcgaagccttacgccccgcatggttgagctggatggcaggcaccgcacccgcctcgcgaataccgtccacgatccagcgccaagcatcaatctgcccgtcttcccacaggcccagatcgcacggcgtgatacgcccttcaggagccacggcggtggattcgacgatcaccatgccgaatccgccgaacgcacgagacacgtaatgctggtagtggaacggcgtgggcctaccatcgcaggcgaacgacgaatacgtgcacatcggcggcaaccaaatacgattacgcacggtcacttcgcgcagcgtcattggcgcaaacagtcccggacggtccttgctggctttcttatctgccttgctcacagcttccctttcctcataatcctcataatcatcgaacgattcgctcgtcttgcccgcgccggcccgcttcttggaccgtgcgtcggattttgacttcttcttaccgtgcctacggttcctcgatgcatcctcgtgcttggtcttcggctgcttggactgttcgccgtccgaagacgaagccagcgtcaccgctttgagatccggcacgtcgaatccacgaaaatcaaaattctcatgcgtcagatcgtcgtcgctcatcgttcccctttccaatgcgcgttcatggcgaatattcgatgaacgcgctggcgttgtcattaagcattgtaaaacgggcgtcacctgaaacaggtaacgcccgcaaactacgtaatttgggtatcgcagtcgactatgttacgtagactcagccggcctgcaatcaccaaatgtcaaacgccaatcaccaatcactggccatcattcgaccgctctgaattggtgccctgggtttgggtgttgttttgcccagtgttctgcgactgagactgcgactgggattgaccattggtggtcgtctgcgattggctgttgccattcgtagtggtctgcggcacgctgaacgttcgtccgccaatgcccaggtacttgccagtcgtggtgtacttcgagacgggctggccgtaatcgttgtcaatcggtattttcttcttggaaatgtagctattgaagaagttggtaacggccggagctgcgattgtcgaaccatcccaatagctgttgtaccggccgttgatggcaatgttggaaatacggttggtgtacgggttctgtgcatcgccgaccacagcgaacgccgcaatctgattaggaatgaacgatccaccggacaccgcaagatcctcactggtaccggtcttaccaaacgacttacgcccgtcagccaatctgaatgaccaaccggcaccatccggccgcaccgtaccttggttcagggtataagcgagtgtttggatgatgtccttatccaccgcctgatggcagttcgcggatggaaccttgagatcgttgccgtccttatcggtcaccttgctgatggcaatcgggttgcattgcacaccattcgaggcgtatacggcgaagatgctcgccatggtcagcggggacacattcaccgagccgatcatcatggatggtgtatacacctgggttttgtcgatggtctcacccgtggcggcgtcatggtatcccagtttggtcgcggtgtccgccaccttgcacagtttgaggatggcgcccatggaggcctgggtggtgttgtgcgatcgcaccagaccgaggaacgggctttccgggttcaccgtgccggcgcccatggcgttcgacacgttccacgaatcggcaccgcccttgtagttgttgcaggcgaagtcggtcgtggggtacgtcgtggtggtctgtaggttgtcgttgatcgaatgacccgcctccatccacgcaatcaggttgatcggcttccaagacgaaccaatggtccaaccggagccgccgccgtccaccagatcgacggcatagttctggcccgacttggtcggatcgttcgcggctgccggagtggcgtcatagtaacgattcaggccaaagctcagcacctcgccggttcccggtttgactgcggccatggctatttccatgccgctgggatcgtccggtggaatggtattacgcgcggtctccatcatcgtggaattcgcttccacatccaacgtggtgacgatcttcaggccaccctcctgcagcagcttgttacgctccgcacgagtcttgccgaattcttcggagttctggatgcgatgcaccacgaaatcacagaagtatgcgtagtcgccggtgtcctggcagccgacgttcacggcctgcaccttcagcgtgtccttcagcggcgtgttcacggcttcggtgtactgcttctgggtgatgtacccctcctgcagcatcagcttgagcacgatattgcgctggttctcgctttccttctggttctcctcgaccagcggatcgtactggctcgggttcttggtgatagccgcgatggtggcggactgcaccacgttcaaatcggcggcggacacgctgaagtagcgctgggctgcggtttccacgccatacaggttgttgccgaactgggcgatgttcagatagccctgcagaatctcggccttggaatacttcttctccatctgcacggagatcagcatctcgcgaatcttacgggcgacggtgtcttcggtggcatggtactgggcgatcgggtcgtcgtcctcgatcgcctgcatgagcagcacgttcttgacgtactgctgggtcagcgacgaaccaccctgctgggagcctttgacgaggtaggtctgcacgaacgcacgcatcacgccttgcacgtcgacgccggcgtgagtccagaatcgacggtcctcgcgcgccaccactgcctgctgcatggttttggaaatcttcttcagcggcacgacgatacggttttggttgtagaacgtcgcgataacggtggaaccgtctcgcgcgtacatcgtcgacttctggggcagaccggtcacgtcgaagtccacgttttctaccttgagcgacggaatcaccgctttggcggctttattggcaccgaccacacccggtacaaacaacacgctggccgccacgccaccgcagacggcaagcatgatataggccaagaggagaacaagcacacgttggagagtgagggacttctttttgggcatgggccccattctaaatggggtgccctaccaaccgggctcgcagtcagcttccgtgaacatatcatcacaagaaccgcactagcgtaacattggctggaagtcagccgaacggtcagcgccgcgagcgtcgaatcagcatgcctggctggaagatgatgatcgatcgaccgtcacgtgcgatccatccgcggttggaaaagtccatcaacgccttgttcacggtctcacgactggagcccaccagttgggccagctcttcctgagtcaggtcatgcggcactttgaggccctgttccaccggctcgccgaaacgtgagcccaagttgagcaatgtcttggccagacgcgccggcacatccatgaataccaagtcggagatgcgttcgttgttgccgcgctggcggttggccatgacctgcaacatgtcgatggccacacgcggatgctcatcaagccatgcgaacagggcatcatgctccagccagaccacgcgcgtgccatggctcatggacaccgcggacgcagtgcgcgggccaccatgagggtcgaataccggaatctcgccaagcacttcgcccggcgcgtggatggacagcagctgcacgcggtcatcggaagaagtgcgaatcagcttgacgcgcccctgctccagtagatacatgcgctgatcggtatcgccttcggagaagatatagtcgcccttatcgaaggtcgcacgcttcaaatgcggcagcagctcctcggcttcggctggcgatacctgcttgaacaatgccgtatgcagcaggatgttctcctcgtcagcaaaagcgtttggcgtttccaagctcatcgcaccatccttattgtcctacgaccgtcgtcggccatccgtcatattgtaacgcgccccacaggtttcgtcagaagcatgccatcattcgtcacttcatgtgtggcgcgatccgatagccgtacgacatgctgacgaatgtgttaccgcgaaaaacggcactgtcgcggttaccgcgctcgcccatgacaaaaccacgcacggccaccggcaaaatcgtatacggccatcggtgaaatcacgccgcaaaccagtcaataaggtgttcgacgatgtgttcgcggctgagacccgtctggcttttcatcgggtccacgcgtttgaccgctgatttcaccgctttgtctgacatcttctcgcgactggtgttgagcacacggctcatcttggccgcatcgatgtcatatgccatggtcacatggtgcagcaccgcgccgcctgagcctacggggaagcgccgttgcgccgctcccccgatcttgccgtactgcgaggcgatatcattgaggcccgcgaaccgcacatccaagccaagttcgcgcagcgcttcgaccagccaccagtcacagagccggtaggattcttcgatgcttacgccctgaacgaaatcgagcggtgcatacagagaataggtaatggtgttgcccggttcgataaacatcgcgccaccacccgtgcaacggcgcaccacgtcgaaaccgagctgctcggcaatgtccagattcacctcgtcctgggccgattggaaacggccgatgaccacagccgggcccgcccactcccagaaccgcatggtcggctgtcgtgttcctgctgcgacttcacgcgcccaggtctcgtcaatggccatttgctcgtccggagtacgcggatggtcgtggatcacggtgagttgaggtctgagggcgttccagcgctcccggtattcagagcttttgtcgggctgcttggtttgtgtattgatggatgccggggtgttcggcgcatcggggctgaccacccccacccgctgcgcgggagcccccaccagcgggggcaagttgctgcttacggctcggctatatgcggttttgatggcaacttcatctgtgccgataatttggcaactagggtgagcgtccaatacggaccgcaatgaatcatcactaattagagcctgttccaagtcacgcaacaaagcatgagattcggcatccgaaactgattcaataaagaaatcaccgctgatatggcatgactgtgcggtgccgtcatcatcgacggatacggtcacggcgactagtttgccgccaacggttttgcattccccatgtcgcatttgcatgcaactcagtataaacttggctcccctctggaggggagccaagtgggacatcacatgcgggccagaatgtccttgccgacctggtcggtggagcgcacggtggagccgagctcctcgatgtccgcttcgacggcggtgtgaatcttcttggccgcatcatcaaagccgagatgctcgagcagcatggcggcggagaggatggcggcggtcgggttggccttgttctgaccggcgatgtccggagcggaaccgtgaatcggctcgaacatggacgggaactcgtcggaggcgttgatgcagccggaggcggagtagcccacgccgcccaccacggagccggcctcatcggtcagaatgtcgccgaagaggttgtctgtgagaatcacatcgaaacggctcgggtcggagaccaggaagatggtggccgcatcgatgtgctggtagtcgtgggtgacctcagggtattcctcgccgaccttgtcgacgatgcgttgccacatatcaccggcgttgacgagcacgttcttcttgtgcaccagggtgacgtgcttcttgcgcttcatagcgagcttgaaggcgtaacgcaccacacgctccacaccgtatgcggtgttgatggacacctcggtggccacctcctgcggggtgttgcggcgcaccgcgccgccggcgccgcagtacagaccttcggtgccttcacgcaccaccacgaagtcgatgtcgccggggttggcgagcggcgaggtgacgcccttgtacagcttggaggggcgcaggttcacgtactggtcgaggtcgaagcgcagcttcagcagcaggccgcgttccagaatgccggccttgatgcgtggatcgcccacggcgccgagcagaatcgcgtcgttggccttgatgcgctcctcttcgtcctcgggcaggatcgcaccatcgcgcagataacgctcggcacccaagtcgaagttctcatactcgaagtcagctacgccttcagcggccttttccaaagccttctgagcccacggagtgacttccttgccaataccgtcgccgggaataacggcgattttatatgtctttgccatagttcaaggagcctactcgcgcgaccacctgccggcccgaacccgctcagctagtggacacaaccaacatgcgtatcgtgtcgagacattcattaggtcattttagtgttcattaggtcggtgtgggttcatttcagggactgaaatggcggcatttcagtctcacatagaagaggacaccgacctaatgaacgacgaaatgacctaatgagcgagccccatcacatccatgcaccaagcgttctcataggaaacctcttcccattgtttgtaacgcccggatagaccgccgtgaccggcctcgacctcgatcttggccaccgcgtccacgccggcggactgcagacgggccagccatttgagcggctcgacgtacagcacgcgggtgtcgttcatcgaggtggtgatgaagattctcgggaattgcgcggcggcgaccgcgccgacggcagccccatcagcactgccgtcaccggcagcctcgtcgtcgccgccctcgagcacggtgaccggcacattctcgtatggcgtgtacgacttcatgtactgatacacctcagggtcatgcaacgggtctccccattcgtcccattcggtgacggtcaacggcaagtccgggtcaagaatggaggtcaacgcgtccacgaacggcacatccgcctcaacaccggcgtagcattcgggtgccatattggcaatcgcgcccatcagcaggccgccagcggatccgccgttggccacggtgcgccaagcatcagccaaatgcgccttctgcagcgcgcgcgtggcgtccacgaagtcctcaaaggaatgcttcttgttcagtctgcgcccctgttcataccaggcgcgtcccatttcgccgccaccgcgaatgtgcggcacggcgtacagcacaccgcgatccaacatgctcaggcgagagaccgagaaccccggatcggaggaaatctcgtatgcaccatatccggtaatgaacatcggcgaatcctgcgccgggcaatcgcggtgccagacgagggaaacaggaatgcgttcgccgtcgcgcgcggtaatccacacacggcgttccatgtaatcgcgtggattgaagtcgcccaacacggtggctcgcttcagcagcgcatcttcaccggtggcgggatcgatttcgtgcagctcgcccgggcgggtgtagctggcgaacgagtagcgcatgcgcggcgcctcatacgaggggttgccgccgacgccgatggcgtacaagcgccgggtctcaccgggcaggtggtcgtcgctggcaccatcggaagatgacgtgtgatccgtgggggcctcatcttcggtccacaagatttcgccatgatcgccggtgaagttttcgcgatcggcggcgaccatgtcccagtcgtcctccagggcaggcggcagcagttccgtaaaccgccacggccgtccggccaggaagtcggcggcggccgcgctcttggtcatgtatgccacgtgcggctggccgtcggcacggtagctcagggacacaaagttgcgatgcaacgcgatgccttcgatgcccagaccgtgggcaccctgcaatatcgccggattggcggcgttgaagtatgcctcggtaatcggcttatccggctcaccatgttcacagccgtacggcgacccggcggcgatgcacacgccttcgccgagtcggtacggcggctcatggccacgcatgtcaatgacgtcgatttcgaaattcggattggcggcgttgtggtagaccacggcgagcggcacatccgcaccgttctcccccgcgccttcaaaacaggcaaagctcacatcatattcaatatcgttctgacgtggaatgaaggcttggaattcgccttcaggcgtggccaccggcagcatcagcacttcggtggtggttttggaaccggtgccgatcacgatattgcgctcatcaaaactgatgccgacgcccacccagaaccgttcatcggtttctcggtacacgcacacatccgattcgaccgccgtgccaacacgatgccgccacacggcgagcggccgccaggaatcgtccaattccacccagaacacccattggccgtccggcgtgaagcatgcgctgccaatgccggtgaactgttcgggcagttcgctgaccggctccccggtctccagcccggcaaggtcgcgaatgcggaaatcatatcgttcgtctcccgcaacatccacgccgtacagcatccaacggccgtccttgctcagatccaagccgccgagccggaagaagtcatgcccctcggattccttgttcgcatcaaaaacgacctgttcaccgggcatggagccgggcgcgccttgcggatccacgaccggcgggtcccagtcatcggcatcgcgcacggggatgcggcattgcacgccatactgtttgccctgctgcgtgcgggtgaagtaccagtaatcattgacgcgcgtgggaaccgacatatcggtctcttccacatgcgatttcagctcttcaaacaacgtatgccggaaatccgccagatgcgccatgcgacgctcgcagtactggttttcggcagctacgtagctgcgcacatcatcggagtctttgtctcgcatccactcgtaatcgtcttcgaaaacgtcaccgtggaattcgcggcgcttcggctcgcgcttggcgtaaggcggcatcgcggccgcggcgtttgtgctctcgtcagtcataccacgcgattataggcgaggcaccacaccgggacgcattcggcgttcatcacgccgcgcttatcgcaacaccgtcttcagatacggcagcatggtcttcagaatgttcgagccggtggtgccggtgaatactggtacatcggttaccggagtcggctgggtcgaggtgagtcccgtcaccgacgccaatccggttgattcgcgcgggctcaactcacgaatgacgatcgccagtacacgtccgggatatctgcgggcgatggtggcgtacgtggtcgggtccttctgcccgtcatcgcccaccagaatgaacttcatgtccgggaagtcggccataagttgttcggcaaactcaagtttgtgctgggggccggtgggcacgaaggtcttgggcctcgggtcgaggtcgcgcagcagcagcgggccttcgggaaaaccatggtcagtgatgaagttgcgaatcgaactctccacattccagggcgatgtcgaaagatagaagaacggtgcgccggggaacaagtcggcgatgcgggtgaacagcacgctcatgcccggcacggaggctttcttcttggggtcgaggaacagcaggttgtacgcggccttccatggcaccggggcctgtgtgatcatgatggtgtcgtccacatcggagatgatgccgactttggcactggcggggatggtgtacaggttggcgctcacgggtttgcggttggccacgctgtaggagacgcgatggataccgggcaccagacgatgctcggccacgaggtcgaggtatccggcggaatcggagatggcgtattcgctgccgagatcgcgcgtgcggtccaccttgtcatagacctcggagacgccgatctgcacggtgttgagcggcgtgtcatcaatgctggcctgcacgtgggtgcgcggcgcggatacggcaagcatgccgcggatgccgcggatcagttcgccggattgcgcgtgcttgggggcgtataccgtgcggcagatcaggcgcgagtaatcgccggtgccataacccacatagggttccactcgcggataccagccccattggcgcaccacctgagtggagatgtgtgaccatacgccgaacacgcgggtgatggcacgacgtatgaatcgggtgatcggcggcttgacctcgatgcgctcacgcttggagggggtgtcgaacgtcgtggcagccttgcgtgcgggaatcggcacggtgggcatgtcatcggaatgttcagcactgctggcattgctggcattgtcggcgccattggcggatgccttgacgtcagagactggcgcggtggcggacagcgctgcattgcgagcagcagcatcccaaggcagtcgcttgcctgccgcctcaaaatcctcgcgtgggcttctcatagacaccaatataggccatacgcctcattttcttggctcccctccataagaggcacgatgcatataggtttgatgccacatactggctcccctcagggaggggagctatgggtggaactaccgcacaaccttcgcgtattcgtcggcgctcagcagctccggctcatcgtcgtcaagctcgaccttcagcagccagccttcgccgtacggatcgccgttgaccacggacgggtcgtccgccacgtcacggttcacatacttgaccgtacccgccacggggctgatcaacggctggacggccttggaggattcaagctccacgatctcgtcgccggcctccacacgggcgccaggctcaggcaaatccacgaacacaagttcgccaagctggtcggcggcgtattcggttatgccgatgattgcggggtcgaccgaacggtccacccaagcatgctcctcggagtattcgaggtggtcgggaatgtcgaggttcagcggctgttcgttttcgttgtcatcactcatagtcataagcttaacctatcttcgcggtccgtcacagctcgcgaccgagccattcctcaatcatgtagcgggcgatggtggcgcggcccggcgccgccatacggccggcgatgagctcggccgtgtattcgtcgcgtgtgacccatcgcgcggtcatggtctcctcgccgtccacatgcacgtcggtggtgatcgcatgtgccttgaacgccatcatcagcgaagccgggaacggccacggctgcgagcccaggtaccgcacctcgccgagcttgatgccggtctcttccatggcctcgcggcggcaggcgtgttcaaggttctcccccgcctccacaaatccggcggacaccgaatacagcctcgaatcattccatgccgcgttgtgttgcagcagcagacggtcgtgcccgtccacgatggcggtgatgaccgccggctccacgcgtgggaacagcacacggttgccgtccgcctcgttggtgcatcgctgcgcccatccggcgagcgccggccggaccgccgcgccacaggtggggcagaaccgctggcggctgtgccagatgcttaaggtgatggcactggtggcttgcccagcctcgcgcgcgttggcgtgaggggcgaatccgcgcaggtccacccagtcgaaccgggtcacggcctgttgcaacagcgtgggcttcggggccaagggctgtacgggcgcgccgaccgaatcatcgaaggcatcgtccgcaccttgtccggccgaatccggtacaccgagcggcccggcgattttggctgcggctacgccgccattgcccttggtatctcccggctgccgtattccggcggcagcacctccgctgatgccgttcttgcccagcgcgccgtccacggtgccggaatcctgggtgccgagcacgccgccggcagcaccggaaacatcagcaatcccgccaacaccgggaacgccggcttccggcgcgcgcgtgatatccacggcgaccacggattcgccgcgcgccccgacataggagccgaggaacatggcgaccgtttcggggtagcgtgccagttcggcggacacataggcgcccggcaacgtggcgagccgcattttcacgttctcatagtccacgagctcgccttggccgcgcggtacggcgacaagtccgccgcgcgtaagcacgactttggtggtcggctcggccaacagctcgtcgatcagaccgggttcaccgcgccggtccacctgatagtcgatgtcaccttgcgcgagcggcaggaacggcagcgcatgggtcagcgccaggggcgaaaaatgaatgtcagtgcccatcgaggtctcctatgcgttcttctgcgcgttctgcacgcgcctgacgagcgagagcagtgctcgcgccacggtatccggatgttcgacggcactgaaatggccgcagtccggaatgtcgatgaattcggcgccggcgattcgctcggcgagcggacgcatcacactcggattgctggaggggtccagttcgccggacaccaccaggctcggtgcgctgatcgtttccggcaccgcccccagttcgggccggccataggtcatgcgctgacgccaggccagaccagccgggttctgttcgttgatccagccggtcatggtcgcgatgaattcaggagtcttcttgacggtggaatcgccatcggccggttgcgcgaagtgcatgaccggttcgaccgagttcgtctgttcggcggcgtccgccatcttcagtcggttctctccgcccacgccgtcggacgcggccatcgtgtcacacaaggccagtccggccaccgtttcggggtacaggcgctggatgtccatcgccacgtagccgcccatcgacaatccgacccagatcgcctgctcgtagccggcggccttgatcaggtccacgtaggctccggccaggcgatccagcgcctcgctgtacgcgccgttcgccatgcgggggccagaatcggcatcgctcggcaccggggatgcgccggagccggccatatccggcgcccaaatcgggaagtccggcacatcgttcaggtcggcggagtcggcgagcgccttcgcgcacacgtcccacatgcggtggtccaccgggtaggcgttcatcagcaccaccggcacgccttcgccatcgcgatagatatgattggccaattcgattgccatgaattactccttcacattcacgtcccaccagcgggaagcaaaacaactgtcagattccggcccaggccaacgcctgccgcacgatgcgcccgtggccgttgaccatctgcgccacgaacgtgttcattacgtcgctcttgggatccacccattccacgtccagcgtctcgtcctgcggcttgcagtcgccggcgatgggcaccatgtagcacagtgcgatggcgtgctggcgcggatcgtagtattcgctcagtcccggcgtagggaagaattcggccacggtgaacggctggagcccgaccggcagcagcggcagggcgatatcgcccaaatccttggccacattgcgggcgatggcctcgcgcagcgtctcgtggtacagcacacggccggtgatcagcgtacgctcgatcgacccgtcttcggcgacgcgcagcagcgagcccacctgggagatgcggcccatctcatcggtgcgcacgggcacgatctccacgtatgcgatgggcatctgatgacgcgcccggttgatgtcggccggtcccagccagcccggcgggttgccgtggccggaaccgcccccgtggatgaagtcctcgggcgtgatgttgtcgaattcgccgcggccacggccggcatcataatcgccctcgtcgggcacttcatcattcatgactggcatggtctcattatcgcgcgcattgatgaacatgggcacaattcaccgaaaaattgtctgtgaattctcagcaaagcgcctcatcgcctccatgcgcccgcaatccattcagcttggggcacaaacttttgccgaaatgttgggtgttgctgggaaactggtacacagcatcaagcactgtgtttgaggaaggaacttcaatggccaccaccgccatcacttcagctgagtttgagaagaccattaccgacaacgaaatcgtgttcgttgacttctgggccacctggtgcggcccgtgccgcgcgttcggcccgattttcgaggcggcctccaacgagccggagaacgcgaacatcgccttcgtcaaggtggatatcgacgccaaccaggatctggcccaggccgccggcattcaagctgtgcctacgctgatgattgccaagcagggcgaggtcatcttccagcaggccggcgcgctgcaggcctccgatctggacgacctcatcgcccaggccaaggcgctggatctggccgccgccaaagcacagcaggcagcgcaggagcagcagtaagccttatcacactgcggcaacggaagcgcggaaaagcccatatatagcgcttccttgcactgctaactactacatatgccatccgtggcgggtcgaacacccaccacggtttttttattcatccactcaacgtcctatgatggaaagcagtgtgtacccaaccaaggagcgcaatgtcgaagcacgctgagcggacctcattcgtcaaaaccctgtctcggggccagtgggcgaagatcgcggcggccgtggccgcagtgggtctcattgccactgcaggcgttatatcccgcgacttctatcagtcgagcaccgctacaccttccatcaccccaacctcattctccgccactgatggtgcggcttcccgttcggcatcccgcggcgcgctcaagagcaccacctacgtgacagtcaaggtcaatggcaagtctcgcgtggttctcggcgaaaaagccaacatgaccaccgtcaaggatgtgctggaaaccggcgatatcgtcctcgatccggaagacagcgtgactccgagcctggattccaaggtcagcgagtccacagtcatttccatcaaccgcgccaacaccacggtggagaccaccgacaccgaaatcgccttcaatgaagtgcgcaaggagacctcgagcctgcccaagggccaggagaaggtcgagaccgaaggcgagaagggcgtgctggagaccacgtctctggtaacccgctccggagatcaggtcgtttcctccaatgtgttcacctcctgggtcaagaaggctccggtcgataaggtgattctggtgggcaccgccaccgtgtcttcgcccagcgccgccagcctcggcaccaccacgccggccggcgagattcagtcctgggcgcatgactacctgatttccaacggctactccgaggccgacttcaccgccgccaacttcatcatcagccacgaatccggctggagccccaccgccacgaacccgtcttcaggtgcttatggcctgccgcaggcgctgccgggcagcaagatggcttccgcaggtgcagactggcagaccaactaccagacccagttcaagtggtttgtgaattattgcaacggccattatggctcgatttccggcgcgtacgcgtattggcaggcgcacaagagctactaagccagccaaatcaacacgtacacaacaagttccgcgccgcaaggagacttcaccttggcggaatcccccgaaggcgaagtctcctatcagtccgtgaacggcaccgcctacccagacagcaagaccgtgatcttcgacgccgccaacgccactgcaggcaccatgaagcgccgcggccgtaagaaggctgagtgaaacccggcccaaacgccgagcgaactcatacgcatgatgccggttcccaatcatcggggaccggcatcagcatttctgcgccttatcagccgaatccttgcattatgcaacgccctagagatcacttttaccgtgtcatacgaagtgccctccacaactgattatgcgaatccgtgacggcatagcggcacaaagcacgcgtatattgagctggtttgcaacagcaaatggtggaaatgcgcactactgttattcgcggttcctttgacaatttaggctagagcacgataacttactacttcgactcatctttcggttccggatcatctttcggttccggatcatctttcggtttcgtcccctgatcagccgcctggccacctgtccccggattgtctgtaccgtctggctgtgtttgctgtcgctgctgcaacaactgctgctgccttaatcgtgcataataatcattcagagctttctgccgcgctgcttcttgctgagcctcaacagctgcgctgtagttggccatggacgtgttgactgcatccatggacgcagtcagcgtgttgacggcatcctgcatggcctttacgtcagtgccctgctgggacagcacggtattggcgttggcgatgtcgctttccagtgtcatgcgcgttgaattatcgtcgacggcatacaggctgttgtccagcaaagtctgagcctcggctatcttgctctgcaacgcctgctgagcgttagcctgatccttagcgttcttgctgtccgtcacgccctttgccgcggcagtaatcgcagtggcgttcttcttggcggtcttggtctggctagtggccgtcttggcatattccttgaggtccgacgtggaagctgaagtcttgcactccaccgcttccacgttctttaccgcggcgattgccttcttcaacgcatccacggtcgcgccgtcagccacttgatcagctgtaatgctttgagcactctgggcgtcggccaacgccttggccagcgccttctgagcggtggaattctggtccacggcctcagcacatgctgtcaacgcatcctgatgcagctgatggctttcctgacgctgctcgctggaacgccagtaccatacaccaccaatgattgctgcaatcaccaccagcgcagcaatcaccgaaatgataatgcccttggtcctcttcttgccgcccttgccaccgcgaggagtccctgccacacggtcttcttccggctcctccaccggctcggggttctgttcgatggcactgaaatcgatgctcagatcgtctgtggcactatcacgttgcggcttggcttcaggaaccggcgcaaaaagcggcagcgtcgcattgtcatcccgctgaggcgactgagcgctctccgcagtatcaggcgccgcaaaagtcatcggggcagtagccacagcatcggaaggggaagaggcatcgccagcagtattcgccgcactcgcagtaggccattccaatacttcgtcaaagctggggaatgcagattgagagccatccgcaacagcaccagtactgttgccgtcactcggcgcagcgctgtctgcgttcccgtcaaatgagataggcggtatgtcccagaaggtatcgacgatatcaccgcgagccggcgacgtagaggaaccagattccgcgttcggttcagggcgttcgtctgctcccatgctcttctcattcctttgcatcattgaagtcattccaaactgtcagtttatccagccctatgccgagcgtgccagctggtattcaagaatgtcacaattctttactattcgatatacagccagcaccataaatccaacaactcagtcttataacagtaaaccgtgcggcacagaagtaccgcacggttcatattgcaagacgatcggcaaacgccaaactattacttgcgggccttcttcttgcccttgctcttggcacccttatgagagctgcgcttgttgccgtcctcgtaatagtagtagtaatagttcttcgagtgtatcttcttcggatcagcgaagttgaagatgaagccgagaatcggcacttcagcggcctgcagagccgtagcggtgttctccagctccttcttctccactacgcccttaccagtcacgagcaccagaccgccggccatacggccgaacacggtggcttcgctggcaacggacagcggagcagtatcgatgatcacgtaatcgtactgggtgagggcctgctcgaccatttccttcatgagatcggagttcagcaagatgctggcgttagccggacgcttaccggccggcatgatgtgcaggttcggcttccaatacttctgaatgacatcggccggggatgcctggcgagacagcacgtgagacaggcccacgtggccttcgatgccgagtttgtgggccacggacgggtggcgcagatcggcatcgatgaacagtacgctcttgccttcctcggcgagagccacggcaacattggcggaaaccgtagttttaccttcggacggattggtagagctgatgaccagcagtcggccatgaccctgcgtagcggtggtggtaaggaacgaaaggttcgtgcggatgcggcggaattcctcagcctcgctaccagctggctgagcgactatgaccggacggctgtcgtcaagaatcgtagcctgtggcacagtacccagcgaagaagcgtgggtcagttcgcgcacgtcatcggtggagtccaccttggtgttgaggatgtccctcagcagggcaacgccgacgcccacgatgatgccgaaaatcaggcccacggccaggtacagcggaatgttcggggagctctgcccggtaggagtctgagccttctgcactaccgtgagcttgatgggagagccgctggaggaggagttgttgtacaggtcagaggaaatctgatcggagaggttcttcgccacgctgttggcgatgtcggccgcttgctgcggatcaccgacttccgccgagatgtccaccatgaacgtgttcgaggggttcgtagcggtcaccacgccggcaagatcggtcgtggtcatgtccaagccgagatccttaatgacgggctggagcacggcttcggtcttcaccagttccggatacgtcttgatctgggtgttcaaataattggcacccgagctcatatcgttggtggtctgcgtctcgccggactgaccggcatacgtggcgaacacttcagccgtagccgtgtacttcggcggcatgatgaacgtgacagctgcgactgcagcaaacaccaccacgaacgagataatcgcagacgcgagatgcttgcgaacgatctgcagcaaatcagcgatggtcaatgttcttccttacctcttcgggaaattctcacagatggtctataatttagcacctaccggggaacttctcgagcttttgtatccttgtgaacaatgaccaaaacccttgatacgactgcagaataactgtacacaatcgcaatcacgatgtattctcactcaatattttgcgacagcactacctttcccattccatattatgaattgaaattgagaatgtgatatataaaattgtaattcaaattatcattcattacaatcaaaattgtcaataatatttatgcaatgtgaaggagtatattatggcatccttgcttcaaggattcgaagaagttcagctagttaagcccgttggcaaaacggtaatgaccgttaccgattccgttgtacgttttaataaggccaccgcagaagtgctgaattttccagcacaagttaagatccttattaacgataaaaccagacaaattgccgtaacgccgactaccgctaaggcggataatgccgtgaaattcagcaagggtgagggcaagcagactacgtctgtaagtatcaaaaatgctgtgcttgttgaagcaatttccaagtacttcacgcttgtcgaagctccagaaggcgaggtctctttcgcctccgtcaacggcactgcttacccggaagacaagaccgtgatttttgatgtcgcaaacgccactgccggcaccatgaagcgccgcggccgcaagaaggctgagtgatttctgcttaattcgcgattatacgaatactgtaaaagcctggatttcgaattaatgataattcaggcttttaatttccaaaaaaccagcatggcttgggttgaacaatacatgcaccagccccacagagaggatccaaacggctgattggcccatagatcattcagtttttgtaagcgactgccaattacttggtgggagtttaacccccaatgctttataggcgtcatcgatctcacgaagaacacctgtggcatctctcaaccaagagagacctcgaacatcagtaaatgtaattgctgattcgattctgatatgcattccagatcccggatatggaacccgagtcttatatcgtcccggcggcacggtaccaatcgaagacgtaaactcatttcctttcaagaatggttgtccagccccttggtatgtacctgttgtcaaaacgacattgtaaatgggctgcttggaatcattattgactatgacatctactgtttttgagtcatttgatacgagcaactcaccattggcatcagatactaaccatgtcgaaatcatatttgcttggtcaaacttcaaatcattagaatctttttcctccgtatgcttgtaagtatcgacagcaatttggttagccctttgcgcctgatcagcagcaatcagcgctaccgaaatcgaagctatagcaataattattgttgcaatttctattgcagcttgccaaattgagaaatcattcggaaatgcgcgaaggtacatcacaaacaaatccttcctctatctatatgtataaatatgatatctgtgaatactcagtgaagcccccatcaatatctttccaacctcaatcacaagcgagggccaacgccgcaaggcattggcccccttctgctaacggtgtccacccgcttcaaaccctatgctcagaggaagaatggcagacgacaaatcataccgtcgcaattgcacaactagctccggacggacatacggccaaagatcagcaagcatttccggggtcaacttatccgacaccttttcgccactaaaagcaactgcatagcatacatccgcagaaaatactggctcagaatcattcggagctttttcgggacgaatctccacatgtaccgtcagttcatgaggccaaggacgcccttccggagtctgcatgttaaataaaaaatcaatatttgactcccctgagccatcatcggcataagctagatctctcatgctccgttctgaaatcaacgcaatcttactaatcatgctggcaccgcctccccttgcgcaacagtttcgggagcgagggcatcgttatctacatatagaagggagaatcccagcatatcgtttccgttagtcccagatgcgtgcgattcaacgcgcaatcgtcctatctgccgttcaaaagtgaattcaccactctcccaagaagctactccattcaccacggctcgaatttcctcacgcaaataatgacgactgccatcgggcttcgcctccgcaggctccaccacatattcaatacgagcgccaacttccaaagcatagtcagttagcaaagacaccatatttgtcttgccgttttcaatttgagaaatatatccctgagaaacgttcatctcatcagccaactgcgtctgagtcatgccacgtcgcctacgcatctcaatgagctgatctagcaactcgtcaccgctatggtacaaatcataagccaattcgcgatagtcgtactcagctcgccccatcattctcaccgccattccaaaatattactatatctaatatatatatatatcgccgattatctctcacgaaacagtctctcgcccatcggacgcctgctgctcatatactgcaatcgctctatcgatttccttattttgggctttttgtattagctcatcatcgccactccgcacatccttgagatgcatatgcagccccccacaccacatcaattaaatccaacggctcagcatcgtaatgccgtatttgttcgcgcttgccaactctcagttcacgcgcatcgcgatgccagcgaaactcgaacattggcgcgtccccacgcttcgaacgagcgagaaaaatgacttcattgcctggagtcaggctgccggccacggcacgatccaatttctcctcaacaaaagcctctaatcgcatcttgtatttgttataacgccttgaatccagcaatccccaggcaaattcctgattagctgccatagcagcgaaccatctagcaacggcacgttgagcggactcaccatctacatgttcaataggcttcccccgccactgataattcacggcacgccctctcacacaacgaccgtccacaatcacccctccccggtcacgaaacacaaaccgcaacatcgcagtttcgactattgtacaggtacgtttcaagtgccacagccttctaaatagacagcgggaagagaataatttacttctttgccggtaaaatggtatgtcgatatctcgttgttttccggttgagcgagactctacgatgttggaggtgattggagttgcggtttgatgataggagacagctcgatgttgaaaacgctgctctgatcgcattgattgagtgctgcgaacggcctgatacgtggtcttcattggccaacgagtgtctagttgaaggcagtgctgtgcgtgtgctcaggcatcggatggatccgttgcataatccgcttcgtgaacacgaatatgtgccgacgaatgaacagggctcactgtttgaggtggaggacatgccatccgtcgaatacacggcgaaagcgaatgccgcgtggaatcaagccaaccagaaggtgacgcagtggcgagagcaaagtcttgacttggtcaccgtgttcgacgaccggttcccctcgcggctgcgatcggtcgtagacgtgccgccattcctgttcgccaagggttctctgctctcgaacgatttaggtgttagcgtcgtgggatcgcgcaaatgctcgccggagggtgccacgttcgcccatgacacggcttgcatgctgtgcgaacgtggattgactgtaatcgcaggactggctgaaggcgtcgactcgttcgcccaccgtgcaacattggaagcaggcggacgaacggtcgcattcattggcacgggcattaaccgttgctatcccgcatccaaccgtgaactgcagaaaagcatcgaaaagcggggactggtgctatcccagttctggcctgacagtccgccaaccaaacagacattcccgatgcgcaacgcgctgatgtcgggatatggtctggccactgtggtggttgaggcatcggaacattccggcacacgtattcaggcccgtcaggcgcaacgtcacggacgcccgttgattttccgtgacgtcgtactggaacgcaccgaatgggcgcaggaatatcgtaacaagccaggcgtgttcgtcgtgcacagtgtcgaagaggtcggtaaagcacttgataggatctcattcctcgacaacgatgtagacacattgctgggaaacattctcgacgcgaaggcgcaatatgcttgactctacgctgaatctaaatctgctggctgcatacgcccgctttgaacagagtatggggtggaggttgggcagctatgccaaaacagtgatataccgcagtgctaagcatcatgtctgtcctacctgcggcggtcccaagctggacagcgcatcgctttgctacagctgcactagtctgcgccaacaggctgaggctctcggcgtcgcacatctgatggcggatcgggtcaggattgccaactacgctattaaattcgatcagatgtaccgcgtcatggatggatacaagcgcaaccgccctgaatccaaggaggattactgcgagacgctgaaatatgtgcttggtgatgcgcttgtcgtccattggagttgtctaactcatacgtctgatggagtgatgccgagcgcatgggctaccataccgtcgaccacaaccagcgaacgctatggtcagccacacccactcaacggattggtctcgccgatgctgaataaaaccatcccggaggtgaaattgctggctaatgagcagaaacatcgagcgattgcaccatccacgttctcgctggatggctcgtattcggatgagacactaagacatgtactgctcatcgacgatacatggacgtcgggaggcaccgccgaatcagcctccatcatgcttaaacagtctggagcgcaacgagtgaccatctattgtctggagagaatcatcgatctggattattgctcacgcatgatcgggcagagcgtctctgacggttataagcagttgacctatcgtaatggatgctcgtgggattatgaccagtgcccgatgcggaacaagtgatgattttttactttttcaaattccagctgtctttacacggttcgtgttgcctttgccgtccacgatggcggtccagtctctccatcggggcttgaaacgatggataggtcatcgttgtaacgttggctttcggattcatataatgaacacgcacctgcacacgacggatacggcgtcaagctggtaaagcaagtacgagtcgtgccctgaccgatcgccattggcacacgactcattcgctatgcgtctgtcagtttccggccagttccagttcgccttgagtgggcgggagcatgggcgggttgcatgcgatgatatcggtctggccttgctcgcgggcctgctgcaccgtgcggatgaatttgtcgtcccaagtgtagacatgggtggcgtgggcgtacttcgcgctggcaagaatcgccgcgtcgcccggccggaggttctgaaccgccggtgtttcgctgaaccagccagcggcgtcggccgtcagatcgaccatgggcaattcacagtcatagcaccatttgatcagccgttgcttgtggtcacgtgcccgactgcgtgtctgtccggattggccggagcggatgacgaagttgccggacagttcgatcatcaccatcgagggcagcagcaattccagctccccggcgatgccgtcgttgagcagtcgttcggatcggggcaggaatgacgggtcggtggtgtcgtccttgccgagcgccacgttgacgatgacgttggtgtctaccacggcgcgttcgggatagcgccgtgaagattcgctctcattgattttcatcgcccgcctcccatggtggtgccgtggtcatgggtctcgcgcagcgtggagacgaaatcgacggagccgagagcgccagtgaagtcgaggctgatgatcccttccaggtcttcggcagtagccggggcgcggtggccgtcggcgatgatctccaggtcctcggcgtccacggacaccagttcgccgtcgtcggcgcgtacgaagccgcgcgcatcgacctccatgcccacttggatgcgtttgacgatcgggtcgagttcggggccgaatctcacgtcgacgcggctgcgggtgacgtggtcgaccagcccgagcgtgcggtgcgtgcgctgcaggatgaccttatccaccatgccgcgcacatgaccgaacgagcggcgtgatccacggatcagcagacggttgatgccagtgagcacgccgggcgtgaacgtgccctccgcctcgtgcgaggagacggtgatgttcgcgttggtctccttggccagatcactcaacgcggaaaatacgccggagaaccggaatgcctcgtcccgattcacgtcgtctcgtgtggccaggcgggtgatggtgtccagtgtggcgaacgagcgttccgttctctcgtccaccaccacgggtttcgcggcgaggtcgatgctgtgcagttccatgcgggagatgcgccagtcggacgcatccgctgcggacagtatccttgcgaatgcggacacagcctggctcaacgccttcggggtcacgtcccgcggggcgcaatccagtttgaatctgaagtctctgtcgcccatggcacacctccttcccgtatacgcagtatcgtcccgtcgtctgcgggcgggtcgccgtgcccagtattcctgtgctactgggtatcagtgtacgtggagtggatttcagtgtaaagcacgagcatgtctgacggtaatatgcccatggtccattcccgtacgcctcgtcgcaatagcacacaggcatacgcaacagagtgagcctctggaaaaagacaggatgcatcggctcgcatatcgcaggcagttatgcccatcatcggagagttccgacacccgttttacctaatattcggctatggatacgtggcttaccagtccgtcaacggtgctgcttatccggaaagcaaaaccgtgattttcgatgccgccaatgccacctccgaaactatgaagcgccgcggccgcaaaaaggcagaataaccaccaaggtacaggaattcgcgttattgcacgctatagggggctgctgcatactgcaatgcagcagccccttttactattgatgaacaatgtcgtcatatacatcggcaaatgcgtaatctgctatcgcactcagcattaatctcaaaatactatggcgtttccgcattcgtccgagtcaatcagtcgttaggaacaatcacgactttgccttcggccacatccttgagatgcttgccataggggctcttgccgtaacgttcggccgattcgaggagctcctccttggaaatccacccattttcgtaggcgatttcctccacgatggcgatgggcaggccctgggcgcgctgtacggtgcgcacgaactcgcccgcctcgtacagggaatccatcgtgcccgtatccagccacgcgtacccgcggcccagcgtacgcacgttcagggagccgtcctccaaatacatcttgttcaggtccgtgatctccagttcgccacgagccgacggcctgacccgcttggcgaactcgaccacacgctcgtcgtagaagtacagacccgtcaccgcgtaatgcgacttcggcttcttcggcttctcctcgatggacacggccttcttgtgctcgtcgaactcgaccacaccatagcgttccggatcgtcgacatagtagccgaacacacttgcgcccccgccgccttcggccttggcgacggccttgcgcaatgtggtgcccagaccgttgccgtagaagatgttgtcgcccagtacgagcgcgcacggctcgccgtcgatgaactcctctcccaagaggaatgcctgcgccaaaccatccgggctgggctgcaccttatagaaaaagtgcacgccgtaatgcgaaccgtcgccgaggagcttttcgaagttcggcaggtccttcggcgtggagatgatcaggatgtcacggatacccgcaagcatgagcacgctgagcggatagtagatcatcggcttgtcatacaccggcagcaactgcttcgatgtcaccgtcgtcaacggatacagacgcgtaccggaaccaccagccaagataatgcccttcatggtgttttccttcacttcctgtttcaccgcttgttaagttcgcgggtgacgtattctttgagggtttcctcccagtcggcgggcgtgtatccggccgcctcgatcttcgctaggtcgagcgcgctgtgcacggggcgcgggctgaccgggctggtcgcgttcgcgaaatactcggccgtcgagatgggcttgaccttgtcgccgttaccgttcgtcaaatcgaacacctcacgggcgatctccgcccacgacttgaccgcaccggatccggtcaggttataggtcccgtacggggcatggctgtcgagcagatggaagatcgcctccgccatgtcacgggtgaacgtcaagcgcccgtactggtcgtccaccaccgtcacccggttcagaccgtcgttcccgtcggcgacgcggtccgacaggcccatcatggtcttgacgaagttacgcccctcgccgatcacccacgaggaacgcaggatgtaatgctccggcgcgtttccgacggcgatgtcgcccgccgccttcgactgcccacacacgcccaacggggcgaacgcctcggattcggtatgctcctcggcggtcccgtcaaacacgtaatcgttcgacacgtgcaccagcgtgatgtgatgctcccccgccaccttggccaatagggcggggccttgagcgttggccttccacgcgaccggacgcccctccgcggtctccgccctgtccaccgccgtataggcgcccgcgttgatgatcgtcccgtacaacgaccagtcgtacttgtcgtacgcgttcggatcggagaagtcgaactcgtcgatgtccgtgtactcgaagccctccagaccatgcgcttccgcgtacgcgcggatcgcgtggcccagctggccgttgcagcccgtcaccagggtgcgcttgggagccatgggcttggcgtccttgagcatcgggtggtgcagatcggcctcggagcgctcggactcctccagcggaatcggccactggatgttcagttccggatccgcaaggttcacgaacgtgtaggtcttcttctgctcgagcgaccagtgcgcgttcaccagatacgtgtacaccgtgccgtcctgcagagcttggaagctgttgcccacgccgcgcggcacgtagattgcgcggctcgggtccagacgggtggtgaacacctggccgaagctctcgcctgggcgcaggtcgacccatgcgccgaagatctcgccggcggcgatgctgatgtacttgtcccacggctccgcgtgaatgccacgggtgacgcccttggtcgcgttgtagctgatgttgttctgcaccgggccgaagtccggcagtcccagacccatcatcttcgcgcgctgccagttctccttgaaccaaccgcggttgtcgccgtgcaccggaaggtcgaacaccagaaggcccgggatgttcgtctcctcgaccttcagttccttctcgaattcaaatgccatgatcggatcactgtccctgctgcttgtacctagcctcggtggcggccttcgccggctcccaccaggcacggttgtccgtgtaccacttgatggtctgctccaggcccttctggaaatccgtgtgcgtcggcttccagccaagctcggtctgaagctttgtgctgtcgatcgcgtagcggcggtcgtggccgggacggtccttgacccagtcgaagtcgtccgggctcttgcccatcacggtcaggatgtcacgcagcaccgtgatgttgttgcgttccccgtccgcgccgatcagatacgtctcgcccaagcggcccttggtcaggatggtccacacgcccgtggagtggtcgtctgtgtggatccagtcgcgcacgttctccccgttgccgtacagcttcgggcgcaggccctcaaggatgttcgtgatctggcgcgggatgaacttctccacatgctggaaggggccgtagttgttcgagcagttggagatggtggcgcggatgccgaacgtgcggtgccaggcgcgcaccagcaggtccgagctcgccttcgtcgaactgtacgggctggacggatggtacggggtctgctccgtgaacttggccggatcatccagggccaggtcgccgtacacctcgtccgtgctcacgtgatggtagcgcacgtcgtacttgcgggccgcctccagcaggcggaacgtgccctccacgttcgtcttcaggaacggctccgggttcgcgatcgagttgtcgttatgcgactccgccgcgtaatgcacgattgcgtcatgccctggaacgatcctgtcgagcagctcggcgtcgcagatgttgccgtgcacgaactccacacggtcgcccagaatacccttgatgttctcgagattgcccgcatacgtcaacgcgtccaggaccgtgacatgcacgtcgggatgattgtcatacacgtaatgcacgaaattcgaaccgatgaaaccacaaccaccagtcacaataatattcttgggagtgaaaatctcttctgccatgattcacagcgtacagccacgtacccctaattgacatggtaaacatttggctggcactgtattgtctcggtgcatggttgacgtttgcagcggttttcgatactggtattcgcacgttatatcgagtgcttggccggcgaggatcccgccgatgacggggacgactacgatgatccgtgattcactcctagttccactatttatccgttcgcgtcgcaggaacggtgagcatgcgcttgagcgcgccggctgatatggtgggcacaggcgttcctctgcttttcggttctatttcttggcggaagcagacctaacgggagaacgccccttccatacccgcacacaggacccctggcaacgacgccgaagcccaacccctcaccacacaaactggcgaagactcctttttctcattcagaaacgtccggaaaaccgacaggatcagatttcaaacacagttttaagtcacgaacaagcaaagtgttcatggaaaacccgtgaagaataacctcctaagtgcgcgacggggggctgagtgtgtctgagggggatgcaaaaatcgactttggcagataatgaataggatttggcagttcctgcgcggttcgtattgcgcttgaaaaacaccaattcggggttcatttggagggaaaggacggggttcgcatgctgaccacaggtcgattgattgcaaataaggaccgttatgtcagtttttggttggcgtgattttctccaggacgtcgggcatgaagatcgcgtttattgggcataagaggattccgtctcgtgagggcggggtcgagattgtggtggacgagctggccacgcgcatggccgcgttgggcgagcaggtcgtggcgtatagccgcaaggggcataacgtcgccggcgcggagtttgacaacgagtcgaacatctcggacgcaccttatttacataagggtgtgcaggtcgtgcccgtcacgaccatcgaggccaaggggctggccgcgctatcgtcctcgttcttcgccacgttgaaggccatcaaagcaaggccggacgtgattcactaccacgcggaaggcccatgcgttccccttcgtctcgcacactgggccggcattcgaacggtcgccacgattcacggcttggactggcagcgagccaaatggggcaggctcgcctctctgtatttaaagcttggcgaacagactgcggccacgtgcgcggacgaggtaatcgtgctgagccgtggtgtgcagcagtatttcaaagacgcatacgggcgggagacgcgtttcattcccaacggcattgcgccggtagaatccgtttctcctaacgtgattgctgacaagtggagtctggagaaggattcctatattctgttcttgggacgcatcgtaccggaaaagggcgtgcattacctcatcgaagcgttcaagcgattggacactgacaagaagctcgtgatcgcgggcggcgcatcggattccgccgaatattacgagtcgattaagcaggccgctaccggagatcagcgcattattctgaccgggtttattgaaggacgtgaactcgaagaactgtatagcaacgcatacatatatgtattgcccagtgatttggaaggtatgccgatgagcctattggaggcattggcttacggctgctgctgcctgacctccaatatcgctgaatgcgctgatgtgctgtgtgatgagtccggaatgatgcatggagttacgttccgacatggcgatgtgaatgatttggccgacaaacttggtgagttgctcgtagacgtgggtaaggtacgaaaaatcaagaccggcacggccagctatatcactggccgctatagctgggacaaggttgttcaagcgaccctcaagctctaccgaggagcagataaatgaggattttactggtcaacaagtatttctaccgcaaaggcggcgctgaaacatatttcttcgcgcttgcggagggattgaaagcactcggccatgaggttgcgatcttctccatgcagcacccaaacaatgagccgagttattggagcaagtatttcgtatccgaaaaggactatgtcggcaagatttccgcgttcaaaaaagtgaaggaagcggcgacgctggtgtattccttcgaagcgaagcgcaagtttgaggcgctgctcgaagaattccagccagacattattcatataaataatgtgcatcgccagctcactttgtcgattctggatgcgccttatttgaagaagcaccgtgttccggtggtgtatacagcgcacgactatattctgctgtgcccggcttacacgatggtggacggttccggcaaggtttgcgacgattgccttgaccgtcacttcttccatgcggtgaagaaaacttgtgtgaaaggatcgaaagcgaagagtggtctggcgttccttgaagcggaattcctgaagaaccatcattcttacgacaagatcgacaaaatcatcgcccccagtgaattcatgaagcacaagctggatgagggtggatatgtcggcagaaccgtggccatgcagaacttcctgaccaccagccaaatggacatggcacataaggtagccaacacgaataagttcaataccgttgagccgtatttcttgttctttggtcgactttccaaagaaaaaggcatccttacattggtgagggcgttcctgcgagctgcagacttgatgaatagtggggttgcgggcagcaaactcccagccaattggaccttgcatatcgtcggcgatggtcctgagcgccaggctatcgagaatctcatcaaatcagccggccctgaagctgaacgccgtatcaaactccatggctacaagaccggagaggatcttcagcgcgaggtcggcaatgcccgcttcagcgtgctgtgctccgaatggcgggagaacatgccttattcaggtttggaatccctggcagcgcagactccagtaatcggcgcaaatatcggaggaattcccgagcttgtggtggaagggaaaaccggattcaggtttgaatccgggcaattagatgatttggtaaaccatctattgcaagcgtcagcactcaatggtgatgaatacgcagtcatgcaacaggaatgcggcgactatatcaaacgcagagctcaacaaagcctttatatccgttctctgggggaactatacatgcgttgtttgcagattccaacccagcagaggaagtcgaggagaagaaatgaagaacacaattgatttgcataatgccgctgtgctggtcactggcgctgcgggattcatcggctcgaatctcgcaaggcaactgcttgattccattgaagggattcatgttatcggtttcgataatgtaaatgattattacgatgtgcgtcttaaagaatatcgccttaaccagctctctcattatgaagggttcactttcatcaaagctgatttggcagataaagacgcagtaaatgatgtattcgagcaatatcgccctaccgttgtggtgaatcttgccgctcaagctggcgtgcgatattccatcacgcatcctgatgcttatattcagtcgaatctgattggtttttataacattcttgaggcttgccgccatcatccggtggatcatcttgtgtatgcatctagctcctccgtatatgggtccaataagaaggttccatattccacggatgacaaggtagataatccagtgagcctatacgctgctacgaaaaagtctgatgagctgttggcacatgcctactcaaagctgtatgacattccttctacaggcctgcgtttctttaccgtgtatggacctgccggacgccctgatatggcgtattttggtttcaccaataagcttcgtgcaggagaaacaatcaagattttcaactatggcaattgccgacgtgactttacctatgttgatgacattgttgagggcatcctgcgcgtgatgcaaggtgcgccttcgaagcagacaggagaagatggtctgccggttccgccttatgcggtgtacaacatcggtaacgggcatccggaaaacctgctcgaattcgtcactattctgcaggaggagcttctacgagccaaagtgcttcctgcagattacgacttcgaatctcataaagagctggttcccatgcaaccaggcgatgtgccggtcacgtatgcggatactgcggccttagaacgcgattttggctataaaccttcaactccgctgtgtgaaggcttgcgtcgatttgccgagtggtacaagaccttctacctcgatgactctgataaatagggcattcgattcactattccagtcattcacgtagttcataacacattttacaagaagggatgaaaaaagagatgaaggattttgattcattgaagattgccgttgctggtaccggttacgttggcttgagcttggctacgcttttggcgcagcatcatcaggttaccgcggtggatattgttcctgcgaaggtcgacatgatcaacgcccgtaagtccccgatccaggacgattacatcgagaagtactttgcggagaaggagttggacctcactgccacgctggatggtgaaagcgcataccgcgacgccgatttcgtgatcatcgcgactcccaccaactacgacagcacgaagaactttttcgacacctctgcggtggaggccgtcatcaacctggtgatgaaggtgaatccgaccgcgatcatggtcatcaagtccaccatcccggtcggttacaccaagtcgattcgtgagaagaccggttccaggaacatcatcttcagccccgagttcctgcgtgaatccaaggctttgtacgacaatctgtacccgagccgtatcgttgtcggcaccgacccggaggacgagcatctcgtggaggccgcgaagacctttgccaagctgctgcagcagggtgccatcgaggagaacatccacacgctgctcatgggcttcaccgaagccgaggccgtcaagctgttcgccaacacgtatctggcactgcgagtctcttacttcaacgagctcgatacctacgccgagtccaagggcttgaacacccgcgaaatcatcgatggtgtgtgcctcgacccgcgcatcggcacccattacaacaacccgagcttcggttacggcggctactgcctgcccaaggacaccaagcagttgctcgccaactaccaggatgtgccggagaacctcatccaggccatcgtggaatccaatgccacccgcaaagacttcatcgctgaccgcgtactcgagcttgctggtgcctatggccccaacagtgaatgggatgccagcaaggaacatgagaccgtggttggtgtgtatcgcttgaccatgaagtccaactccgacaacttccgccagagctccattcagggtgtgatgaagcgcatcaaggccaagggggcgacggttatcatctatgaacccacgctcgaaaacggttctaccttctttggctccgaagtggtcaacgaccttgatgagttcaagaagcgctcgcattccattgtcgcgaaccgttatgactcttgcctcgatgacgtaaaggacaaggtctacacccgtgacctgttccgcagggactaaacagcacatataccaatataagcaaggacgtatcgatatgggtgagagtatatgtttcgttatgccaactatggacggtggcggtgccgaacgagtggtctctattctctctggcgaattcgctcgtagtggatgtgatgtgacgttgttcttaactaacagcactcataccgcgtatgctttggacaagcgcgtccatgtcgatacatcctgcgcggaaagcaacccgaatttccttgatcagattaaagctattcgggcgaagatgagagcgatgccgaatacggtatttatttccttcatggataatcaaaatttgttcactctaatagcgggaattggtatgcggaaccgcataattatctcccaacgtaatgatccacaccgtgcttttggaaagcgtcggctggttgcggctattcatccgtggctatacgctcttgcggactgcgtggtattccaaacacaggatgcacttgagtattaccccaaatatgcagctggtaagtaccgtgtgattcttaatcctctcaatgatagcatgctgccacgctatgaaggtgaacgatccaagcgagtggttaccgtttgtcgtttgaatgatcagaagaatttgccgctcgccattgatgcgtttgcagaattccgcacacggttccgcgactataccttcgagatttacggcgaaggcgcactggaaaatgatctaaagcgttatgcagtttcccgaggggttggcgatagcgttcatttctgcggcttccggaaggatgttcatgcctgcattttcgatgccgccatgtttgttatttcctcggattttgagggactctcgaattcaatgattgaagctattgcgttgggaattccgacgattgctacggactgcccaatcggtggggcccgcatgatcattgacaatggcgtaaatggatatcttgttccggttcggaacaaggagcgcatggttacggctatgtgcagtattgcaggcgataccggtgtgcaggaacgctttagcaaagctggcgtgcggttgcgtgaacgtttgtcggttgactctatttcgaagcagtggctttcggccattaaagagaaataagacatcaagaatatcaaggagaaaatcatgaagattttggttaccggtgctaatggatatttaggacgcggtgtggttgatgagttgcttaagcgtggaaacgaggtaatcgccacagacttcgcctgtgaccatgtgaattctgcggctcattgcgtgcccggagacatcttctcgattgaagatccctatacgtacttcggtgagcccgatgtggtgttgcatctggcttggcgcgatggttttgtacacaattcgaatgcgcactttgaggatttgcctaagcatgttgcattcctgaaaaaactgtgcgaatccggaatccagcaagtggcatgcatgggatcgatgcatgaaatcggattccatgaaggcagcatcaacgctcacaccccctgctggccgatgagcatgtatggaatcgccaaggatgcgctccgtaacgcattgcagaccatagcgttgcagaacaaagtaaagttccagtggcttcgtggatattacatcgtcagcgatacacaatatggcagctccattttctcaaaaatcgttgcggcggagatcgaaggcaagaaagagttcccgttcaccacaggtcagaaccagtatgattttctagattatcccgatttctgtcatcaaattgccgcgtcggtgaatcaggatgaagtgttggggattatcaatatctgttctggtaagcccgaaaaacttgctgatagggtggaacggtttattgccgagaatgggttctccatcaaattgaaatatgatgcattccctgatcggccctatgattccaaagccgtgtggggcgatgcttcgaagattacccgaatcctcgatacagaacattgattttccattttttcgcaaaggactgaggataacaatgggtactttgctcgagcaggataagtatcgatacgccgttgagaaaatgcctagattccagcggttatttcgttgttgccaagagtgcaggttcaagcctatgcagttggtgtatcgactgctgtttcgctggtgtcgtcagaggaatttcatcgagttaagccatcaaacggttatcggtggtggcctatatatcggacacccttattgcatcaccatcaatcctcaagccattattgggcggaatgtcaatatccatcgaggggttgttattggccaggagaatcgtggaaagagagaaggtgctcccacgattggtgatgatgtttggattggaatcaatgcgtcaatagtgggaggaataaaggtcgagaacgacgtaatgattgctcctggggcctttgtgaatcgcgacgtgccaagtcactcggtagtatttggcaatccttgcattatcaagcataaggatcatgccaccgagggatatctcaatcataaaagtcagtgacgtggtattgcaaaaagcagggaatgaaatggaagctcacaatagcattagacgctatcttcatcgcatcggggaggaaatacgatctacggcggaaatagcgaaattgacttcatggccagctgcagtggaaacgcttattgctaaggcggatatccaaattatgtgccgtaatgggtataatgagcgtcattatgagtcattaatcgccgatacatcattgttcaaattgacatggaagcaagagtttcccatcgaaatcaatggtgtcgaaacttattatggaaaattgctcaacggcaatttgcgtcgaaattagtttttccagaggtgttgatgattcgcataacgaagaccaaaacattccagtacgcgtggctgtaccttatgttactgattccgggcagctgcgcgatgtcacgctatctgaataccacattggtgtatggcgtgattattgctatatatgccctgcttgcgttgttgagcgccaaatataggaatgtttatgtgctgtcgttttgccttttgcttgcattggcaacgattgtcatccgattgaaaacaggaggtgtggggcccctaacttttctttccaacgcagcgatgctggttgtcacctatatcgcaatgactattgatcggagaatgtttcttacccgattcataagaattgtttgtttctttggcatcatcagtgtgctattttgggcggcgttttgcattaacccttcgctggtgaatgcatggcctgcaacatcattctggacgcagaacttgggaacgggtcaatgggccactgtgcttcatggaaaaggactctggctttactcgtatcttgaaatacacgcaacccgtaattgtggtttctacactgagcctggcgtgtatcagattgtactcaatgctgctttattcgtcctgttattttggaaaaagaaattatattttggtaacgagaagcaatatcgtacggcgaccgtcatcgtcttgctcacactgattacttgccagtcgacgaccggttatctttctatgatggtcattttgttgtgcttcttctttatgcgtgtcagagagcgagacatacgtatgctgaagcaaaagattgcagtgctagtggtcgccattacggcggtgctgatcactgactactggcttcgcggggaagagagtctcctttatgttcaagtgctgaacaaactatttggtggagacattggcgctggtatcaatttagaggatagcacgggacaatatcgttggattacagtgatggctagtttgaaggctctttccatggacccgttcggtatcggttatgacgcattctatgcgatacgagactcatttgacccagctgcagttgccgctagcattgcgacctatgccgcagtgtatggagtgattttctggctggcgatgatgattatgattttctatccaatgattcgacgggaaccaaagaaaatacttattgccgtatttgcttttatgtttatcaattccacggttagcgagacgtatttgttttatccgggtctcatgatgttcccgatttatctcagctcctatttcacacataagcagtccagtgtcgttggacatgcgattgctacacataatcctcgccgttcgctaatggtttccaatctgatgaatgctaaagaggtgatgtaatggaacggactctgctacttgttcccagcggcagcttctattatttcaatagtatgcaacttcctgatgtggtggtttttcctgtgttccgcgaagttcatggcgcgtccgaaatggtttggaaagcaatgaggaagctgaggcttgctgccagctcgctgttctatactgattggtacaaggatttgcagtcgttttccaagatcattgtttttgatcttacggtatggctggatccggcgttattgcgcaacattaatagacataaaaatcctgacgcgaaatgttatctatattcctggaatattgttcgcgacaagcaggttgttcttggccatcttgcagcgtgcaggaagtatggtttctcatattattcgtatgacgaaaatgactgcaagcaatatggattccgcttcaacaccatcatgtatgacgagaacttgcgtctcccggagcgtgctctgacgtcagatatcctgtttcttggttttctcaaggatcgcaaggcaaaaatgcttgctttgcatcaaattatctccgatgctggcatgaaaccggaattcgtaattgttgaaaacggtaatcaacatgaagatttgccattcaccattaggcactcatatgttaattatgcggattatctcgatatggtttcgcaaagcaaggcgattttggatatcacgcagcaaggtcagaacggattctctatgcgcgtgatggaatccattttcctcaacaagaaactcgtttcgactaacatggctctattgtcagcgaatttttatgatcccaataatattctggtcattgatttgcagaaccctgatgaagaagagcttaccgtgttcctgcgttccgagtttcacccatattctcaagagacaagacactactattccgtcggctcatggatcaatcgtttccaacaatgatggtgcagacgcataatggcaaaacacatcaaaaaacatttttggaataagcggccatccgaaggtatgaaatcggcggtagcatacacattcgcatcgctgttttctaaaggtttggcctttgttactgtgccaatttttacccgaatcatgtcaacttctgagatgggcacagtcaatctgtacaattcttggcagtcgatactgacggtcgtggcgacgctctcgttgacttacggcggatatatggtcgcgttgaaggaatatgagcatgagcgcgataggtacgaatcttcagtgctgacgctcacgacgttcacatcaatcgtattctttgccgtatattccgttgctcccaatttttggagtcgcatacttggcctagacaaatcgctgttgctgctgatgctagttggtttcctattgctgccggctacggagttctggctggcaagacagcgttacgagtataagtacaaggcagcaacactggtgacgattggctccgcaattgtggcatcagcactttccactgtcgctgtattgtatatgcgaggaagcggaaaagcggccgaaggacgattgttcgcgaattatgccgtgctatatgctgttgctcttgtgctatgggtatacatcatggtgcgagggcgcaagttcatttccatgcggtattggaaattctcacttgctctgagtgtgcctcttattgcgaatcagttcgccacgcagattctaaataattccggtcgcgtgatgattggttggttcgttgataattccgctgtgggcatttatggcacactttcctcggtgagtaccatttccgcaatcgtatggtcggcaattaattcttcgtttgtcccattcctctatcggaatattaatgattccgaaggcaagaaaagagttcggagcctcgcttcgattctgctgctcacctatgctgcggtatgcgtattgatgactttcctagctcctgaggtggtcaagataatcgcaactgacgaatatatggcagcgatttacatcatgccgccaatttctgcagccattttccagaacgctatttccaatatgtatgcaaacgtgttgttgtatcacaaaaaatcttcatacataatgattgcctctatttgtggtgcagtactgaatattgtactgaatgcagtgctgattcctctatttggatatcaggcagcggcctattcgatgttgactgcattcgtattcttgtcgtatgtgcaaatgcgtgtgtccaaaaaactgcacttcactattacgggaaccaaggaaaccgtatatgatgacaaagccattatcggtatacaatggctggtaattgtgctttccgccattgcgattcctctatatcacttcacgattattcgttatatagcagcatttgtcctgatgattgtctccttcttcctctacaaaaagagcaaaatatctgtctgatatagaaaggaaccgcattgtttgagaaattaatgaatcatttccgtaatgctgagaaaaatgctgctcattaccgaaagctgggtttaaagctgggggggggcttcgagattctcaatggctgggattttggaagtgaaccgtggttgattgagatcggcgataatgtcaggattacatctggtgttagatttgtgactcatgacggtggcgtgtgggtattgcgtcataagtattctgagctatccgatatcgatctctttgggaaaattcgaatcggcaataacgtgcatattggttttaatgccattattatgccgggggtaacaatcggagataattgcatcatcggatgcggcactattgttacgcatgatattcctgcaaattccatcgtagtgggtgtgccgggtagggtgatcgagtccattggtgaatatgcggctaaacatgatgatgattttatgcatactaaaaagatggctactgatgagaaaaaagctttcgtacttggccatctaaaatgatgtgaatctttttgatgagattgttcttggaactggccgaagcaatatagcattatgcttcggccaaggttctagatgcttactttcgaataaacattcctgaacgttccaactctgtaagggattgttcgtaacgactgttgtcggtttcttgtcccagcacccattcgcaaaactcggtcaaaccttcctgcaaggaaatcgacggagtgaaatcaagcagctttcgtgccttttgggtatcagcgacattatgtgcgatgtctccgatacggaaatcaccggtaacgttcagattactggtactgccatagattcgtttcactgtctcagctatttcgatgacacttgttccgattccgctgcctaggttgatgatttctccgttcgatacggccgtattgatagatttgataaccgcggaagcaacatcctttacgtggatgaagtcgcggctttccttgccgtcttcaaagatattgatgtctttattgtccaaaagcaatgaggagaagatggaaagaatgccagtgtaaggattcttcaatgattggcctgctccgtacacattttggaaacggaagatggtgtaatcaatatccatcgcagggcacattgtctgaatcatcatttcttgtgaaagtttggtgaacgcataaagagaatttggggtggttttactgtcttcggtggtgggaattaaggtcaagacagtattgcacttgtcgcaatgcatagtgaaatcgccttgcatcatatcttttgttttgcgtccacgggggtagactacgccacagtttgggcattgatacttgccttcgccatacacagaacgcgatgacgacaggatgactttgcgtatagtgttgcttttccccttgagcgatagtgcttgaaaaatatttgacaaacccatgacattgacctcgctgtactggttgatcatgtacatggattgcccggtaccggtttctgccgcaagatgcaaaacaacatctaccccttccagggctttctggactgttgtgaaatcacgcacgtctccacggatgaaatcacaacaatcttttatggattggaaaagatatgacttttcaggattgttgccatgaatttgtttggtcaatgcatctagaacgcgaatttcgtattcatcatgagcgctcagttgttttacgatctcgctaccaataaaacctgcgccgcctgttaccagaatcttcgttgtcatatgtcttgaaccgttcttttgtagaaacttgccctagaaggagggtatgctttcagtgtagttcaaactatctcatttggtatttaccttcataggcgacaattaggtcacattagacatcgactataaatcgaaccgctacgtcttcctctctgattatgctgttttcagagtcgagagtgctcatgaagtttggattacgaaggagtcaccatgtttggactaggccgcattcgagacagatactacagatggtgtgaatccgtgaagttcctttcgcggaacaaagggatgcgtgccggcaaaaacctggatctgcgactatctcagtatattcactgtgctggttccgtagtccttggtgataattgtcgtctttattgctgggatgcttcgcacggtaagcccttcgatcgtgaacctgaaattcgcattggagaacgagtacatgtgactaggaatctcactttgcaatgtacctcagaaatcatcattgaagatgacacactgcttgcttctgacattgtcatgattgattacaaccacggtatgtctccgttgccagattcctatctggacaacgaccttgaactcacctcgggaatccatattggccgaggtgcatggattgggaataacgtgattatcttaggcggcgttaaaatcggagaaaagtcaattatcggggcgggatccgtcgtcactaaatctattcctccatattcaattgcggtaggtaaccctgctcatgttattaagcaatataacccctctaccaatctttgggaatccatcagaacaaacaacgaggtcgatagagctgcttcgaagacgatgtgaattcgattggttttgtcgtaagtctttatgtccatcaagagaattcaacagactgtccccttgcggaaatatatgctagtgtcctgcattggaagttcgttgttgaattcggtggtctagatgccggtggtgcactgggggaatcaggcgagggaggagaggatctggtcggcggtcttggtccacttgaacggccgggggttctcgttccatgccctgacccactcacgcacgtccctctccaatgcctggacgctgcggtggtcgctgcgttggagcatccggcgggtgatctccgcgaacaggcgcccgacctggttcagccagctcgaataggtcggcgtgaagtgcatgtggaagcgcgggtggcgtttcagccatgcgttcacgctcggcgtcttgtgggtcccgtagttgtcgcacaccacgtgcacgtcgagcccgtcgggcacctcggcgtcgatcttcccgaggaacgagacggactcggcggcccggtgccggcggtgcgtggcgccgatcacggtcccgtcggcaacgttcatcgcggcgaacgggctcgtggcgccgtgccgcacgtagtcatgggtgcgccgctcgggcattcccggcatcatcggcagggccggccgggagcgcccgagcgcctggatccggctctctcgtccacgcacagcacgaccgcgctctcgggcgggtccatatgcagtccgaccatgtcatgcaccctgtccgcgaacagcgggtcgttcgacggcttgaacccgtcctccggatggggcttgaggttgagcgcgcgccagatgcggcccgcgctcgacctgctgatcccgatgcgctcggccatcagccgccggctccagtgcgtcgcgtccctcggcgtctcctccagcatcgccgccagcaggtcctcgaccatccggtcggtgatcgtcgccggtctgcccggcctcggctcgtccggcaggccgtccagcctcgactcgaggaaccggccccgccacttgcccaccgtcggcaggctcacgccgacccgttcggcgacctccttgttcgacagtccctccgcgcacgccagcacgatccggcaacgcaacgccaaagcctgcgacgacctgcggcacctggcccaacgctccaactggtcgcgttccccgtcgctcaatgtcaacccgaccctgggccgccccgtcctcgccatacgccagccataccagaatcagtaaacgaattaaagacgcagaataccaggctttcttttctcccatcctcatcgacttcaccggcggaatcgcaacgggaacgtgaccagcgacaaacaccaccacgctgaatctcgcgccctctgcaactcgcatctgcggagcgactaaaacttacgaaaaggatagtaaacgatacccccatacctagcaaaagtggtgtctctcattaagaaacaccctttcagccactctgatccgacgccttacacgactggtaacggcaccaattgaacgcatcttggacctcgtgctcagattggcaacagacagcgttgctcattgctgagcagctcacccaatacgcgctttttcaccaatccgtcacaacacgggcggcaacgcggaacaacatcgtgcatccttgtttatttgcaccgactgtggacttgccctctgagttgcttagaacatggcggcatacacgaaatctcttttgcctgccatttgcttctcttttgattctcttttgcatctaaaagcaaaaccaagatggacgtggattggtaccgccaagaattcgacataccccagacggcatcaactcaacagacgctccatttacttgccagcgaacagcttatcatcgcccaagatgcggggaactacgccatcaccaatcttgatgctctcctattcgctcgcgatttcaatgatttcccaaccgtggcgcgtaaagcattgcgcgttattcgttacgatggtccatcaccaatctccccatctcgcagcaaaacttttttctcagggtatgccaagttggatcaagcgttggaatatgtcgaagcactgttgcctgagcaggaagtcattcaaggtgtacgacgtgtcaccctgaggatgttcccacatatggcacttcgtgaattgatggcaaatatgcttattcaccaagatttttctattaccggtaccggacctatgatctgtattttcgatggccgtatcgaatttactaatccaggaagttctcttgtagatgtcgccagattgcttaatgatcttcctcattcgcgcaacgagaaaatggcagctatttgccgatgactaacgccagccttcgcaaaagatttgatttgccggcgagtggagcctcccaagtatccaaacttattaaaacctgcatcagtagtaatctattgaaaatagcagatcccgatgccggtaagcgatatgtcaggtatctgccatattgggcttaatgaggctattcttcacacaagcaagaataacttcgagtaaacagccgaaataagccaatgcacaatcaccatgatcggaatactccaaatatatgagtcatcagaattctcgttttgatttaagccttggcacggcagccactgcccataggagtagtggaagggcataaaaggcatatccttcgcactgcacatacaggtatatggtcaacagcagccagcagacagtggtcttgttccaggcatggttatggctaatccaccacagcactagtaccacgagaattactgaggcaatcaggccgaactccacgaaaaagctggtgtaggcactcatcgtgaacatgtttgctggtgtcacttgtgcgtaccagcccttcggtgccgaagcgttcaggcccagacgttccagagaccgcactgcggcatcggcaccctgatgggtggcatcggatagattgcctgcgccatagccgagcaacaactgctttggatgcttcaacgcacccgcgcctggtcccagtgactgccataaacgggcatagaacgaaccgtcaccgtcaaagccaagctcggctatggagctcaaccgatggttcactgccacgctgcatgcgccgagaccgaccgtgaccaccagttccccgaacgccacaagccggccgcgccacgtgtgccaactgttcatctcgataatcacaaacaccaacgcgataatcgagtcaagaatgatgcgcacgcctgcacccatgagcaccgagcctgcagcgaataccatgataaggacgcgcagttggtttgcacgcttgtggtcacgaccacgcaccagccagatgagcggcagcagcacaccgaacaggtgcataccgatatagctcggttctgcgaacagaaactgcgggcggccaccgccccaatgcgaagtgctgctgatgtactggcggctcatcagatgaatgaagaagttctttacggaagtccaatcaaacatgattgacaaccgctgcaccacgccgactgcgaaggcgaaccaatatacgagaatcagcagatccaccatgcgccgccaagacaagcgcttgatacgtaatgccatgtccaacgcacacaggcaggcgagagccccagccacgccggccagcgacaccagcgccggaagccggtggaatgctaccagacaccaatccactgcagacaacgcgattaacagcaccggaaacaggaagaatgcgcggaaacggtgccaaacctgcggcagcaaacgccagttcgctaccgcatatgccataaacaaccacggagaaagcggcgtccaaaacggcatgtatgggcctgctactgtgccgtcaatcggcagcatggcgagcgccgcatagaacaagaaatctgaggaatcgaccaatatcggtcgatcattatcaaacgagacgccggctttcccgaaatccgcctcggcgatgccggcaatattagaatcagtcactcattactcccactgtcatcacccaacagcatgccactgtaacggacaaatcgtatcgggagatgaaaccggcgtgagaatgacgtgaatacttacgtcttacgtcagcttgatgtcagaccgtgtaagcatactgccgcgtgatttgagggcgcaccggagcttcctcaacgcggtagtgcttgcgcatgctggtcaggatggtgcgcagcgctttgttcgtctgctctgctgcggtacggaactttgcgtattccttgccgtgcggatcttcaatatcctcgggttcgggaagcatgggccgaataatggaagcagagtcaatcactgactgcaagcgttcctgaatggtcaagcccttgaccagcccgttgcgtgcgcagtactcgcacatgttggcgaagtcacccaataggaacgtgtatttcacagcggtgggtgccagcgtgacgatgtctttgcgctgatccttttcaaagcacaggatcagatcagctgacttggccatcggctgtgtcaggcgtcgagagcggaacccactcggttcgatgcccacgctctccatgagcagggcgctgttggggtcaatctggtgcatgggcaagccatgcgtgcccgcgctggaaacctgcactgtggtaccggaaaggtagcgggtgagcagcaactcgcccatgggagaacgacaaatattgccggtgcagacgaacataatgtgcatgggctcagtccttcttcatacttacaacgctaccttgcgggcctgcgtacaaaccactagcgtcccattctagtccgatacgtcggactgcggccaatccgcgtccgcccaccaccacttcatcttcacatgaatgttaca

SEQ ID NO: 3114 - DNA, 3858 bp, Unknown
  R215_18m  MAG No. k141_20403
gatgggctgaccgtcatatctgatcacatgggaatgaatccccaatgattcagcgggaaagtgggcgtccgcgagaactatagtatcgccatggcccatttcactgagaatcttcaataaatcgggctgtatgatcgacgggatccctttcagcatagctgctcctgcttgtcttcagacttatttgattgttacttgcctagaatgctctggatattgcggtactgttcatcggtcagctgcacggcgggctcgtggacggacgtgtcgattggcagtcccttcgccttgaccgcgcccttgatggcgctgatgaacaggtcggcagtgtcgtacaggcgcatcagataggaaatgcgctcagccgacttgatggccgtggcatagtcaccggactgccatgcacgatgcaggctgacgaaagtctccggctccacgttggtcaggccgctcagcacgccattgccgccgctgattcggttgacggtgtagtattcgtcgaatccggacagcacgctgaacgacgggttcaccttgcggacggccgcgatgaccttcctggtgtgactgatggtgtcgacggtgtctttgatgccgatgatgttcgggttctcgccggcgagttcggccaccagttcgggcgtgaggtcgttgcccgttcgggccgggaagttgtacaggatgacgggcagggtcgtcgcctcggccaccgccgagaagtaccgttttgcgcaatccggggacgggccgaagtagtacggggacacggcgagcagtgcgtcgactccggccgcttcgctttccgccgccaacgccttcacattgtccaagttggtgtcctcccacgccgacgagcaccttcatgcgtccagcgactttcgagacggcgaaacgcaccgcttctgccttcgtcttgacgtcgatggcgtagaattctccgatactgccgaacagcaacacaccgtcgatgcctgcgtcgatgagatgatcgaggtgcttgccccaattatcgtagtcaatggtcccatccgcgttcgtgatggtgatggaagggcagaacacgccttcgaattgggcgttgcaagtcatgattttttcctttcgacgatatggtaggcgttccgcgtgcggtggcgaatatgtccgcgggccgagcggtgttggagcgatgaatcgaaaacaggggatccggacacgcgaacgcgaaccgatgatcccccgtgcggtatctcctagccgagtgcccgatcgaggtggacgtatccgccgtcggggaagacccattgtccggtggtgtgcgacgacctgtcggacagcaggaacgccacggtgtcggcgatctccgacgtctcggtcatgcggtggccgagcgggatcttgctggtgatcttctcaagctgcgcgcgctgcgcctgctcgtcgccgaacgtcttgatccactgtgcgtacagcggtgtccatgcctcggccacaacgacggcattgacccggacctcgtccggggcgagggcggcggcccattcgcgggtcagtcccagaatcgcgcccttcgcggcggcgtaggcgctggtcttgccctgaccggtcaatgcggtcttggaaccgatattgaccaccgagcccttgctggccttgagcgccggcacgcactgatggaccagctcgtagtagtgggtcaggttgccgtgaatcgactcctcgaactgacgccacgacgtggtctcgagcgcgaggttgtcatttcttccggcgttgttgaccacgccatcgatatggccgtgcttctccatgaccgacttgacgatgggggcgatgtcgtcggtgttgttcaggtcgatcagatacgtgtcatacgagtcggtgatccgttcaatgtcctgtcggaattcgtcgccggcgccgtcatcacggttcagcaccacaggaatggcgccctcctcggccaagcgcagcgttatgcccttgccgatgcctttgaagcctccggtgacaatgatcaccttgtctttaagatgcaggtccatctcaggtcctcccgaccggtcagtccttgtgcaggtacttcatgcattcgtcgatcttcatctccgtgccgttgcccggagtgagcggagcgacgtatcgtccgttcttgatgacggtcggatgcacgaagtattcatgctggttgtccacgtattcgacgacgcggtcctccatctcgccggagacggacacatagtcgaacatcgcgagctggctgacggcttcgcacaggccgacgccgcccgcgtgagggcagaccttgacgccgaacttcttggcgagcaggtattcgaggacgatctcctggggaccggcgactcgggtggcgtcgatctgcatgaccttgaagctgccggcctgcaggtactgcttgtacatgactcggttctgcatctgttcgccggtggccaccggaatgggatcgatggccttctgaatcgcggcatggccgagcacatcgtccgggcaggtgggctcttcgacccatgcgaggtcgtagtccttgaatttgccaatccattcgatggcctgcggcacatcccagacctggttggcgtcgacggcgatggcgatgtccgggccgaccgcttcacgggcgagcttgagcctgcgcaggtcatcctcgaggttctggccgaccttgagcttgatctgcttgaagcccatgacctcggtctcctgcttggccaggcggaccatcttctcgtcggaatagccaagccatccggcggcggtcgaatatcccggataaccgacttccttgaggtgggcgatacgctccgccttgccttcctgggcggcgcgcaggatatcgatggcctcctgcggagtgagggcgtcggtcaggtaacggaagtcaagcgtcgcaacgagctcttcaggctccatctcggaaaggagcagccagagcggcttgccggcgcgcttggctttgaggtcccacaaagccaaaagcacggcgccaatggccatatgctcgacgcccttctcagggccgagccagcgcagctgcgaatcgcgcacgaacagatcccatgcgagacgcatgttgtcgagcagttcctcgacgttacgaccgataagggtctcggacatggagtcgatggcccggacgacgacatcgttgccacggccgatggtgaagacgaatccattgccggagtcaccggcatcggtggagacgacgacgtaggcggaggaataatccggatcagggttcatggcgtcggagccggagaaggtggccgacgtcgggaatcggaaatcataggtggtgactttggtaataacgctcacgatgcgcttccttctttggaaaatggttaatctcaaaaagggaggacggccattcggccgccctccctagcagtggcgggccggatgtcagtcggcgtcggtggtgaccttgaagccgttgtcctttgcgtaggtcttgagcttctgctgagccttggccatagcgccgaccatgtcaccgccaaccttcatttcaggagtgatgacatccttatatacgactccaacctgagacatgaacggaagatactcccaatcagtattgaccttgtccatggactcgaagtagacggagttcacgtcagtattgacaaagtatccatctgtttccttcatgttgcggatgtcttcgctattttggtaagcagaagctgccatgaagtagttgccgtggttgttatcctgccaagactgaattgcttccttgtcggaatcaagccaattgatgaaggcaagggctgcagcctgcttgtccttagggcatgccgcggaaacactcatcatggagccgacggaagaagacttgaaatcatcggc

SEQ ID NO: 3115 - DNA, 15914 bp, Unknown
  R215_18m  MAG No. k141_21411
ccgtccgcctgaaccgcaagatgcggtccgtggcggacgggcctgttcgttcctgcggtcggcggtcatgaacatacccatgtcggttccggcagtggggccggaaccggcggcgtgtcacctgtcggcaagtgattatctaatagatagataaatccatgctctgggttcttaaggagaagattaatgagcaacgaaaatgtcgcggacggtgacgtccgcaggaagggcgggctcggccagcgcatcgcctacgcgtgcggcaacttggggcaggctgccttctacaacgcaatgagcacgtacttcgtcacgtacgtcaccagctgcctgttcgtcagctacagcaaggctctcgccgcccaaatgatcgccgtcatcaccggcctgatcgtcgttatccgcatcgccgagatcttcatcgatccgctgctgggcaacctcgtggataacaccaccaccaagtggggccgtttccgcccgtggcagttcatcggcggactggtctcctccgtgttgatcgtgctcatcttctccggcatgttcggactggtcaacgtgaacaccacgctgttcatcgtgctgttcgtcatcacgttcatcgtgcttgacgtgttctactccctgcgtgacatctcctactggggcatgatcccggcgttgtcctccgactcccacgaacgttccacctacaccgcccttggcaccttcaccggctctatcggctacaacggcatcaccgtcatcgtcatcccgatcgtcagctacttcacctggacgttcaccggcgccaagggccagggccaggccggatggacctccttcggcttcatcgtcgcgctcctcggcctgattaccgcctggaccgtcgcctttggcaccaaggaaagcaccagcgcgctgcgtgccaaggcccagaagaacggcaacccgttcgaggcgttcaaggcgctgttccagaacgaccagctgctgtgggtcgccctgtcctacctgctgtacgccatcgcaaacgtcatcacgaccggtgtgatgtactacctcttcgtgttcgtgcttgacgagcctgccgccttctccatcaccggcatcatcccgctgatcgccggattcatcatggcgccgctgtacccgattctcaaccgctggattccccgtcgctacctgttcaccggcggcatggtctccatgattatcggctacacgatgctcgccctgttctccagcaacctgccggtcgtcatcgtcgccctgatcttcttctatgtgcctgcgcagttcatccagatgaccgcgattctgtcgctgaccgactccatcgagtacggccagctgaagaacggcaggcgcaacgaggcggtcaccttgtcggtgcgtcccatgctcgacaagatcggcggcgcgatgtccaacggtgcggtcggtgccgttgccctcgcggctggcatgaccggtcatgccacggcagccgacatgaccgcgtccaacatcgccacgttcaagaccttcgccttctacgtcccgcttgttctcatcatcctcagcctcgtcgtgttctggttcaaggtcaagatcgatgagaagatgcatgcgcagatcgttgaggagctcgaagccaagctcgcttccggcgagatcgtcgacgatgaggcgcaggtcgtggaggccgtcgaggccgccgacgatgaggcgcaggcagttattaagaactgatatcccgttcccatccctcccataaggcccgtccgcctgaaccgcaagatgcggtccgtggcggacgggcctgttcgttcctgcggtcggcggtcatgaacatacccatgtcggttccggcagtggggccggaaccggcggcgtgtcgactatcggccaggagtgtctatcagctagtatcagctggtatccgatatgggccgtggccctgcgccgcctgccaaaggagataaccgtgcgtgcatgacgtgacttcgcatggccaaaactgctgaccgcggacggacgcggcatcgctttcggtggtgactatagtcccgaccaatggccggaggaaatctgggatgacgacatccgcctgatgggccaggccggcgtcaacaccgtggcccttgccatcttcagctgagatcgcctccagcccatcgaagaccattgggatttcgactggctcgatcgcgtcatcgacaagctcggtgacgtgaccgtcgccggaccgcatgtgcaggtgcttgcctcgtatgccggcgaagaagcggatgagtgggagcttgacggcatggccgcgatcacccgcaacacgtacggcgaaggggaggcgtatttcctcggctgcgatctgggcgtgagcgatctgacgcgattcgtgggaggctggcttgccgcgcagccgcaggatggccggcagctggcagccaacctgcggtcgcccgccagcggcgtgacctctgacgttctgcacaccgtgcgtcaatccgacgacgccatattcgacttctatctgacacgtggcagatcggatgtcgaactgcgcgacatcgcaggggagccgatcgtcctgttccgggcggaacggggcagtgacggcggcgcgtatacggtgcatcgcaatggcgttttcgtgacgaagcgcccgaacccgtcggtgtagtcagttgcgacgaaacaggagggcggagccgcggacggttttgtgagacggtccgcggcctcaccgttggaagccgcggactcggatcatcagcaacggacgcgccgttgatttccacttccggagcaacgatggtgagctttgccgcgacgagatgctgcaggacggtgccgacgtacatggtgcccggattctcccttcgccgctgcgctgcctgccgcagcagatgttccacggccgcatcaacggaaagtgagttgtcggactccagcttgaatggtttgctggtgaagaacgcctgaattcgtttgacccagtattgctcgatctcggtgaattgctctgctgtcggacgtaattcattgatgagctcggcatagtcatgcatcagcgccatggtgccgcggctggttcgtcccttaaaggttgaaccgatagaaccgtcattcattactttttcaacgataccgacacgctcattcgattgtgtccaatactgctttctttctgcatgaacaacggtactcggcaaggcggtaacgatagtcgcaaaggctaagaagcccgtacataatcgtttttttttgtagtgtttcagattttcagtagaatggcgacagccaaatcccgctggcttgctagtaaagcgttgtcctcggggggagttttgtttgttgttgaaagataacgcggcatcgaatagataggggaggcccggcatgggacgtcatcagcgtgcagaaacctccggactcatctccttcttgatttgcgccatcgttggcgcggtatcgatgaacctgtacatggaatacgcgccggccatctggcagctgacgcaacgccgattcatggtatgttcgggcatcgtggcggcatgcggcgtcatttccttcattattggctatgcgcgcaaatcatgttcattgaacctcaaacatggttggtttgcaccgattcgtcgcattttcgaaatcgtcgccctttcggtggtgtatgcctcgaccattttcctgtcgtcttttgcactcatcggtgcggccaacgacatgatgggcaatgccatcttctccggctatatctccagcgtctgcgccgccttcgccggcgtggtggggtacatgacctttgtacaggcggagatgatgaacgccaaaactattgccagtctgttgccgttcttcgtcatctccggcgtggtcaccgccggcatgaccaccgacgacccatactggtatcacaacaacttttcgcagctcggcgacagaaccacgtttgcggcccgtatgttcaactccacgctgattcttgccggcacatgcatcatcatcgtcagctacttcgccatctccgaactggtgaccaccgaacggctacagcgcctctggcacgaccgcaccaacagagatccgaatcgcggctacgaaatcccacatttcatgctgcgcatctccattctgtccttcctgctgatggtggccggcctggcattcatcggcatcggcgtgtttcggtacacgccacacaatctcttgcacaatatatgcgccaaaggcctgccgttcgtcatgctgctgctgttcgtgctcctgccgtggcttgcgccacgcctgtccaaagcagtgatggtggcctccgacctgaccgcgctcgtatgcgctgcattctgggtcaatatgatgatgggtcacaacaccctcaccaatgtggaggcgttggctggtctggcgttcctcggctggttcatcgtgttctcgcgccagatcgccgccatcgaggccgatcgcgcggccgctcagttgttgcacgcgcaggccatcgaaggcggttttgagcagccgtcttccgcacctgatcagcagatcgaatcccgcatcgctgccgaccggtgaataatttgtttgatagatttggccttatgactgaacgactcacgaatctctggcctgccccgctcgccgcacagccgttgaacgctacggtaacggtgccgggcagcaagtccctatccaaccgctacctgattctcgccgccctcggcagcaagcccgttactctgattggcctgctgcgttcgcgcgacacggaccttatgatgggcgcactcgaagccctcggtgtccgctgcgacgtagattccgcaaccgacaccaccgtaacggttactcctcctgtatccggccgattccatggcaacgtcaatgtgttctgcggactggccggcacggtgatgcgtttcgtgcccggccttgccctgtttgcagatggcccagtgaattttgatggcgacgaacaggcttatgcacgtccgatgaagccggtgcttgacggtttggaacagctgggtgcaacggttgattaccacggcgaggttggccgtctgccgttcactattacgccgcctgcaaccttgccggctgcccaggcgcaggtcagcatcgattcgtccggttcttcccagttcatctccggcctgttgctgattagttccaaactgcctggcggtctgcacctcgcgcacacgggggagaagaccccgagcctgccgcacattcgcatgaccgtggccgatgtgaccggtgccggcggtgcggttgaggccgacgaatccgcccgcacatggacggttgaaccgcgcgcaatgcaactgccgagcaaggtgaccgttgagcccgatctgtcgaacgcggcgccattcctcggcgcggcattgatcgccggcggcacggtccgggtgcctcattggcctgaaaccaccacccagccgggcggcctgttgcccggatatctggagcagatgggtgccgaagtatcgttcccgaccatcggcggcgtgcgctattgcgaggtgaccggtgacggcaccgtgcgtgggctgggtacgttcgatttgacggcggccggggagattgcgccctcgttggcggcgattctggtgtttgctgataagtcgacagacatggttggtattggtcacctgcgcggccacgaaacgaatcgtctggaggcattggtcaacgagattcgtcgtgttgggggagcggctgaggaattgcctgatggattgcgtatcgaaccggtgccggcggagacgttgcacggtgccgtgatggaaacctatgctgatcaccgtatggccacgttcgccgcgatgctggggctgcgtattcccgatatcgaggtcatcaacgtggccaccacgcgcaagaccttgcctgatttcgtcggtatgtggagtggcatgctgaggcagtaaggggtcctgtgttctggtggaactcccctcagtccgctacgcggacagctcccctcagagaagggagccaagttatagggcctggatcccctctctgagtggatctgtccgccggaggcgactgaggggagtatgacgcaggggtagtggtctcttgaccatatacgaatgggggctgattccaatcggaatcagcccccatagtgttgcaactagagattagtgagatgcctaacggcggttacttacttggcgaaggtgttgccgtaggtatcggtgccagcctcggcgattgcggcggacttgcgggcgatggccagttcttcgttcgtcgggatcacggcgatgatcacggaggagtccggagtggagatgatgcgcggttccttggagcgggtggcgttcttctcctcgtccagcttgacaccgaacggagcgagcttgtcgcacaccatcttgcggaccacgtcgtcgttctcgcccacaccagcggtgaaggtgatcacgtcgcagccacccatctggtaggtgtagttgccgatgtagctgacgatgcggtgcacgtagacatccagagccagcttggcgtcctcgttgccttcggacaccagacggtgaacctcacgcagatcgccgtagccggtcatgcccatcatgccggaacgcttgttgaacagggcatcgagctcgtccacgttcatgtgggcgttgcggatcaggtggaagaccacagccgggtcgatgtcaccggtacggccacccatcatcaggccctcaagcggggtcagacccatggaggtctcaaccggcttgccggagacctcagcggaagcggaagcgccgttgccgatgtgcagaacgatctgcttcaggccttcagccggcttgccgatgacgtccggcaccacggaggagatgtactcgtgggaggtgccgtgggcgccgtagcggcggatgtggtactgatcggcgatttccttgttcagcgcgtaggtgctggcggccttcggcagctggaagaagaaggaggaatcgaagacgaagatctgcggaacgtccggcagcagggagcgcatgacttcggcacccttggcctccgggccgttgtgcagcggggcgagcacagccagatccttgacctggttgatggtcttgttggtcacgagggccggcttcgggaagatggagccgccctgcaccacacggtggccgacggcgacaatgccagcctcagacaggttcgggccgtactcctcgaagaagccgagcacgcgcttcagaccctgctcgtggtcgtgaatcggctcttcaagctcgtgcttttcgccgttgtactcgtgcttgtagtggccgtcgaccggctcaccgatcttctcgacgaggccggaagcgaggccttcgccggattcgagatcaaccagctggtacttgatcgagctggagccggaattgatgacaaggacggttttcgccattgtgggcatcctccattgtgattgaatgttcccgtgagacacgggttaccgttgattagattactcgttgcttgctacaaaataagcattacagtggctcccgctggcgggagctaagccgggctcactgcgcttcgatggcggtgagggcgatggtgttgatgatgtcctgcaccatcgcaccacgggacaggtcgtttaccggcctgttgagaccctgcagcaccgggccgatggccaaggcgccggaggagcgctgcacggctttgtagccgatgttgccggcgcacaggtccgggaagacgaacacgttgacgtgtccggccacatcgttgcccttggccttggtggcggccacggtgggggaccaggcggcgtcgaactggatggaaccgaccaccggcagatccggagccttctccttgagcagcttggtggcttcctcgaccacgtccacgtccgggcccttgccggagccgagggtggagtaggagagcataccgaccttcgggtcgatgccgaaggcgcgggcggtctcggcggactgcagcgcgatctcggaaagctgctcggcgtccgggttgaggttgatggcgcagtcggcgaacacggccacatggtccttgaagcacatgaggaacgcgcccgagaccagtttctggcccggcttggtcttgatgacctgcagggcggggcgcacggtgttggcggtggaatgcacggaacccgaaaccagtccgtcggcatagccgagcaccaccagcatggtgccgaagtagctggcgtcggtcagttgcttgcgggcctgctcctcggtcatgcccttcttggcacgcaactcgcacagcttggcgaccatgggcttcaacacgttctcgtcgtccatggcctggaagcgggcgcgccccagactgttcagccccagttccctgccgcgggccaggatggcgtccttgtcgcccacgatgatgaggttcacgatctcgcgctcaagcaggtagtcggccgccttgatgatgcggtcctcctcgccttcgggcagcacgatggtcttcttgttgctcttggccttgccgagcaggtcgaattggaaggcgtacggcgtgaccggcgcggtgacgtccacgtcgagcgcggcgagcacctcgtcgatgggagcgtgcttgcggaaggtctcaagggccagatccttggtggattcgtcggtgaagggcacctgcggcaaagtccagaccggcaggccgtatttggcgagggtctccttgacggagaaggcgtggcgcggctcgcagccggtcacgaagatgccgagcaccgtattgcccgcggcgcgcatgccctcgatggacagcttgacggtctcgtcgagctcgtgcggccatcggtccatggtgcacacggccaggaacaccccggccttcagatcggcggcgacgtccgcgttgaactcgtaggtggtcgggtcgttgacgtgggatttgtcggtgccgacgatcagggcggcgttcgcgcgggagacctccatggcgtagttgaactcgccgacgatgtctccgcgggcggtgtccttgtcggcgcgcaccttatgcacgtcgaggccggtggacagggccacgccgagtcccgcattggaggcggcgagcaggatcggggtgaattcgtcatggttggacacagcagggcggaacaccatggtcttgtacttggaagtcaatgcgttgagcacgccgtaagcgacgacgttgcggccattggcgccttcagggctggcgatatatacacgggtgacggtcacgatgtttttgtctcctttgatgatcaacacgatagggaccacacctcattgtagtggcgattactgttatctctcacgccggtgtcgcgccaatcggaagagcgtccccttggcgatactttccggggaaagtatcgcactgcatgcattccagtccctgttttgcgacgcattcccgggaatgttgcacaaaagtcgcccgataggatagaaaacgaaaaaggccggtgtgtgaagcaccggccttgattgtggagctagggggattcgaacccccgaccctctccatgccatggagatgcgctaccagctgcgctatagccccgagtgaagctatccgattcatgggagtcacaagacccgccacgaaccagcggagaaaccaccatatcatccgatttgatggcttcgtcgtggagctagggggattcgaacccccgaccctctccatgccatggagatgcgctaccagctgcgctatagccccgttttcaattgttggcccgttgttcggacctcgtatacattacgacgagatgtcgattctggcaaaagccggcgtgtcgccaaatgacaaaagtgtgatttggcgacactttttggcttgtttccgccattattcaggcattgagtcattcagttattgcttgaacggttccgaatgcaccggacctattggattagcaggggagtcgggaacatgatcagcgttcgcgttcccattcgtcggtgtcggcgatggccggaccgtgattgtagtccagcagacgccagcgcacagtgccatcgggattgtccatcggcaccaagcgcacccagtgcgcattgcgcaatgtgaccaccgtggagaaggtcggatcgatcgcggaaatgcccaacagggtctgcaatgtctgcgcgatccatgcgccgtgcgagaacacgaacaggtccgtgtcgtctccggcacgcgtggaccagtcctcaagagcctccacaccgcgtttgcctacggcttccttgggttcggcaccatacttcagttcaccgccccgagactccatccaggaacggaagtcctcagggtagcgttcggccagttcagccacggcatggccatcccagtcgccgaagctgcgttcacggacgcgatgatcatcgacgggctcgattccacccaatacgtcggcgaaagcctgcgcggtggcgtgcgcacgcttcaaatcggagcagacaatgaaccggtggttgatttccggccgacgatcgacgtacaggcttttcaaggccgcggcggtctgcttgacctgccattcacccacggcgtccagcggaatgtcgacctggccttggagcttgtgagcggcgttataggaagtgcgtccatgacggataaggaaaatggaacgaacatgattggccatagtgacgatcctttcgattccagtgaggaaacagggaaaagggagggctgcctggtgccgtcaatgacgttcggcaacaggcagcccgacacacgagtatcagcgagtatcagcgaatatcagcgttatgtgattcgcacgttacgcggtggtgacggcagcagcgtccgcatgctccgccgtttccgggtgtgcgagttcaagatcgatggccgggcagtcgcgccagagtcgttcgagcccgtagaattcgcgcgattcctcgtgcatgacatgaatcacgaaatcaccgtagtcaagcagcacccactggccctcggtcaggccctcgcgagagcgcggctgacggccggagcacttaaggaacaggtccttttcgatttcctcggccacggccagtacctgacgctcgttggaggcgccggcgatcatcatgatgtcggtgatgccgagcaggtcggctacgtcgaaggccacaatgtcggtggccttgatacggtctgcggcctcggcggccacgcggacggcgttgatggaatcctgaagtgcgggcatggttcagcgctcccaggcgggcttccagccctcgacgttgtgctgcgtgttctcggagtagaccatcgtgtcgctcggcacggcgtggcgcaccacggagccggcaccggtggtcacgttgtcgccgacctcgaccggggccacgaacaggttgccggcgcccacatggcagccagagccgatggtggtgcgattcttgtgcacaccgtcatagttggcggtgatggtgccgccgccgatgttggtgtggtcgccgagctgggcgtcgcccacgtagctcaggtgcggcaccttggtgccgttgccgatgtgcgccttcttcatttcgacgaacgcgccggccttggcatcctcgccgaactcgttgcccgggcgcaggtaggtccacgggccgatgttcgtgcgtgcgccgatgtgcgattcctgcacgcgggaacgttcgaccacggcaccttcgtccacggttgcgtcaatgagggtggtgtacgggccgacgatggcgtcctcgccgaccaccgtgtggccttgcaggaaggaaccgggcaggatggtggcgtcgcggccgatctggacatcgtcctcgatccaagtggtttccgggtcaagaatggtcacgccgtcgcgcatccagcgctcgcagacgcggcggttgtaggtcttggacagcgcggccagctgcacgcggtcgttcacgccttcgacggtgagcggatccggagcggcgaacgcgccgaccttgccagcggccttggcggtttccagcgcgtcggtcagatagaactcaccctgcgcgttgttcgacttcagtccggcgattgcctcggtaagcacggaagcctcgaacacgtagaccgaggtgttcacttcctgcacggcgagttcgctgcggttggcgtccttctgctcgacgatgcgcagcacgttgccttcgcgatcgcggatgatgcggccgtagccggtcgggtcatcgaggatggtggtgagcacggtggcgccgttgccggaggcggtgtggaattcgaccaggcggtgcagcgtctcgctgtcgagcagcggcatgtcggaggcggcgatcagcaccgggccatcgaccttgccagcctcggtgagctgtgccattgcgcactgcacggcgcgaccggtaccgggaatgtcgtcctggttcacgatggtgacctgctcgtcataggagcgggcggcttcggcgacgcgctcggcctggaagtgcacgaccacggccagcgtgtcggggttcagggcggtcaccgaatccatgaccctgttcaggaaggtcttgcctgcaaaagtatgcagcaccttcggcttgttggaacgcatgcgggtaccctcgccggcggcgaggacgatggctgcggataatgccataactgacgtattcccttcgatcggaatgtctattgagggtggaaacacctcaaaacagtagacggccgcccggatgtcgagcggccgtcagccgttcccccacctggactcgaaccaagacaaagggttccaaagacccgtgtgctgccattacaccatgggggagtcgtgggctttcggcccacaagtgttcatttataccatactgtcggtatttaccgaaagactacgccatgtcgcgtctcgcatcgtgtgctttccttgaacaaacacgcacgtgatcaggcgaacaggaagccttgaccgtggtgctcggggtaggtgtcgaacagttcggcgaccgagccgtcctcgaatacggcgcggatggcgctggccagcagcggggcgatcgacaggacggtcaagccatcccagcgcttttcctcgggaatcggcacagtgtcggtcagcacgacctcgcgcgcaccgcagttcttgagccgctcgatggccgggccggagagcacgccatgcgtggcgaccacggtcaccgacttggctcccgcgtcctgcagcacgtggcatgcgcccgcgatggtaccggcggtgtcgatcaggtcatcgacaagcacgcagtccttgccggcgacgtcgccgaccacacggttggcgaccgcctggttcgggcgggtgatgtcgcgagtcttgtgcacgaaagcgagcggaccgccgccgagacgctgcgcccactgctcggccacgcgaatgcggccggcgtcgggggagacgacggcgacgttgtcgagatggccttggaaacgatcacggatgtagtcgaccagcaccggcatggccaccagatgatcgaccgggccgtcgaagaagccttgggactgcgcggcatgcagatcgaccgacatgatgcggtcggcaccggcggtcttcagcaggtcgaacaccagacggcaggagatgggctcgcggccgcggtgcttcttgtcctgacgggagtagccgagcaacgggcagaccgcagtaatggaacgggccgaggcgcgcttcaatgcgtcgatcatgatgagctgctccatgatcgccttgttgatgggtttgtagtggctttgcagcacgaacacatcggcgccacgcaccgattcggtgtagcgcacgtacatctcgccgttggcgaaatcgtatgcggtggtttcaaggacgtcgatgccgagctgctcggcgacatcctcagccaatttcggatgaatccttcccgtaacgagaataagattcttatcgggcttcccttcaaggattgcgctcaccatgtctcccaacgtgtggtctcgttgatgcagtcttcagcatagccgttcttcacgaccggttggacaactcagcgttgcctgccgttcacctgccgcttgcgatccattgttcgatggcctgtttgaccgcctttgcatagatatcgctatccatgctcgggtggatgccgtcggagccgagcacctgcgcgttcgcgttggctgtggcattccaatccaccagcaccacattgtccggatgtgcggccgcatagtcggcaagcacctggttggtaggtgggatccacgtacggtctccgtgggcattgaccagtaccagcacgcggtcggggccgatcatattacgaatctggtccagctgatcaggggtgattgccgaattggtgccaaggccgatcagcacccattgccgcagactgccggcggacagatcattgccgatgagttcgggggcgaccatgatggagcgggaaacgctcgcgtcggtctgaatgccggggaagacttccgaaaggccctgtgatgaggccagcatcaccgaatcgcctatggcggtaatctgatcgccggtgggcatctcatgcttgggcttgggcggtgccggcacggcatggcgcagcagcacgtgttcggttttctgtatgcgttccagttgtgcggcctgttgctccagctggatctgcatggcggttttcgcaggtgcatgagtaatgccctgcgcgcagccgaccaacgacagcgccaggataacgtcaacggcaataacccgggccgcatgattcttcttgttcgtgcgaaggggcaccacgacggatatcaccgagtgcattgccgccggtttctccaccatcagccaggaaatcatcaccgcaatggcggtgagcaacgcggtcatgatgagaggccaaggccctgctgccttgaagatcttcggggcaagggcgctggaaagaatccacaacggccagtgccacaggtaaatgccgtacgaatacttgccgagggcggccaatggcttgaacaccatgaggctttgcatccaggaatcgtcggagatggtaccggcaatcagcagcacggacaacaggctggacaatatgatgccgccgcggaaggcgaatgcatcctgtttgccgataaccgtcatggtgaccaaggcaatcaggctgaggaatgccaataccggtgccgtcgcattccagatgcgatgctttacaggaatctgaggtaacggagcccggtacgtggcggccgaagcgctcgatctaatggtgcggggcatcggcacagctccctgacgagcgtggcccaactgaggagcggtgacccaccaggcgagagccacacccagcatcaggcccatgctgtgggtatcggtgccgaagtagacgcgggtggggtcgcccttgggcacgtacatcacccacatggcgatactgctgaacgccgcgagtcccagtgggatgagtgagggcagtttcgtctggcggagcttccacatcagccagacgatgaacggcacgatgacgtagaactgcatgagcacgccaatgaaccacagatggcgaaacacctgcgggttcatttggtcgaaatagctttggcctccggcaatggcgtaccagttgtagcagcccagcagcacggtgatgacctgatcgcggatggaaaccagaatgtcgtgatcgagcagccagccgacggagacggtgaccggaatcagcagaaacagcgccggatagagacgtactgcacgcttggggatatatcgcacgagattcagcgatccggttttcgccagagaacgaatcaaactgacggcaatcaggaatccagagacggtgaagaacacgtcgactccgtagaatccgcctggcagcagttgctgcatgcagtggtacagcacaatggctatcagcgccagtcccttaataccgtctagacccacgaaccgattcacggataatccttctctcaccgtagtgctgatggcatcccccgttctctccaacaaacggaaaacaagcccagcatggtcgaggggagagacaatgcgacagcagcgaatcgtcaggccgcatgctgcatgattaccg

SEQ ID NO: 3116 - DNA, 3238 bp, Unknown
  R215_18m  MAG No. k141_21656
gaactggtggagacggccacgttggcgtggctgcacggcctgtcgtaccggcagatcgccgatttgtcggacgtgccggaaggcacggtcaaatcccgtatctcgcgtgcgcgccgtctgctgcgcgcgcaactcgaccgctaaaacgatgcggatggaaaggaacggtgaatcctgatgaccgatcatcttgacgaaacgatcgaccgtttgacggacgagacgcccgacgggcgtctgcttgcggcattggacgccgtggaacgatcccgttcgggagacgcgcctcccgctgcggcggtgatggcgcgcatccgcgcgtcgcggtccccgttggacggaccggcatggtcgtgggcgcgcagtctgcggttgttcatgctgctgctgggccggcagtcgcgggtggtgccgtggcaggtggtgccggccacactggcgttgatggcgttcgccggattgggggcgcggttcttcgcggtcggctggagtgcgacgatcgtgtcccatgcgttctgctcgatggtgctggccggcgtgctgctgagcgtgacgatggcgttcggggattcccgcgcggacatgatctcgtcggccaccccgttgggtacgggggcggtcacgctggtccggctggtgttcatactcgcctgcgacgtcgtgttcggcctgatggtgaccaccgtgatgggcgcgcaggggtatgggacattcggcgtactgctggtcggatggctgtcgcccctgctgctggtcgccggcgtgggcgcgatgctcgcgatccgtttctcctcgggcgtcggcttcggcgtcggcctgctgttgattatcgcaatccggctgaatccgttcgggttcgcgggtctggcggacgcaagccggtccggtgcagcacaatcctccggacagctaggtctggccgtcgcggggctgatggcctgtgtgggggcggtggcgctggccggacgattgtccggggcgcgcatggcggccgcgaccgtctgaccgactcgaagccgataactcatctggtcgttcggcatgtcgcgtgaacttcaggacaggcggccgctacctacttggtgacgaacaaaaagaatgaccgtcaacttcatcggacttcaaggagggtcggcatgacgggaatgattcgcgctcaggcaaggcgcatcggcatgggattgctggcaatgcccgtggcctgtgggattgcggtggcggcagccggcgtcatggtatccggcgtgtggtcgcgtacgcaaacattgatggtggtgaactggctcgcccagctgatggtgatcggctcgggcgtgtgcgtggcggtcgcattgaccggtgacccgctggtcgaggcgagcgagtccacgcccgtgggttggaggcgcgtgcaaaccacacggttcgcgctcacggctgtatccactcttgtgggtgccgtgcttatgttcgcgccgttgcatgtattgggcctatggccgcaggatatgggatggataagtctgatcgcgccggccggcgcgatactggtcgtgggcctggccgggttcgcggccgccgcatggtccgcgtccgcacaggccacggtcatggcggtggtcgccgtatggatgttcctcgccctgctgtgggacccgtacgtgctcgatccggtcacgcaacgcggcatcccaatcgccgtctccatgatcgccgtagtgttcgcgtggcgtctgctgggcgacgaggaacgcaacgtgacgctcgcaaggagaagcatatgagtccttgcaccggtttccggcatctgacccgcgtccacatgatcatcgtgtggcggcaacgttcattatgggtcgcggctgtcccgctggccttgctcgcggttctgctgggcgtgatctccccggcaggaccgcatgaccacggtgcgggcgatttggcgttcatggccaaggcgatggccatgttcatgccgatcgcctacatggccgcgttcaccgacttccacacgcggcactcccgacttggcattggtcaattggaggattccacgcccatccccgcgcccatgctggccgcggctcgcacgctcggcgcgtttctgatcctcatcaccccgtcgctcctgctgctggagtgcgccggcgtcgtccagaccctgcacggctcgtggcgggccataccacaggcattggccgccggactcgcgatcaccgggccggccgtgctgaccgcgatgagcctgtcctcgctgctcggcgcgatcctgcccatgatcgtcgcgcgcatcaccggcgtgctcgcatggttcgcgctcgtgttctcctcgccgatgctgcccgtgccgaccgtcaacggcaccatcctcaacgtgatcggcgacgccgtcggcgccggatggttcgggctcggccccgtctacccggccacgggaggcatcctcgcggtcaccggcacgcccgccaacgcggccatatccctgatcgcgcagctcgccgtcgccatgctgctcatggcgttgggtggatggtgctcggcacacccgcgcacaacgcgctgaacggcaccggcggaacccccaccgaaaaaacatcacacggaaagaagacgtcatgttcatctccatcaaccacctgaccaaggacttcctgaggaagccccgcgcgctggacgacgtgacctgcgacctgccgcacggcatggtcggtctgatcgggccgaacggcgcaggcaagaccacgctcatgcgcatcctcgccggcatcatccgccccacatcgggccaggtactcatggacggccacgatctgaaggacgagaggacccgccgtgcgctcaaacgcacgctcggctacctgccgcaggacatcgaaccctacccgcagctcaccccgctcgaattcctcgactacgtgggcgtcctcaaaggcatcgacgacacgcgaaagcgcatgcgccaggcgcacgagctcatcgaacgggtcgggctcacggacgtggccgaccggcgcatcggcggcttctccggaggcatgcgccgccgcgtcggcatcgcccaggccctcatggcggatccccggctcatcatcgtggacgaacccaccgccggactcgaccccgaggaacgcatgcgtttccgcacgctgctcgccggcctcggcggcgaccgcaccgtgatcctgtccacccacatcctcgacgacatcgcccagacttgcccatacgtgttcgtcctgcgccaaggccgcatccgcta

SEQ ID NO: 3117 - DNA, 8631 bp, Unknown
  R215_18m  MAG No. k141_21718
ccatcatgataatccggcaaatgaattcataccccacagccagacgcttcatcatgttcctacctccttcagtcgggcaaccgtataaatcgctacaaaacaactggcagcatccactctcatagagcccccaatagcatctatacgtcacggatgggtttcgccgtgcgcaacgcgcgacgaaaccccccgacgatcagcccttcacggcaccgatcatgacacccttgttgaaatacttctgcaggaacggatacaacaccagcaacggcaacgtcgacacgatgatcacgccgtacttgatctggttcgcgaaatcacgctgctgcaccacgtccatgccaccggaactctgaccggtgatgttcgtctggttcgacaacaggatggaacgcagcacgttctgcaacggcagcttgtccgcgtcgcggatgtacaccaaaccagtgaagaagtcgttccaatgacccacgaagtaatacaacgtcatcaccgccaggatcgcggaactcaacggcagcacgatccgcaggaaatacccgaaataccccaggccgtcgatctgcgcagcatcgtgcaggctctccggaatcgagctctcgaagaacgaacgcgccacgatcaggttccacacactcaccgcgcccggaaggatgaacacccacaccgagttcagcagacccagctgcttgtacagcaagaaggtcggaatcatgccgcccgagaagaacatcgtgaacgtcatcaggaacaggatcacgcggcgcggcttgaactcgcggcgcgacaacgcgaacgccgccgggatcgtgaccagcatgttcagggccgtgcccgccaccgaatagaagatggtgttgcggtagccgacccagatcctcgaatcggtgaacaccttggcataaccgccgaagttcatcttcgcgggcaacaggaacaccttgccctgactgaccatcgtctggtccgagaccgaggcaatcacgatgaaccagatcggatagacgatcgccaccacgaccaacgcgatcaacagccagatcacgatgtcgacgacccagtcggacacgctcctcttctgcctcagcttcgggttgaacgggatgtcgtccgaccccgcgccgcggaccggcgccggattgatggatgtgcttgtcataatggaccctcctgcccgctagaagatgctggtgtccgatgccttcttcgaaatgaagttggcaagcaccaggaagaagaagttgaccacggtgttgaacaggcctatggccgtcgtgtaactgaactggttgcccagaatacccatgcggtacgtgtacgtcgcgatgacctccgacacggacaggttcatcgggttctgcatcaacagcaccttctcgaaacccacgttgagcacggaacccatgttcatgatcagcatgatgcccaccgtcggcatgatcgccgggatatcgacgtagcggatgagctgcagacgaccggcgccgtcgatcttcgcggcctcgtacagggacaggtccaccgaactcaacgccgccagatagatgatgcagttccaacccatatgctgccacacctcgctgacccagtaaatcggcgtgaacagccccggctcgcccaacagatcggtgcccgggaacaggcgcccgatcatgccagtgctcggcgacaggaagatgttgatcatcgacacgatcacgaccgtcgagatgaaatgcggcatgtacgtcaccgtctgcacgaaccccttgatcttcgacgacgagatctggttgatcagcaacgccagcacgatcggggcgatgaaccccatgaccagcgtccacaggctgatgcgcagcgtgttgaccatgatgttcacgaacatgcccgaccggaagaactgctcgaaataccgcagacccgcgaacctgccgcccatcagaccctcgaccggatcgaaatcatagaacgcgagacgaagaccgtacatcggcacgtacgcgaacagaccgacgaacaccaacgcaggcaacgtcatcagccacaacgccccgtaccgacggaaatgacgccccaaccgcaccggcaacggcgcggaacgagccgccaacgcgttatccaccacttgaccctgtttcaccacagacataaaaatccttcccccgtcgttccgcccgccacgcgaacgcgcgacggacggaacgacccgctcatgcaacggcggaaccgctacatcacttcttcgtgtaggtgtcgtaccacttctgccagatcttgacgttctcctgcaggccaaggctgtcgagctgcttgcagtaggcgtcccactcctcgtcaatgccacccttggacatccaagtagcagtcttctgcatggcgacgttggaaatctggttgtagttgctagccaacgtggtgttgtcgtccgcgtccgggttcacgtagtccggaatgtagtccttgacggggtcgaagttgctgcgctgcttctcataaaccttgctcgcctgatacagggcgtcgctaccggcatcacccttgatggtgacctcgtcgggaatccagccggcggggtaggacaggctcggggaggtgttcttcttgcgcatctcgatcagcttgtcgttgtccacggtgtactcatgctcaccggtcttggtcacggtcttgccgaaggagccgtagaactgctgcacggagtacttctcggagtacatcaggttgagcagcttcagcgtggcgtccttgttcgcggcatgcgcggagacggcggggccggcggcgtcgaattcgctggacgagccgtcccacacggtcttgtccggggagacgcccggggcggacggcaccgggatggtgatgtactggtccttcagatcgccgaaagtatcggaaatggagctgctgaacaccacaccggtcttcgcggtcttgccgtcgctggtctggtccgcgttgtaggcgtcatcgtccttggtggcccagtcggctgggatcaggccctcggagatgagcttgtggtagtacttgatgacttccttgtattcgtcggaggtcatgaagctcttgaccacgccgttcttggcgtagaagccgtatgtggacacgcccttgttgaagccggtcgggatgccggtggagttgagcagcagcatggggctgtgccaggtgtagtacaacgggtcgagcttcttgatgttcatcgggatctcatcggcctggccgttgccgttcggatcctgggtcttgaacgccttgagcacgttctccagctcgtcccacgtggtcggcacctgcagacccagcttgtcaagccaggccttgttgatcatcatgagctggcccgtgccggcattgttcttgccatgggcattggggagcgtgtacaggtggcccttggaatcggtattgagcttctgcgcgtccggcttctgcttaaagaacgccttgacgttcggcagcttgtcgagatcctggttcagatcctcgaacaggttggagaactgttccgcgtacacgaagctgaaggcatggaggctgatgtccggaatgtcgccggcgctcagcgtagtattgcgctgattcgcgaaatctccgttatcgacttcctgccattcgatcttgcagtcgcagtcggcctcgaggtccttggcccactgcatgttggcgatcttgtcctgattgggttccttcgcaaccagaacgctcacgatcggcttgccgtcggcggtcgtggtcggcttcttgtcgccgccgcatgcagccagcgaacccagcaaggccacggcgcacgtgatggcgcccgccttcaatgcggttcttcttctcattgtctctcctttgacatgatgatgtttgagtgcgcccgccacagctgtgaggcggacgcacccagtataagtctcgggagatattttgtcaacatccctaacatatatgaaacatcgacaccgttccgatatgtctcagcactccccctcaccagacggcggaaaatcgccgattccgttgacgttcagctggtcgctgagccagtcgagtgaaacacgagtgtacagaatgcgattattatcgccttcatacagcaggccataaccaccgccggccttgtggctcaatgcggcgatcaccgaataagacatcgaccccgtcgtgaaccgtcggccagcgctccaagtcttgccgtcatcaatcgaaacgcgcaccaggccatcgatcctgtccgagggcgacgaggaggaatacagcaagaccttggcctgcgccgacccttcgggggcatcggggaacgcgcgggcaatctgcgcgttgttctcgggatcgggcaactgcgtttcacgagtcaccggaccatacgtggcgccaccgtcccgggagatggcgacatagcggcaaccgtttccatcggaggaacgcgaattcagcatcacacgaccatcggaaagctccacgactttgttctcgtccatgtgatcgccgacgggagtgcccgcatgccaagtggcaccgtgatcgtcggaaaagaccgataccgcacggtaacggccgtcaaactccttgatggtgtactgctggatcagacgccccgcatgatcgccatacttgagctggatgccagcaccggaggaagcgaacctcgaaatccatgatttgctgttcgtgatatcggcggtgataatgcgcggctctctccacgtcacgccattgtcgacggaactggtgacggcggcctgcagcaccgcacgcgcagaggggtccacgcccgcctgggaggtgccgaaaccggcgtcataggatttgacgaagaacaggaacacctcccccgtctgccggtccaccacataggacggatcggaatacccgtacttgtcgacgccatcatgcccggcggccacaatatgctgcggctcgaacgaccgcccgccgtccttggaaatacgctgcacaatcgaattggcctgcggggcatcctggcagttatgaggccgcgcgtcgaatgccgcgaggacccagccgttaggtgcctcggcaagggccggaatccggtagcaggccacaccataatcgcctggagccgccagactcatcgctccgtcatggttcgcgccgcacacagtattgttcgtattcgccatcccgttctccgtcatattcagtcactcctgttcatcgccttgatgccgctcgacggacgcatcgacctgttccaccgtgcgcgcaagctcgaaaccgcatgcacgcaacacgttcgcaatggcttccacattgtcgccacgcagtgccaacaccggttcgggcatctggttggtgccgaacacgcccaacaacgccatcgcggtcttgaacgcgcccacgccggaaccgaatccctggacgccggacggcgccaggacgatccgcatcaacgaggcgagcttgttctgttccttgcgcaccgaatcccaatcaccgttctggtaggcgttccacatcgcaacatagccatatggatccacattggccaggccgggcacgctaccgtccgcaccggccatgtacgcgccatcgacgacgacttcctgaccggtcagcaacgtcagcggatgaccgttctcctcgttgtccccaaccagaaaacggaacgccacatcatcgttcgacgagtccttcaccccggccagcacgccatcacgccccaagcggatcagcagatcattgggcagcttggtatgcacgcatacggggatgtcgtatgcgaacaacggcacatcaggcaccgcggcgtgaatcaggcggaaatgcctctcgatctccgctacgcctcccaatgcgtagaacggcgctgtggccacgatggcggcggcccccatctcgcgggccgcacgagcgtgctcgatcacgcgattggtctccgtgtcgatgcaccccgccagcaccggcactcggccgccggcaatctcgatggccgcggccagtatctcacgacgtcgctcatccgtggagaacacgacttcgcttgaggatccgagaacgaaaagtccattgaccccggccccgatcatgcgctcaatcgagcgcctgtagctttccacatcgagacgatgatccgcggtcaacggagtgacgaccgggggaatgaccccacgaaactggttcatactgtgaatctccttgttgtatttgtgtttgtctggcacgtgagacaacaccgcattcgctccgcatgagcgagccgcacccaatcgttgatccgaattcctccagttcaacaattcgggtgcggctcacacctcggagtcgcaagcactgccttgcaacaggcttgcgctcacgacaccgtcacttcgtgtaggtgtcgtaccacttctgccagatcttgacgttctcctgcaggccaaggctgtcgagctgcttgcagtaggcatcccattccccgtcaatgccacccttggacatccaagtagcagtcttctgcatagtggtattgaaaatctcggcattattagtgttcagcttcgtcgtatcggaagggtccatattatccatattgacgtagtcgggaatatagtccttgacgggatcgaagtgactgcgctgctcctcgtacaccttgttcacttcaatcaattcatcggcgtgggtatcacccttgatagtagcttcatcaggaatccagcccaccaacaattccgataggccaggatactggttatcaccggtcaactggctcagtttgtcgttatccacggtgtactcatgctcaccggtcttggttattgccttgccgaacgagccaaggaactgctgcacggagtacttctcggagtagagcaggttggccagcttcagcgcggcgtccttgttcgcggcgtgggcggaaatcgacagtcccgcaagggacaactcactggaggagccgtcccacacagtctggtccggggaggcgcccggggcggacggcaccgggatggcgataataggccttgcctcgaccatcggctatcgcataaatccgccctttggagtcagtgggcatcttcttggcatccggcttttgcttaaagaaggccttgacgttcggcagcttgtcaagatccttgctcaaatcctcgaacatatcgggatactggtaagcctcaacagcaccgtacccattcaggttcacatccgcgatatccccagaggccaaggtggcgttcttctgctgggcccaagcttctcgagtcacttcctgccactcgatcttgcaatcgcagtcggcttccaagtccttagcccactgcatgttggccatcttttcctgattggcgttcttcttgaccagaaccgtcacaatcggcttgccatcagcagtcgtagtcgacttcttgctgcccccacacacagacagcgaccccagcaaggctacggcgcataccgcagctcccgccaatgcaacggtctagatggaacgcagcacgtccgtcgcgcgctataccacgtgttggatgcggcccagttccgattgccggctgacctcataccatatcctcgaataccgttcggtccagcattccagttcatcggccaacttcgccgcatcaacgccgacctcatccggccgcgccacgtcatgcgcggccaacaacgccaacccgacacagttcagcaagcgctgaccgtcgatggccaacgaccaaaccgcagcggaggaggaatcaccagccatgtagaacagcgaggcgatatccttggccgcaacgcccctcccctcaagatgaccctcaacggtcgcgtcaacacagccgcagccaccgtcacaccttttcctacctttgttctccacaacggtcgtcatcaggtaccgtcaagcaaagttaagtttgttcatgctgaaagacaacagggaatgaacctgacgacaccgaatccatcgtccttacctcagcgtttcttttccaacggttcgatcacccgcacgtccatgcctggcattcttccccatgaatacacggccactatggtgaagaaaatcggcaccgccggcccgaacgccatcatcaggccgggccacgtgtagtaggaccacaccgtgacgaggaaaagagccaacacaacgaaactacacaatggacgggcaattatcattgcaaatgatgtgcgcaccgtccacagtaggctttcgctgaaattgacatgcacggaccagctgaggaacacgaacaggccgtacagcacgttgagtaccaatagcacgccggatatggcggttcccacatagcccaggtcgttgttctgcacgaaccagtattcccaaacgagcagcagccagatgattgtttgcggccatcccagctgattcgccgcgccgatctcctccagccatgcctgatggaacgtcgtccatgtacgtttgatggtccaggagcgatcttcgatgtcgagcagccactggcggaacaccgaatatgacgcggccacggaggggaacaatccaaccacaatcaggccaaacaatgtatgcagcacgaaggcgacattcactacagctaccatcatgataatccggcaaatgaattcataccccacagccagacgcttcatcatgttcctacctccttcagtcgggcaaccgtataaatcgctacaaaacaactggcagcatccactctcatagagcccccaatagca

SEQ ID NO: 3118 - DNA, 39454 bp, Unknown
  R215_18m  MAG No. k141_21872
aagccgaccacgaaacaggacgcccagccctctacgacaacgctatcgacaccgactacacccactcaatcggcattcaaaaaggccaaatctaacccccgcgacacgccgagccagacacacattttgacccttaacccgccgaacatgatggagaagatcggcagatcacggccgcgcgacttataggcgctttcgaattcgtcctgatgatcggagttggagcggccgtcggtcatgagcacgatggcggtggtgtattgcgaggcttccgactcgctgggcagctcgtcgagcgcgctcagcaggccttcatagatatcggtgccgccgctggcatcggtggcatcggcctcatgcagcaggtcgctggtgcttgtgccagtggccttgaccgggcggtggacctcggtttcaaacgggatgagaatgttcacgtcgccgctggcgggctcgatgtacgacttcttggcctggtccgggtcgagcgccgcgttcaggcctttgaccacgccgttcttgccctctccagacatcgaaccggagtaatcgaccacccaaatggtccagctgggtttcctgagcgcggtctggtagacgttgagcgcgctgtcgatcaccgtggcggaggtcatggagaacgtgagtttgccgtcgctgaccgcggcgaggatgtccgcggtggagacgggcttggtggcgccggagtcgtcagcccagccgagtttgacggccttggatttggcgatgccgaacacgatcggcgtggtggaggtgctggccgcgtctttgacgatgtgcttggcgtctcccatcgaaatccacatcgaagaagcgggccagacggcgtcgtaattctggccgccggccttgagcgcgttcataatctccagcgaacccatgtagtgcatcgtcacggctacgttggattggtcggccgctttctggatggcagtggcgacttccttgttctcggagccggaggcaatgctcagggtggcggtcggtttgccgccggacggctggaaggtctgcgtggtggcggacgcgccgttgccgtccgctgtgccgtcatcggaattattgaacgccgtgcaaccggtcaacgcgagcacgccggcacataccgcggccgcaaccgcggcggcggagagaagacattatgcccataattccatggctctcccgccatctaaagcgggccgggccacaaggtgaccgcacggtgaacaatgaatgaagagctacatcagtacgcggcgctggcgatcatgggatcgtcgtagaagccgaggatcttttcgaggtagggcttgtaggtgctgttgggcatggagaagatttcgtggcgcgattcggggaagcgcacgatgttcgcctcgccgccgccgtccttgaccagttggacgaagtgattctgcggcttattgagtacccagatgtcgcgtccggactggaagagcagcaccggcgtctccacttcggcgcaggcggacggattcagtatggcccggttgagcttcaacgcctggcgcacccattcgaacgccgcgcagtaggtctggtattcgcggttctcgcaacgcagcttgaagtaccagcgttcacgcgcttcggaagcgccctcgttgccttccatcgagaactccggcgtgaagtccgactgcccgaacacacgcttcttgccgaagccgagtccgcacagcgcgccgaccagcacacgggccacgcccagcggcatgccggtggcgggggcgaccatcggggcggagagcaccgctttgtcaaacagggtggggtatcgctccaacacggccgcgccaatgccgccgcccatcgaatggcagaacaggttcagcggcatgccggctgcgtactgctggccgatggtttcggcgaagccggccagatcggccacgtagcgctgccagtcatcaatccacaccatgcaatgatcgtccacgtcgcgcgcggacttgccgtggccgcgatgttcgagcacgcacaccgaatagccggcgagcaggaagtaccagaccagttcgtcgtacttctcggcgaactcggtgaagccgtggctgatgacgatggccccgcggaagacggcggtggcgccttgttcgcggatcgcgtcgaacctggcggcgtcatagcacaggtagtgcagctgtcccgaacggccgccggtgtccataatgccggacagcggctcgaccccggccgaacgttcggcggcggacggatcgaaccagccctcctcgcggcattgttcgagcgcgggcagcaccacgtcggccatcatttcggcgtacttgttttcgtcgatcatcgtcacctgcatggttcccatcttaggacaagcctcacgccgctgaccgcacaggcgcgtaggttgtgaggtatgagcgaaaccaatgatgtcaatgacgcaatcaagcatttcccacgcctcagggcgcgcacgctgcggttcggctgcggcgcaccgcgctccgcacagaccgtgggcgacggctcgcgggccctgttcctgcgctccgacggccccgaggatctggtgaccgcactgtggctaagctggttcgacgagtccggcgaacaccatgagaccaagctggccgatccgcgcgaactgcttggcgcaaccgccgacagcgaggacgtgccggccgaggagaaggcccgccgcgagcgtgcgcgcgaaggcggcaccggcatcgtcggctattcgtcagatgacgacggcaatcgcatcgtgttcaccatcaacggccgcctgttcctgaccgacatcgattggaatgacgagaccggcgcacccgagccgcacacccgcgaactggccggcgaatggctcgatgaggacccggagatgtacacgccggtgctgaacccgcgcatcgccccggatggcgagcatgtgctgtacaccacgggcagctacctgatgctggtcgatatcggcggcgagctgggtgaccgcatcaccgcggtctacggcgtgagcgtggaggatgaggacggcaatccggccgaaaacacgtggaaaatcggtctggccgagttcgtggccggcgaggagatggaccgttacgacggtttctggtgggccccggattcgcagcatgtgctgttcgaatccttcgacaccgccgacgagccgacctggtacatcagcgatccggccgaccccgagaagccggccgccggccgccgctacccgcgcgcgctgacccgcaacgccgacgtgtacctgaccgtgatcacgctggcgttcgatgagaacgaccggtacgcgggcatcaccggcaacgccgatgtggattgggatcgcgaggcgtacgagtatgtggccgccgtgagctggcgtcgcggccacgatccgctggtgctggtgcagaaccgccgccagacccgcgaccaggtgctcgaggtggcggtcgcggcggatggggccgcgctgggctccacgcgtgtgcttgaggagcacgcgaacgagcagtggatcgacttggttcacggcacgcccgcctacacgccggatgatcgtctggtgtgctcgctcaacgatatggccacggataccaaccgtctgacggtggacggccgaccgttcacgccggctggctggaacgtgcgcacggtgctcgccgtgaccgacgaggatgtgctggccgtggtgcagcgtgcgcccgaaatcgcgaccgaggtgccgcgcgcctgggccggctcgggtgccgcttcggatgccgagtctctgttcggcggccatgacgcccgcagcttcgatgtggtgagcatgggatatgacggctcggtcgcgccgatcacgaccgagcccggtcagtggacggcctcacgcggcgcacgcggcatggtggtgtctgggcgcgatatgcgttccgcccgcgcccggatgcggcacatcgtcacgcgacgcgccgtcggcggcgtcaccgatgccgtcatcgccgccaacaccagcgatgccgccaacaccaccgacatcaccgccgccgacatcaccagcaccgccgcggaacccgggttcacgccgaacgtcacgttcacgcggctgggcgagcaccggttgtacacggcgatcatcgcgccgagcccgtccagcccgtacgcccatgccgacaaactgccggtgctgatgaagccgtacggcgggcccggcttccagcaggtcgtcgcctcccagtccttctactgggagggccagtggtgggccgaccagggcttcctggtggtcacggcggacggccgtggcaccacaggccgcggcccggcctgggatcgcgcaatcttcgagaacatgaagggcgtgacgctggccgatcagatcgaagccgtcaacgcccttcccgaggccgtctccaggctcaacgccgatgggcgcaggcccggcgttcccgcaccggacctcgacaaggtgtgtatgatcggctggtcgtacggcggcttcctgtccgcactggccgtgctggacgcgccgaacgtgttcaaggccgcgtgcgccggcgccccgcccaccgactggacgctgtacgacacgcattacaccgagcgctatctgggcctcgacccggatgtctactaccgcaacggcatcgtgcaggacgcaccgaaactcgagcgcccgcttatgctgatccacggtttcgccgacgacaacgtcaccatcgcccatagcctgcgcctctcgcaagccctgatggcggcgggtcgcccgcacaccttcctgccgttgacgggcatcacccatatgaccaacgacgagaccgtagccgaaaacctgctcaccctccagcgcgacttcctgcgcgacgccctggcctgaccggccccgggcgtgccgtgggccgtgacgtccgcggcacgcccggggcccgcgcccacacggcatgcggaaaaacggcgcaggtggtgcgccgcacccatttccgccctgaatttttggatatttttggatattttgcacccatcgtcatgtgaaagaccggttttttgcctcatattcccatcaccgcgtaggatgggtgaggattagaaagggaggactatgagcgttctcgaccgttttgaaaaaagcgtggagggtgcagtcaacggagtattcgccaagtttggctccaaagacctgcagcctgtcgatctttccagcgccttggagcgcgagattgacgccgaggccatgcccgtgggccgtgaccgcacggtggccccgaatgaataccgtttcaagctcagtactcctgacttcgaccgtatcgaggcatggggtagcgagaccctggccaacgaactggccgataacctcaccgagtacgcgaagagccagcattacgccttcgtgggcccggtgatcgtgatcttcgaggaagaccttgacctgtccaagggcaacttcaacctcacctccgaatccgtgcagggcaatgccgtgccggtcaccaccgatgcgcagaccgaggacagcccggtgctcgaggtgaacggcaaccagtacctgctcaccaaagacaagacggtaatcggccgcggttccggctgcgatatcgtcatcgacgatccgggcatctcccgcaagcacctggaaatcgacatcacggataacggcgtgatcgcccgcgacctgggttcgaccaacggcacgtacgtggagggccaccaagtgcccgccgccacgctgctcgatggcaacaccatcaccatcggccgtacccgcatcctgtactgggcctccgcccaagcccaggagtagtcgagcacacgcccgaaagccgcccacccatgaccgaactgacattcgccctgctcaagtatggattcctgatcctgctgtggatattcatctggctgaccgtgcgttcgctgcgcaaggacatcgagacgttcagtccgcgaccttcgcgcgcgcgtcgccgtcgtgagcgtgaagtgcataaggccaaggccgaaacgccacaggcagctgcgccgcgcccgcatcgccggcccagcgcttccgcgtcgtccgtcgcctcggcgcagcctaccctgttggtcatcatcgatggtccgcttgccggcagctccgtgccgctggccgaagccgacatcgcgcttggccgcgccgcctcgaacaccgtggtgctcgatgacgaattcgtgtcttcccaccatgcccgcgtctaccgtgacacgcgctccgggcagtgggccattgaagacctgaactccaccaatggcaccgtggtcaaccagcagcgcatcaaccgccccaccatcctgcccgctcgtattcctgtgcgcatcggcgccaccaccttcgaactgaggtagccgcatgccaaaatccgccgcttcacaaccgctgttcctgtattccaccacggtgtccgatgtgggcactgtgcgcgcgaacaatcaggattcctccttcgccggcgagcatctcatcgccatgtgcgacggcatgggcggtcacgccggcggcgatacggcatcctccatcgccatccggtcactggcccacatcgagcaggacgacaccggcggcaacgtcgagacgatctcccgcatgatggaaacctccgttatggccgcgcatgacgccatcgtcggcaaggccaagcgcgaacgcaagcttgccggcatgggcaccaccgttaccgcagtggcattggtggccggctactgggtcatcgcccatatcggcgattcgcgcgcctacctgctgcgcgacggacacctgagccgcatcacgtgcgaccacagctacgtgcaacacctcatcaacaccggtcgtatcaccccgtccgaagccaagaaccacccgcagcgcaacgtcgtgatgcgcgtgcttggcgactttgacattgacccgcgcccggatatttcgattcgccgagcccaccccgccgaccgttggctgctgtgctcggacggcctgtgcggtgtgctggaagattccaccatcgaagagacgatgaccacgctgtccgatcagggcgaatgcgcgcagcgtctggtgcagatggcactgcgggcaggcagcaccgataatgtcacggccgttatcgcggatgccacgttggcgttggatgccgatgcgttcgatctgccgcaccaaacgccgttggtcggcggtgccgccagccgtaatcttgagccgatcgccgacatcgtcaacgagccggtggctaccgcgcccgcgctgcgtgaggatgattcccccgcccagcgcgccgcagcattgattcagcccgccagcgcgcacgagacggaggccgcgcaaaccacggccgaaccgtcgtccacacgcgtggtgcagccgtccaccgtccgcgaggagaccggtgaacgagccaatcccgataccggtgagattccggtggtgcaaaagccggatgggcgcctgtccgccgaccccaacgacccggatgtggccaaagccatccgcgatgagcagatcgagcagaagaaggccacgcgcaccaagaagcgccgcaataagcttgcggtgattattacctgcattcttgccgtgctggccttggccggcgctggctggggcgtgtacacgtggagccagacgcactactacgtgggagatagcaacggcaccgtggccatttatcgtggcgtgccgaccaatctctttggacttgagctttcgcacgaagtgcagaccaccaatatcgccaccgcggacctgcctcagacatggcgtgaccagctgagccaaggcatcacagtcggttcgttggacgaagcgcagtcgcatgtgggtatcatccgcaccgaaatgcacaaactggccaagcagcaggaagccgacgccgccaagaaggccgaggcgtccaattccctggacagttccaaagacagttcccagagcgattccaaggacagcaccaaggattcgtccagccagtccggttcgtcaagctcatctgattcctcggataaatccggtatcggagcggccgacaacgcggccacgggggattctcaatgatcgctacccgtctacgtcagatttccttgttgctgattgccatggcgatcagcgcgttggcgttcatccagatgttccaacgcaccgccggcgaattccctatgcaatacgccggcatgctggcattggtcgtagtgctgtttctggtgctgtgggggctgattgtgcgcttccagccgtacgccagccagtcgattctgccttgcgtgctactgctgaccgccaccggcgtgaccatgatcgcccgcatcgaccagagcgaaggttgggaggtggcccaacgccagctggtgtggctgtgcatcgccatcgtgctttccgcgctgctcatcatcttcctgaaggactaccgcgtgctacgacgcttctcctatgtgtcgatggtggtgggcctggtgctgctgctcgccccgatgctgccgttcatcggcatggaggtgaacggcgcgcgcatctggatcaggattccgggattgggccagttccagccgggcgagttcgccaaactgttcctcgcgttcttcttcgctgcctacctgttcgatcatcgcgaccagctggccgtgggcggtaagaagatgctcggtctgcagctgccgcgtatcaaggatctcggcccgatcatcgtggtgtggatcgcctcgatgggcgtgctcgtcatgcagcatgatctgggcacctcgcttatgttcttcgccatgttcgtggccatgctgtacacggccaccggccgtaaaagctggatcatcatcggtctgatcgcgttcgccgcgggtgccgtgctggccgcaggcatgttcagccacgtgggtcagcgcatcgacgcctggctgcacccgttcagcaacgagcaatacaacaagacccccggcggctcctggcagctggtcaccggcattttcggcctggcatcaggcggcatgctcggcaccggtctcggccaaggccatccttcgctcgttacgttcgcgaactccgatttcatctacgcctctctgggcgaggaactcggtctgatgggcgtcctggccattttgatgctctacctgctcatcattgcctccggcttcatcaccgccatgaaaatcaaggatggcttcggcaagctgctcgcttccggactggtgttcaccatggccttccaagtgttcaccgtggtcggcggcatcacgctggtgattcctctgaccggtctgaccctgccctatatggcggccggcggctccagtctgatcgccaactatattctcgcgaccctgctcatcatcatctcgaactcggccaatgcgcccgagccggagctgacctcggatacgttccagtacgaggctttggccgtgctgcgcaacaaggaacttgaggcccgagcccgcgccactgagccgatcgttcagcctcgcagcgcgtcggctacggcgtcgcagtccgaggcggaatcgtttgacgaccccattgtggacatcaccaagcacgcgccagacacacttgaggcacccgaagtgcccgcaattgtgacctctgcgggctctgctgcggcccccatcgccgagcccattgtggatgccaccactccggcgtatgccggcgccgatgaaccgtacacgcctaccggtacgattcccccgcttcctcccgttaacggaggcactcgcgtatgaacaaatatcttcgtcagcttttcaccgccgtggtcgcgctgttcgtgattctcggcctgtcgtccaccatcatcatggcggtacgggccaacgcgctgaacaacgatccgcgcaacgcccgttcgctgtaccaccagctcggtgcctaccgcggtgccattctggcctcggacggcacggtcatggccaaatccgaaccggtcaacgacgcgttcaaatacctgcgcacctattccaacggtccgctgtatgctccggtcaccggcttcttctccatcaaccagaccgccgatcgcggcctggaagcctcccgcagcatgctgctcaacggtgaggccgattcattgatctggcagcgggccaaggccatgctcaccggcactacgaatcagggcgcgtccatcgaaacctccatcgaccccaagctgcagcaggttgcctacgatcagctcggtacgcgcgatggcgcggcggtggccatcgaagtcaacaccggccgtatcctcgccatggtgagcacgcccagctacgatccgaacaaactggcgacccatgacgccaaagccgcgtctcaggcctacaacgaactctctgcgggccaaaatagcccgctaatcaaccgcgccacctcgcagctgtacccgccagggtccacgttcaagaccatcgtcgcctcggctgcgctggaaaccggcgattatcagacggacacgaagattcctgcaggctccagctataccttgccgggaaccgccacacagctgccgaacgccgaggcacaggccgatggcgtcaacggacagatctccctgcaagaggccgtcgcatggtcgtccaacaccgctttcgcccagcttggcgtgaaactcggcgcgagcaaggtttcggacatggccaccaagctcgggttcggcagcaccatcaccattgacggcaccgaatccacgggcaccccgatgacggccaccgcgtccacattcccctctgatccgaccgacgacaagcttgcgctggcatccatcggccaaggcgacaccacggccacgccgttgcagatggcgatggtcgcgcaggcaatcgccaacaatggcaaactgatgcagcccacgctggtcgatcgtgtgcgcgccgccgatctcaccgtactttcgcagaccaaaccgcaaaccatggccaacgcgttcagcaaggattccgcagacaagctcaccacgatgatggagagcgtggtgaccgaggccaatccgcagctggccatcgacggcatcaaggtggcggccaaaaccggtaccgcacaaatcggtaccgacaactctgccatcgacggctgggtgatcggtttcgcgccggcggacaatccgcaaatcgccgtcgcggtgttggtgcataacacagatgtatacggttcgctcgccgctggcccgatcatgcgcgcgatgatgcaggaggctttgcagcagtgaaacttatcgaaggacagcttattcaccgccgatatcgtcttgattcgcgtcttgcgcaaggcggtatgggcgaggtctggaaaggctacgatattcagctcggccgtgaagtggccatcaaggcgctgcgctcggacgtgaccaacgccgaggccaagctgcgccgcctgcgtgccgaagcccataattccgccaatctggcgcacccgaacatcgctgcgttgttcgaatactacgagcatgacggcatcggctttctgattatggaatacgtcccctcgaaatcgttggcggatctgttccatagcaagggcgcgatggatcccatcgaactgctgcccattctgattcagaccgcgcgaggcctattcgtggcccactcgcacggcgtgattcatcgtgacgtcaagccggccaacatcatggtttccgacaccggcgaagtgaagatcaccgatttcggcgtgagctactccaccggccaaggccagatcacccaggacggcatggtggtgggcaccgcacaatacatctcccccgagcaggcgcagggccagcaggccacgccgcaatcggacatctattcactgggcgtagtggcgtacgagggccttgccgggcatcgtccgttcaccggcaccactccggtcgatatcgccgcagcgcacgtgaacaatcccgtgcctccgctgccgaactcggtggacgtccagttacgcgaatttgtcatgtcgatgctggccaaggacccgttggatcgcccgaaagacgcgctggtggtgtcccgtacgctggcacgcatcgaacgccgtctgctggatcagcagaccgaaatggccgacaccaccatggccacgtccggcaatcgactgccgcgccgagtgaccagcacgccacgcattgttttggaggccccggcctcaagattgggagggaataagcaatgagcaccagtatgcccaccgcattggccggcggacgctaccagcttggccagctcatcggtcgtggcggcatggccgaggtccacgtggctcttgacacccgtctgggccgtaccgtggccgtgaaaatcatgcgcgccgatctggccaacgacgacatcttcctggcccgtttccgccgcgaagcacacgccgtggcccagatgaacaacccgaacatcgtgaacatctacgattcgggcgaagaactggtttcttccgaaagcggcgataccgagcgtttgccgtacatcgtcatggaatacgtcaagggccagaccctgcgcgacatcatcaaggtcaacggcgcactcagccagcgcgactgcgaacaggtgatgttgggcgtgcttaacgcgctcgactattcgcatcgcatgggcatcatccaccgcgatatcaagcccggcaacatcatgatttccgagcagggcgcggtcaaggtcatggacttcggcatcgcccgcgctctggacgattccgcaaccaccatgacccagtcgcagggcgtggtgggcaccgcacagtacctttctcccgagcaggcgcgcggcgagaccgtcgacatgcgttccgacctgtattccgccggctgcgtgctctacgagatgcttaccgggcgcccgccgtttaccggcgattccgctgtggccatcgcctaccagcatgtctccgaagtcgccacgccgccatccgccgtggtgccggggctgccgaagatgtgggattcaatctgcgccaaggccatggccaaggaccgccagaaccgctacgccacggcctccgaattcaagaccgacatcctgacctacatgaacggcggcgtgccggtggcggccgcgttcaacccattgacggacctgtcgaatatgaaggcccgcaaggaagccgaacgtgatttgcccaccacgccggtggaaccgcagcagcagcccacccaggcattcaacccggtgaccggtcagttcgagcagattccaccggccaatggtgccaactcagcggcgttgcagtcccgtgcgcagcagcgtgcggcggcggccaaggccaagaagcgcaagaagatcatcatcggttcggcgatcgcggcgattgtcgcggtgctcgtcattgtgggcatcatgttcgccatgaacggctccggcaacaagtcctctgaagacaccgtcaccatccctgaagtgtgcaacgcttccacgtccaaggacaacatcaagctcaagcttgagagattgggcttgaagatgaccgaaaagcaagacaccgactccaccgagccggaaggcacctgcaccaagatgagcccggacgccggctccaaggtggccaggggatctgccgtgaaggtgtggctctccgcaggcccgcagtccactcaggttccggatgtcaaggagcgcagccaggaagaggcgcgcagcattctggaaagcgccgggttcaaggtgaacgccaccgtcaaaaccgaagacagcgccgacatcgccaaggatatggtgacgagaaccgatcctgccgccggtcagtcggttcccaagggcaccaccatcaccatatatgtttcttccggcatgaccaccgtaccgagcaatttggtcggtcagtcgaaggacagcgtgctacagcagtatgagggcaagttcagcttcaccgtggagcaggaaagctccgatacggtggaggccggtctgattacccgcgtaagccccgattcgggctcttccatcgcgcagggcgggtccatcaccatctgggtgtccacgggcaaggaaaaggtcgctgtaccgaatatcaccgctggcactgactacgccaccgccgaactcatgctcaaggccgtgggcctcaaggctcaggccagtggcccaaccgacagcaccgctgtggtagtcagcatcaatcctggcgctggcagccaagtagatgcgggatcgaccgtcaccattaccacgaaggccggcagcaccggaggcgacaccggtaccggagacggtggcaacggcaacggtgccaacaacggcaacggtgccaacaacggcaacggggggcggaacccgtgagtgagtgagcgccgggcgtgtgtgttgcgcatacgcaacgcacatagcgcaacacatgtagcgcaacacatgcgcaacgtaaacacgcaacgcaatcacacaacgcaaaggggaggggcttctgcacccctcccctttgctgtataaagagctatcccagcgcaacattcccgggaaagcgtcgccgcgcgcggaaaagctacttcgtaaccttgggctgaaggccggcggacttggccacggcgttgtcttggccgcagaccttaagccagttggccagcagacggtagccgtcctgggtcatcacggattcgggatggaattgcacggcgtacatcggcttgcccttgaccttgatgccctgaataatgtggtcgccctgcgtccacgcggtaaccaccagcgtatccggcaccgaatcgggctcgacggccaacgaatggtagcgggtggcggtcatggggttggccacgccctcgaaaatctcgtcatcgatatgttccaccaagctggtcttgccatgcatgatggtgggcgcatggcccacagtgcagccatacacctcggcgagcgcctgcaagcccaggcacacaccaaacatcggcacgccgctggccgcgcacaggcgaatcatatcctcactggcaccggattcggccggagcgccagggccgggagaaatcagcacgccatcgtaaccgtccagtacacccggcgcggctgggtcgatagcgtcgttacgcaccacatcaacagtggcgccaagggtttgcagatagcctacgatcgtgtagacgaaggaatcgtagttatccaccaccaaaatatgcgcggaatcggtcatagggctctccttgagggacgtgtactgcaagccatagtactaggctgccgtcagctcactgccacgaagttcgacatctgctgtaggaatgggatattggcggcggcccaagggaatccccactggaacagcgccgcggcggctgcgaacagcagcagagccagcagcagccatcgaatcggtgccacgccgggctgcagacgcaacagtccgccatagatgctggcatccgggcggcgacgctcacccgcgcgaatctcgcgcagcaccggccagcgccatgccaccgcagcggcgatgaacagaaccagccacactaccagcgcgccgaataccaccttgtccagcgagccaatgcgggaagcgatcgagggggtttcggtggtggagaacttcactgcaccggacgaatcagcagtagccagctctttgggcacgccatcagacactttggcccagtacgccaactcaccatagctgatccatcgatgggtgggggtggagtatttcggctcacaggtagtcagtgtgatcatgcgtttggtgggattggcagtggagtcttccggattgggcgcgatcacatacacgtccgtgggcagcacaatctcgtaccgggtgtagtggtagacgtaccagtaatccttggtacgaacgatgatgggatcgccttcctgcaacttgtccacatcgcccaacggctgcccgtagccgttgcggtggccggcgacggcgaagttgccgacctgccccggcatctgggtggtgtcgtaatggcccagaccgtggcgattgagctgctcgagcgtggtgccttccacgatgttgcgatgccattgggagccgaagcgcggaatgtagatctgcgcaatcaagtcgccatatttcgcgtctttcggctgtactggagcatcgccctcctgggctttggcgatggtgaccgttcccccgttgttgctggggtcgctccagtcgacggactgggtggtttcgttctgggctcgctccgcctcgacaccggtccaccacatctgccagacgatgtacagggcgcaaatcacggcagcggtaatcagcagttcggcgcagatgccgagtgcctgccagatcaggctccgctggggcgaagacgcgccgcgtactgcggcacgacgggaccttgccctgctggcattggccgggtctgccgccattcgtgcggcgtcgtcctcggggaagggctgtacgtccgacacggacgcgagatcaatgggcgccggtgcgccgctgttgtgcctgccgtgtctcattgctgagtctgctcctcatctgtggtctttgacgtatcgaccgtggcatatttcaactgctgcagcaaggcggcggtagcggggaactgaaggccctcggcattctccaccttgtagccaatgccaaacgcggtcacatattgcttaagaatggtaatggcttcggagtcgttcaacgctgtgcgaagtctttgtgggtcaccaatcgcggaaatggtgaatggcggcgagtatttcttaccgtgcaacgacagcacgttgccggaacagatgaccgccgaattgaacagcacccgctgatccataatcatcagcgcatcggcaccgccggcccacaaggcattcaccaccgattcgacgtcctgctgatgaatcacgtaatcgttgatattggcggtcgtgccattgttgttgacggcgttctcccataacggagaatcatccagcgttaccgttacgccgctgccgctgagcgcgggcagcatcaggctggaatccacattgctggagtccttgccttggttctgcgtgctgtcagtaccgtcggtgccatcggccttgagcgcgtccgtaagattggcgacctgtttggtcagatcgctgacgtcctgctgcagctggttggcctcgcccacgccttgctccaccagatcggccgtatcgttggtggcggcaaccgtacgattgaccctcacgttggtgctcagcagaaaaccggtcaaggcaatgacgacgaataccgcgacaccaccccatagggagtgccgtgcgccgtgcttacctacatgtctggccatgaatttcctgtcttcttgccgactctggtcgccgctttcgagtgtagccactattatgacttttagcctattgaatggagactatgctgatggctgacgaagagctgcacgaaaccgactcgaacaaccagaaggactggcagagcgagacctcatccagcaccgttgctgacgagaccgccaacaaagacaccgagcagaacgcagagaacgcttctgccgaggaagacgcggcttacggcgtgaatatggagcaggtgcaggccgtgctcaacgccactgccgataaggccacgctgaccccgcagatgcagcgcatgatgaaccgtcaggcggagaacaccaagcgtgttgaagaaaccattaagggcaccaagtcgaacccgcgttggttcgtgccgctgttctgcgcgtttatgatcatcggcctgatttggtgtgtggtgtactacctctccccgtccggctcctggccgattccgaacatcggcgcgtggaacctgggcatcggcttcgccctgatcatgatcggattcctgatgacgatgggatggcgctgagttccgactcgttgcgcttatctatcggtagatcgtttttctatcgttaggttgttcttagttcttatgcgaaaggccgacctcccgtatgcggaggccggcctttttcgtgccttcacctgttcatccacagctatccaccacttatccacgacttatccacgacttatccactacgttatccacagcctgtggatgaatcacacccatgtagttttccaccgaatgtggaaaaccatgtggataagtggtggataagcggcgtttctcggtgtatatctcgtgcataactttggcttggcatatatcgccacagcgagggaacagttatacacccgagttatccactgcaacaaacccagtaataccgcggcattcctaacttatccacataagttatccacagtcttatgcacttttctacacacttgtgcacaagtcaccattgtggataactcgttatcgtggataactcgtcattgcgcgcatctcattactgtggataccttcatacagcgcatgcccactcaccgaatgacgatatccacatcgctaatatccacatcgccgctttccgtacatacactgatgccgggcactgcatgttccgcaatacccggcatcaatcgttttttacagccatatcaagccatatcagtgcagggagccgaaactcatccacccgtaaggattggccatattgcacaacagaatcaacgcaatgaccagcaccaccatgacccagccgtacacttgcatgcgccatttcaggcttttaccgcgccatgccggcacaccacccaccagcagccatgtgagtattccacccactacaaagccgccaacatgcgcctgccacgccacgcccccgaccacgaacggcaaggcgaagttcaccgccatccagatcaacatggagcggatatcggcgccgatacggcgatataccaccagcaatgatgcaaacaggccaaataaggctccagaagccccataggctgccatctgccagccgatgcctcccggagccaccgcagcccacaccataagtcccagagagccgccaaggccggaaatcacatacagtcccaagaaccgccagtggccgatcattcgttccagcactgggcccacggaatacagggcgatcatgttgaacaggatatgcaatagcgagttcggcgcatgcaggaacatcgaggtgatgagcgtccacggctcagccaccagtctgaccggagccgccatgccgaggtacatcaaccaagccctcaggcccggggcaataaatcccagcaatacctccagtagccacactgccacgcacgcaccaatcagcgcccaggtcatcaccggaccaccgcgctcccactggtatcgaatctcccgctgtgtaggaatatgcatgcagtccactgtatcgaaggtctcggatgcgttccacgcgccgcgaagatgctgagccgaccgagggcatgcgggcgtggatgaatcgcccacgaatgtcattccacccaatcgtcacaaacagcggcctagaatagggagcagagtcggtctgaatgggcataccgaccagacgatccctagggaaaggagccgtcatggagaacaagtcttctaacggttggaagttcttcgcgctgctgttcggcggattgctcgccgcgcttgttggcttgtacatctacaagcagcagaacccagattacgatccgtgggaggagccgtgggagaacagctcctcgccggtcgacctgggtctgaacaaggccgaggatgaggccgatggcgaggcggaagccgccccggccgaagcctgatagggcggtttttcaacgcaagaagccccgcaaccgatggatgtcggttgcggggcttcttatgttctggttcccctctccgaggggagccgccccaccgactcagtcagccagaggagcagtgtgccagatgtgcggagccgttaagcgggaagcccggtgggcttcccgtaggcgacgccgagcggcgacagccgcgaggtagaaaccagcacgtagccggcgcgctgctccggcggccgtcaggccagaggagcagtgtgccagatacgttccaaatagtcttccatggagcggtcggagctgaagtagccggagttggccacgttgagcagggccttgcggttccattcgagctcatcggcgtagagggcctcgatctcggactggatgtccatgtaggcggagaagtcggccagggtcatgaaccagtccttggtcagccagtcggccacgagcggggagtaggcgttgcggtcgccgttggagaaggtgccgtcggccaccagatcgatggcctgcttcaggcgcggatcggcctcgtagtaggaggcgggattgtagccctcggcatacttcttctcgacctcgtcgacggtcatgccgaacaggaagaagttctcggcgccgacgcgctcacgaatctcgacgttcgcgccgtccagcgtacccacggtcagggcgccgttcagagcgaacttcatgttgccggtaccggaagcttccttgccggcttgggagatctgctcgtcaagctcggtggccgggatgaggttctgagccatctcgacgttgtagttcggcagcatgtggacggcgagcttgcccttgacggccggatcgctgctgatcacgcgggaaacgttgttgatcagctcgatggtcatcttggccaggtagtagcccggagcggccttggcaccgaagaacacggtgcgcggagtgatgtcctcggccttgaccttgccggacttgatgtcggcgtagttggagatcacggcgagaatcttcagagactggcgcttgtactcgtgcagacgcttgaccatggtgttgaacagggtgttctcgtcgatatcgatgccgtagtggtccttggcgaagcccacgaatgcgtgcttgttggccttcttgacggcggcgaacttcttgacgaactcatcgtccttggccagcggctcgaggcccttgagcagttccagatcggcgacccacttgtcggtgcccaggccctcggtgatgaggtcggacaggcgcgggttggcgagcttgacgaagcgacgcggggtcacgccgttggtcacgttggtgaacttgtccgggtagacgtcggagaagttcttcagggtgacgtccttcagcagctgggagtgcagctcggcaacgccgttgacgtgggagccgccgtaggtggccaggtaggccatgcgcacggcgtcgccagtgtagatggccatgtccttgatggtgtcggcggcaacgcccttggccttgagctcggcctcgaactgctcgttgatcttctcgatgatctcgaggtgacggggcagcagctcgccgatcaggctggccggccagacctcaagggcctccggcagcagggtgtggcaggtgtagttgaaggtcttggtggtgatggaccacgcggtatcccagtcgtagccgtactcatcgatgaggatgcgcatgagctcggggatgccgatcaccggatgggtgtcgttgagctggaagacgatcttgttcgggaaggtcgtcaggtccggtttgtcctggcccgggtagaagacgcggatggcgtcgtgcagggatgcggagacgaagaagtactgctgctcgaggcgcagttccttaccgaccttggtggagtcttccgggtagagaatcttggagatgttctcggccttgacctgcggggccacggcgtccatgtactcggaacggttgaaggcgagcagatcgaactcgtcgtagctcttggcggtccacaggcgcagagtgttcacacgctgggacttgtagccgggaaccatgtagtccaccggcacggcgcgcacggaccaggccggttcccaggtcttggtgccgtcggcgttttcgacgaccttgccaccgaaggagaccttctgatcacggttgtagtcggtgtggccccacggctcttcgttggccagccagtagtccggggtttcgacctgcttgccgttctcgtcgaacttctgcttgaagatgccgtacttgtactggatgccgtagccgaaggccggcacgccgagggaggcgagggagtcgatgaagcaggcggccagacggccgaggccaccgttgccgaggcccggctcgtattcgacgtccacgatgtccttcggcttgaagccaagggcttccacagccttgtcgaactggtcggtcaggccagcgttcagcagtgcgttctccagctgcttacccatcaagaactcggcggacaggtagccgacggccttggtgttgccgttgacggtgtcggcctgggtcttgaaccaggagtcggcaaggtggttgcgcacggccttggatgcggcgacatacacgtcagcaggggtggcctgctcggcggtgacgttttgagtgtatttcagttgttcacgaatctcgtcggcgaattgttccgccgtgacaggagacttcggtgcggtgatttcggtcattctgactttccttccgggataagtgcccgtgtttattatgccgcgcgataggtatcgtcgcatagacgtaagcatgaactctccgtaacgacgatggcggagcgttcttgcatacgttctcattgagagcgtatcacatatctcacggttccgcatcctacagtatgccatcgtttgcataccttgcggtttcgcgtgccggtgccatgatggagcatatggcagtaattctcgaaaaagacttgaaacgagggcacgacgcactggtgcaatggcgtgccgcagccctggaactggccgacaacacaccacatcgcctgaccgcctcccccattctgccgcgcccggtgtgggcgatggctgtgcgctactcgctgttcctgctggaacggcgcgcgcccggccctggcgtggaggtgcgcgttgcgccgtggggtgcggtcaagatcctggacggcccggaatcggacccgcacaacctcactccaccggacgtcatcgaactggagcccgaggtctggctgcgactggcctgcggcatcaccacctgggcggaggaaaaggacgccggccacatcagcgcggtcggagagcgcgacgatctgagcgacctgctgccgctgtaaatcgtcggatgcccggtatcggatgccctttatcagaactgtgcgatgctccaacgctggatgtgctcggcccagcggtccggcgtgggtagggtgatgaggctgcgcatcgtcagcgcgtaagcggcggcagctaccagcacggcggccagaatcaggcaggtcagaccgtagccgatggtctgcataccccagccggcgagtgccacggccacgccataggcaccgtactgcaacaccatgctgcccgctccaacgcggccgagcttgtccttgcccaccaaggtattgctgaggcctccaagcaccgcgttgcccgcgggcaatgccagtaccgagcaggccacaaatatggccttgccaaccatggagggcaccaacgcggcacaggtgaatcctacagccagcaagacgaacatcacgcccaccagtacgccgccgggcacgcggttgaccagttgcgaggccatcagtgcgcccagcaacatgccaacggcggaggcggcgttgatgaatccggcggatatcagctggctgccgccttgggagatgtccagcgcggtcagcagcaggaaggcattgctggcaccggtcaccatggccgctgcgatgatgagatggcgttggaaccggtcgcgcagcagccagatcatgccgtccagtgcgtcgcgccagcgtggggcggagtcatcggcatcatcggcgtccgagacggccccgacctccgaaccggtatcaacattgcccggacggccgctatcgctcacagtcgcacgtttccaatagcggcggatacgccatgcggacaccatgcccagcacgctcagcaccgcgctggtcaggaacggcaccgcatgtcccacggtcatcagcagaccgcccaacggcccgcctgccagcgtgaccgtcgaatccctggcgtcgttcagcgccatcgcgtgcggcagctgctcatccggcaccacgccacgcagcatggcattcgacgtattctccaacaggccatcgcgcaccgaaaacagcacgacgatacacagcagcgcgatcggaagcacgtgggcatacggtccgccgaatgccggagcgtttgccccgttaaccccatggccgctcgtcttcggcgcattgccgaacagcatcaccgctgccgccgccaccgccgagagcaccacaccggacgcaccccagatcagcatgagcgtacggcgatcataccggtcctgaatcacgccgccggcaaggcccagcaccgtctgcaccaccacgcagatgctttccgtcgtggtggcggcggcagaggatcctgtcgcggcgagcatgatcagcggcaccgcgaacgcgatcaggctggcaccgaccgcgccggacgtgtccgcagccagccaccatccgtaatcagtcccccgccataaatccgtatcacttgccatcgttgccctccctgggattggtccttatggacgccaccatagggagccgccgccgagccgaacacccgcaatcctcggttatggggacatggctgcggtcgtcgtcctcatttgtgaggacagggcacaatcagcgccggacgccggacatcgcagcttctgccccatcagccccgcacgcacgggatacgcacgtaaatcatccacgtgccatcatccgaacgggcggtcaactcaccgcccaactcctgcacacgggtgcgatgcatggccagcccacgccccgaccgctcctgcgcggacaggccactctgcgcgtcggcatcgtcacggatatcgttggtctcgcgaatctcaatccattcgggagacagagtgacgaatagcaggtaggaatcagctcccgccggtgcatggcggcggatattcgtgccgatctccgtcatcagcgacagcgcctcggccgccgcctcggggtccacgaccatggcgatgccgttgaccgcggccgtcccccgatagccctgcgcctccagaaactcctcggtatcggtgatctgcgccttcacacgcgtgacgaaggattgcggcatgcccgctgtggattgcgtacggtcatcgccaccggcgttctcgggcacggcattgtcaaccacctcattcgcaatcgctggacagctcccggtgcctaccgggtcacgagccagggcggattctttcgtcggcgaatcaacctgccctgattctgcagtcgccacctcagatgtcccggtgccaccgaccggcaaggactcgtcccggaagccggcgtccattccgctctgctcggtcagaaaatcgatgatgccatgcacttccgcaaaggcacgttggctgcgatccagcacgcgctgccagtcgccaccatcgatgccggctggcgcggccagattattccgggcgatggtcgagatatacgtcagatcgttggacagcgtgtcgtgcagttcgatcgcgagctggttgccgtggcgcagatcggccagcgccgattccatctgctcgttttcgttctcctgattcaccacgcgcttgcgccagcgcaacgcaatgcccagtaataccagcagcacgcttgccgtcaacgccgccgacgccgtgaccagccacgacccggtcaccgcatagacgatggccgccaccgcaagcacaccgatcgggccgaacatcgccagcggatgattgagttctatatcgatatcaatctgatgatgcttcttgccgtcggcgtgaccatacgaatacgacgaatgccgcgaaatgataatcggacgtttcaccggcccgctccccttatgcgccttgcgcttcttctaccgtgtccccacacacccatcggcgccttcatcagtgcaggttcatgcgaatccatgcgccgataagttccttgagattgccagcgccgagcttgtcggccgcacgcatcagatgcgtgcgcacggtggtttcggtgatggacagttcggcggcgatctgcggcatggtccggccgcgggaccacagttccgcaacctccatctcacgcgcgctcagacggttgtccttctcggccttgatgcgcgcggacgcaacggccgcggtctcgaaccgcacgtcgccaccatcgccccatattttgccggtctgcacctggcggatagccacggcctgcaatcgcacatcatcgttcttgctcatgatgccctgtgcgccggcccgggccatctcctgggcatgtcggcccacaatcgaggcggtaatggccagtatcgccgtggtcgcgttttccctgcggattgcacgcaccacatccggaccattgatgtcgttcatcgcgatatcggccaatagcacagcaggcgggtgtttggtggccgtgcacagctgaatggctttgctgccttcgctcaccggcggcaacaattcgaagtctggcagggccttcgacaaaatcgactgtaatgccatcagggccatgcggtcgttgtccatgatgagcatggtgggccttggcccatcctgcccgctgatatccggcatatgcctacgtgcgcttagctcttcttcggcttcagcgctgagggcatgggcatcggaatcggcttgcgtggggccggcttcggcttgggcgcggccggcgcggaggccgggaactcgccgctggtcgcctttgcggcggcttcggctgcccacttggcgtactcgtcgaggtcgtcctcctgcgcggcgggcgagaccttggcggcgtcggcgtcagcagcagaatccacatccttgtccgcatactgatcatcaatatcggcgaacgggtcaggagagcccgttcccggctcctgctcgctcagctcttttgccagctcatcgtaatcggtatcggtggtcaggtacttgagctttcgggcaattttctgctgttttgctttttgacgtccgcggcccatctgaccccctgcgattactgtgctgttcgattcatcaacaatagagagtaccactaatagtggcttgttcgttgtcggctcacacttttaccataaaaagcgtttatctgagccctatttaaaggattttcgcatgaccgacgagcagcaactgacagcggcaggcaatgagataagcgcgagcttcctcgcggccaaaaagcgttcggacgaaacgctcgccaagctggaggccaagccgtcgtccttcaccatgttgaccggcgaccgtccgaccggccggctgcacctcggccactacttcggctcgatccgtgagcgtgtcgccatgcaggagcgcggcgtcaacacgaacatcatcatcgccgactaccaggtgatcaccgaccgcgacaccaccgagcacatccaagacaacgtgctgaacctggtgctcgactacatggccgccggcatcgatccgaacaagaccatgatgttcacccactccgccgtgccggccgagaaccagctgctgctgccgttcctgtccctggtcaccgaggctgagctgcaccgcaacccgaccgtgaagtccgagatggaggcgtccggccacgcgctgaccggtctgttgctcacctacccggtgcatcaggcgtgcgatatcctcttctgcaaggccaatgtcgtgccaatcggcaaggacaacctgccgcacgtggaaatcacgcgcaccatcgcccgccgtttcaacgagcgttacgccaagaagaacccggtgttcccggagccggccgccattctgtctgaggcaccggagattccgggtctcgacggccgcaagatgagcaagtcgtacggcaactccatcatgctgggcgccaccgccgaggaaaccgccaagctcatcaagaagagcccgaccgattccgagcgccgcatcaccttcgacccggttgcccgcccgcaggtctccgccctgctgaccaccgccggactggtgaccggacgcgacccgaaggacatcgccaaggagatcggtgattccggtgccggcgcactcaaggcatacgtcatcgaatcagtcaacgagttcctggccccgcaccgcgagcgccgcgccgagctggccaaggacatggactccattcgtgacatcctgcacgacggcaacaagcgcgccaacgccatcgccgaggagaccctcgaccaggtgcgcgaggccatgggcatgaagtactgattttcccgccgctcgtagcaagacgccatgtcagccccaactgggcaactgacacggcgttttttgcattgcggcgtctgctgtgtcctatcttcacttcgaggggcggatttctcgttttccggaggtctatctccgcttcgaggggctgttgctcaagtaggcgaggcacaaaaacggcggaatgacgttggcgtgaatgggattttatctgagattgagcgcatgaccagccccttgaaacggagatagacctccggaaaggctcaaatccgccccttgaaacggagaatcaagcgttagtaactctcaattcaaaaaacacaacatgttttccgtgcaacgcggctatcaagacggacctctggtcacttcatgccgatggcttgcatcaatacgtacgctccccgcacagcaatgtcattacgacgtgttgcggcatagcgcgcatggcttccggagtatcggcggcgtatgggtcggcgtccaacaacaccatatcggccgggtcgccggatgcaaggcggtcacggccagtggcggtcgaggctgccagcgaggtgcgcacatcgaggcactgctcgggctggaacggctcgcggtcagagctttcggagccgaacacggcggcggaaatggccagccacgggtccagcggggccacgggcgcatccgagcccatgcgcagcgtggtaccggcgtcgtggagggccctgaacggataagggatgccggccgggttggcccagaaacgggtgatgacgtcgcggtcatccatggcgtgctgcggctggatgctggccgtgagccccagctcggcgaaacgcgggatatcgacgggtttgagcatctgtgcgtgctcgatcgatccatgtgcgtgcgtggcggcgactgcgttgagcgcaatggtgttcgcttcgtcgccaatagcgtggcaggcgatgtcgaagccatgctcggtggctaggcgcatatagtcttcgatttgctgcggcgtgtagctcagcgtgccatacgtcggcggctcgatgcccgaatacggcgtggagcagtaggcggagcgggtgttgagcgatccgtccgagatgagcttcatggcacccacatggccgagcccggcgctgcccggcagtgggttgccggtatgccaacccgcgtcaatggcggcttgcaaccgctcggggtatacaccggcgtccacgcgcaaaccgttaatgccggccgcgaaacgattgatccacgtatcgatgttttcggccatttcataatcgcggatgcccaccacgcccttgcttgcggcgtcctgttcggcctcgcgcagcagacggtcagtctcttcagcagcgcccggcaccttgtcgaaggcggtgtaggcgttgaaccattcgagttcaccgaccagaccggattcgtccacatgtacgccaagcctgcgggccgcggcagagttcacccatccacagtgcatgtccgcgctggagagggccaccggctgttcgccggtcacggcgtcaattgcggccaatgtgggctgctcgtcgtcggcccacagcgagtgacggaatcgcatgcccaccacgaaggcatccgggtcaagcgtgccggcggcgcggcgctcatccagatgacggcgcaacatgtccatcgcttcggcggcggaacgggcattgatgaggtccagtcggcccagcgtcttagcccattgcgtgaagtgcgtgtggcagtcccacaggccgggaataacccacaggccgtcggcgtcgatggtggtttcgtcagcaggtgcggaggccgacgttgggattgagacgctgccagaagcaatggcattcgtcgcgtatgccaacgatgtcgtatgcgccttagtctgcatcgtgccgtccgaagccgagaccgttccagcagggccgacagacgcaacaaccccatcgcgaagcaccacatccacgcggtcctgagaccccggaacaccggcattgacaatacgcaccaagctactcatacccgccatcatgccacctttgcatgaacgccatggagattcgttcaagctgaatcgcgccgtcggcggcgattcccgctggctgcctgcaaacccctacgttccatgtaattgcgggatgcctgcaactgcgatgaacgcccatagtttatccaccgacttatccacatttatccaccgaaaaattggggcggtagacagggccggtagccggaccctacactgcgaggacaaagcgaacatcacgaaggagtgatcatcatgggtagctcaacggcattgaccgagctgacaatgcagaagtatcaacgaatgcagacgtgcgcagatgttcaacgacgaagcgcatggcgcccaccctatgccctgacaacagcattggagcttttgtcaattgaagtaccccgcatatcaagcaaacacagaggccttgcaactacaaccattgttgcggttccacacgccaatgacaaacggcacattgtgggggtcaaagtggttgtatggcctttcccactagacacggtcataatcgagggacaattcacatgcacttcaccagcttgcacatgggccatgttctccgcgtatctcgaacttgaagaactcatcgttctcgctgattccatgatgcgacgagatcgaaggctctgcagaacaaccatcgacgccctttctctgtatctcgatgaggccgaggcccaggtgcgagccgacaaagagaatggcaccaattcgtatttgttccgcgggtataacaaatgccgtcgcgccctgcttttggcgcgcgcgggcacagattcctccatggaaacacgaactcgtttggttctcttgaaatacggtctggattgcccgcaggtgaattatccaatattcgcaggaaacaacaccagacccatatatctcgatcttgcataccctgaattcaaggtatgcatcgaatacgaaggctctcatcatgccgggcaatggctgaatgacgcgagacgccgccagatgatcgaagacgctggctggaagtacattcaagtcaccaaattagatattggcgacgaagcgggagaagaggcccttgcccgaagagttgccgagaggatacaggaggttacgggcaaaacggtccagctcacgatgcggcaaaccacccagcaaattagcgatgtccgaaagctacgccgtattccgctgtacaaacggctgaaattcgagcctctgctgccaattattccgacgacgcaggaataataagcccggtagagtcagtccgcaccgtccgcaccgcgctacggtattcaaaacccatttcaaggggctgatttggcctccgccggaggtctacttccgtttcaaggggctgatcatccgctagatcacgtgtatcaatgcccttacgccaacgccattccgccgttttggagccgcgtctactcaggcatcagccccttgaaacggaagtagacctctccagaacgtcaaatcagcccctcgaagtccgttttggcctcaatggttcctgccgaaccacaaaaaagccactcctctgccatacgagccgaccgcacagcaggcacgtgtcatttgccgctgcggacctcggactccatggcttccatgggctcgtcgacgagcacggtgccggacggcagggtgccgggcagcggatcatccatgtagtggtcgaactcgtagagcatacgctcgttcggtttggcggtcagcaacgaaaccaccacgatgaacagcagcgaaatgatgaacgccggcagcagctcatagatggcgaatacgccgcccaagggcttgacgaggttgtgccagatcagcacggccgccgtgccggacagcatgccggccacggcgccggccttgttggcgcgacgccagtatagcgagcacagcatcaacgggccgaatgaggcgccaagcccggcccacgcgtaggacaccacctggaagatcgacgagttctggtcgtatgccaccagaatgccgaacaggaacatgaccaccagcgtgaccctggccacgatcatgacctgcttgtcggtggccttgcggtgcagcagcccgcggaagatgttctcgcccatggccgaagcgccgatgatcagatacgaggagctggagctcatcgaggccgcgaaaatgccggagaccaccacgccgcacatgaagctcggcagcagggtctgcgccagcacgatgaaaatggtttccgcatcggtggaggtcagcagttcggtgggcatcatcgcgcgccccaccaagccgatgcacaccgcgcaacccagcgaaatcacgcaccaggaggtggcgatgattcgggacttgcgcacttcttccacgctgcggatggacaggaagcgcaccagcacctgcggcataccgaagtaacccaggccccacgccagcatggagatgatggtgatgatgccgtagtcggagggcgcgccgaacacggccttgcccgcctcgacgagctgctggccggtggccgggtccagcttgggcgcggccacctgcgtgccggacaggtagccggggatggcacgcaggaattccacggtgttgtcgatgccgcccgcgctggccacggtgccgatgaacaccaccgcgagcgcgaagaacatgagcatgccttgaatgaagtcggtcatcaccacggacaagtagccgcccaccacggtgtagacgaacacgaccaccgcgccgatgatcatcatgacgtggtagtcgaaaccgaacaacgtggcgaacagcttgcccacggtcacgaagcagctgcccacgtacacgctgaagaacaccaggatgatcacggccgcgatggtggagaccacgcccttcttgtcatggaaacgcttggcgaagaagtcaggaatggtgatggcatcgccggccactaccgagtagcggcgcagtcgccgggccacaagcttccagttgagataggtgccgagcgccaggccgatggcggtccacatcgggtcggccgcaccagtgaagtaggccaggcccggcaggcccatcagcagccatccgctcatgtcggaggcttcggcgctcagggccgtgagccacggccccacgccgcgcccgcccgcaaagtattccttggaagaggagttggagcgtttggagtagatgaatccgatggacagcatggccgcaaaatagatgaccatggccagcagaatccagaaatcgttggccaactgcgacacctccccaatcatgacgccaagcggctaccgccatggcagaactatgtgctgatatgcgtgctgatatgcgattgacgccggagcggcgtcatacagaccgtcacagccgtgaatacggccgcaacgcacttcgcctgatggtagtggatacaagggctcaagcaccttccaccgtttccatactgagacgctgttttatccgagctccccacctgagaggagccaagatgacggtcagatgtcgtagcgccaggacttgtcggtcaccacgcgggccatcgccaagccgatcggcagacagataatcaccatgaacgcacggaacgcccagtccagcgcattcatggtctggaagctgccgaggtaccacatggcacggtacatatacagaccgggcaccatgatcacgatcgacggcacggtcaggcagatgcgcgggtagccgaggtgcggcggtagccagccacgtcgcacggatgaacgccacgccgatgccagaatgcccgccaggaacgcgccgatgaaggtagccatctcgggtgccacgttgaagtcttgcaattccaagcgcagcgtgtccgtgatcgcaccgatcagggcggcggccaggcacatgcgctgcggcgaattgaacagcacggagaagccccacacgccgacgaacgccgccacgaaccgcagcaatccgttgacccacgggtcaagccccagcggttcaaagccttccgggtgcaggtgcaccatcacggccacggcccagcctgccagcgtggccatcaggatgatgcacagcacgtacgccacgcgctggatgcccgaggggaagtcgattttcgccatgtcgagtccgccggtgatgagcgggaaaccggggatcacgaacagcatggcgccgatgtaggccgtatcgtgcgagagcgcgactgggtcgaaaatgccgatgagtcgcaaggtgccggtgcaggcgagcgccgccgcggccacgcacacaaaggtgacgaagaactggttcagatggtatgcaaacagccggcgacgcatccactggccaaggcccgcgcccacgaacgcaccgatcatgtcgtatgggccaccgccgagcaggaacacgaaggccgcgcaggccagggcggaggccagaccggaaaaccacggcttgtacagcggcttgcgacgctcaatcagatcgagtcgctcgtgcgcctgccgcacggtgataccgcccttggccttctcttcgtcggagcgctcgttgaagtgttcggcgtattccttgggcacgcgattcttgcgcttcgtactgcttgcagcagggctttcggcggttgcgccgttcgccgccgcgccctcagcgcccgcctcggcattcgctgcgttcgccgattcaaccgactcattggagtcaccggtaaacacttcggcatcgtcgtaggccttctcttcggccgctttgtcttcgaccgaagtgacttccgcgctgtccgccaaaagtcggtgggcttcttcattgtcatcatccaaggacttggccacggaggtcacgagtaccttggttttcaacgcaagatccagcgcctcgtccacgctgccgttggccgcctcagcctcggccttggcacgttcgcgcaggcgcttggccagatcagcagaatactgcgaagcgtcacgttcgtccaaatgcttgaccacgccatcggacagttgcgaatcgacgtgatacatcgaccccttgccgagattcacggagaaccagtcggcgaaatgttccagcagccagatacgttcggtgttcacgccggtggtcggcaaatccacgacttcggtgatgcggttacgaccatccgtgcaggtggcctcgatatccgtcaggttcacgtcggcgcgtacgtgcacgcccagcgggtaggcgatgcggtgcatcatttcacgcacgcggaaggagccggtgccggctcccaggtccagcatgccgacccgtacaatcacgctggctttggcggcgataccggcgtccaccaccggtttttcccaatcgcgcgcaatatcttccatgtccagcggaatggagtgggtgtggaatttacgtacagccgttgcgcctttcgcttcgggcgcactttttttcttctgttcgctcacatccctcattactactccctgcctcccccgccagcaatcgtaaggtgctcaaatcttccgcgaatcggacagtgtctcatatgctgtccgatattcggtctctataggtggacaacttggcgcactatatggactccgtaacgcaaatagcgatttcgcggggatacactattgcccacacaacaaccacgttgaatatgggctgtgggctcgcaacgactggcctcaacaactgcggaggagccgcagacgaccggtagaccgagcaacctgttattcggcaaaggaggttatatggcaacacctgaagaacagatcactcccgctgacgccgccatcgtcactaccgggaccggccgaaagggcccggaggagcatgatcttcccgaaagcctgaagtacgacatggatctgtgtcttgagatcctgcgtaacgtactgggcgaatacaaccccgaactgctgtctacgttcgacaccgtgcgtcattacgcggtggaggccagcgccgagcatttcgccgagctgaaggatccgaaccccgaccaggatggcctgaaggaggccgtgaacgtcatcgacaacatgacgttgcacgacgcccagctgctggcccgcgcattcgccacgtatttccatctggcaaacctgtccgaggagaactaccgtgtttccgtgctccacgagcgcgagaacaacgtgtccgttgaccaggcggtcgacccgatcaacgagctcaccgtcgcctaccaccagctcatcaatgagactggcccggccaaggccaaggaactgctcaaccagctcgaattccaccccgtcttcacggcgcaccccactgaggcccgtcgtaaggccgtggaaggcaagatccgccgcgtttccgaattgcttgaggagtacaagcgcctcggcggctcggataagaaggaatgcctgcgccgtctctacaacgagatcgacgccctgttccgcacctctccgatcgcgctgaagaagccgaccccggttgaggaagcggacacgattctcgacatcttcgacaacacgctgttcaacaccatccccaaggtctaccgtcgcttcgacgactgggtcctgggcgataaggccggtctcgtcgagcccgcttgccccgcgttcttccacccgggcagctggatcggctccgaccgcgacggtaacccgaacgtcaccgccaaggtgagccgcgccgtggcccgcaagttctccgatcacgtgatcgccgcccttgaggaagccacccgcaccgtgggccgcaacctcacgatggaagccgagaccacgccgccgagcgccgagctcaagagcctctggagccaccagaaggaaatgagcgagcgtctgaccgacaaggccgccctgatctccaccaaggagatgcaccgcgcggtcatgctggtgatggccgatcgtctgcactacaccatcgagcgcgatgccgacctcatgtaccactcctgcgacgacttcctcgccgacctcaaggtggtccagcgttcgctggccgccgccggcgccaagcgttccgcttacggcccgctgcaggatctgatctggcagaccgagaccttcggcttccacatggtggagatggagttccgtcagcactccgtggtgcacgcccgcgcccttgcggatatccgcgagcacggcctgcacggcgagcgcggcgaactgcagccgatgacgcacgaggtgctcgacaccttccgcgccctcggtgccatccaaaagcgcaacggcctcaaggcagcccgccgctacatcatctccttcaccaagagcgcccagaacatcaaggatgtctacgagctcaaccgcttggccttctcccacccggaggacgtgcccaccatcgacgtgatcccgctgttcgagcagcttgaggatctgcagaactcggtggacgtgctcgaggaaatgatcaagatccccgaggttcaggctcgtctgaaggccaccggcaacaagctcgaggtcatgctcggctactccgactcctcgaaggacgccggcccgacctccgccacgctggccctgcactccgctcaggagcgcattgccaagtgggctgagtcgcacgacatcgatctgaccctgttccatggccgcggcggtgccgtaggtcgtggcggcggccccgccaaccgtgcggtgctcgcccagccggtcggttccgtcaagtgccgcttcaagctcaccgagcagggcgaggtcatcttcgcccgttacggcaacccggtgctggccatccgccacgtcgagtccgtggctgcggcgaccttgctgcagtccgcgccgagcgtggagaagcgtaacaccgagatgaccgagaagtatgccgacatggctgctcagctcgacgaggccgcgcacaaccgcttcctcgacctgttgaacaccgacggctttgccccgtggttctcgatcgttacgccgctgaccgaaatcggcctgctgccgatcggctcccgcccggccaagcgtggcctcggcgccaagtcgctcgacgacctgcgcacgattccgtggatcttctcctgggctcaggcccgcatcaacctggccgcatggtacggcctcggcaccgcatgcgagaagttcggcgatctggagaccatgcgtcaggcttacgaggaatggccgctgttctccaccttcatcgacaacatcgagatgtccatcgccaagacggacgagcgcatcgccaggatgtacctcgccctcggcgaccgcgaggacctcaatgagaaggtgctcaacgagatggagctcacccgcaagtgggttctggccatcgtgggcgacaagtggccgttgcagcaccgccacgtgctcggccaggccatccgcatccgctccccatacgtggacgcactgtccgtcactcaggtgctggcgctcaagtcgctgcgcaagaaggtggacaaggaagagctctcgcagagccagcaggcaggattcatctatctgatcctctgcaccgtttcaggtgttgctgccggcctgcagaacacgggctgatttccggccgaccgatcgacaaaagcgagcggggaggttccgtgccgattgacggcgcgggcctccccgctcgcgtcatccggccctagactggccggcgacggcgcacgccgggcgggcgcgcggagaacggacgcgcgggccgagcgacagactcggatgatcggaggggacatgggcaagccagcggacgggcgcgggaacaccgggtccacggacggcatcaaggcggagggcgacgccgggaacgaacgccacatttgcaaagcgaatccggctatgatcgatggcattgggaaaaaacacggcacagaagatatgtcagaagatttttccggcgagaaatgtgctttggcaccgaaagcagcagctaccaaattccataaggcgagtagatgctatgtggctttgggcaaggccagacgcgtgctatggtggctgggattactgttgctttcaccagcagtaatgacatgggctgaacgcgataattacagcctcgtttgcagcgtgttgacactttctcctccaccctgcagtgatttgaatacgtatggctccagacttacagcagtgctgggcttaggttttctctgttgggtgatgataccggttgtttcttgcgtgaaatccgtcattcgaagcttatatcccaatgtgcctgacttggatacgtcgatggcttcacatgtcgtaatcggaattgtgtcatttttcatgctctgcgtatctttgcctcttcttttcttgggcataattacaatgcatatataaacgaacaggcctgcccaaatcttaagtagtgcgcgaaagcgtcccgcatagcggtggacaatgacctttcggaggaattgctctgcatggactgcgccagcaaccatgcatcacagtccgcgagaacatcgctgtaactgaatcccatacgagcgtcttgctcgccgagatgagtgtgcagccatgacgccaggtcctcttccggggtattcgccaggtagcttccccaaatctgcagcaaatccagggcccatccgcccagatcaccgagaccatagtccattggatcgttcgtaacgccccatgtcaagtatcccaaggatgtggcggccatatgggcgatgtcccg

SEQ ID NO: 3119 - DNA, 76861 bp, Unknown
  R215_18m  MAG No. k141_22903
cggcttcacctgcgtgaacgacgtgacgttgcgcgacctgcagggcatcgaccccacgtggacgcgcgccaagggcttcgatacttcctgcccgcttggcccgtggattgtgatgcgtgacgacctcgactggaaggacgctaagatttccttcacgctgaacggcgaggatgtgccgatggcgtctggcaccaccgcgaacctgattcacggcatccccgagcagattgccgcgatttcgtcgttctccacgctgctgccgggcgatgtgatcatgaccggcacgccgaacgcttccggtcaccttgaccccggcgacgagaccatcgtgcacgtcgaaggcatcggtgatctgcgcaacgtaatcgttcgggcgtgactcgttctggatcccctctctgaggggagccgtccaggcggagaagctgactgaggggaaccaagaacgcgccttacgctcccggcagaagtgcgtgcagggcggtcatcaccaccaagctgatgatggccgtcactgtcagcgagaagccggcgagcttggcgttgccggttagcgaatcggtgaacttggttgagaagatcgtgataggggcgaacgagcccaacacgatgatctcgcgaatcctcatgtcgaatggcagtaggaaccaggcggccacggcgataatcgcgccgaataccatgcgccagacaatcaccttgcccaactccaccttgtccttgcgattgttcggaatctccatcatcagtccgatcatggccatcgcgcagaaggcgttcgcattggcgaacggggtgatgagcgtaacgatgggctgtgggatcgtgatgtgcaggaacatgaacaccagcatcagcatgtagatgtcgaaggaaatcgagcttaggaagtccctggcaatattgcgcagacgcaggatgagcggtagcgacttgaaattgtcatccatatgcagcagcgtgcgtgtgatggtcagtgacccggccgtggccacggtggcgttgccgatatcgagcatgatgatcggcagaccggcggacgggcccatgaacgtctgaaccacaggcaggcagaacgcgcccaggttcaggcccgaggcgttgagcatctggaaggcgcggtagttcttctcgtcgccgcgagaaccgaaatacacgatgaacagcggaatcgcgcaggcgaagaagccgaacaacacgatccacagcatgcgcatgtcgtgcttgttcgtggcgaacgacaggataatcgcacaaggaagcgtcagattgaataccagaccctgcacgattttgtaatcacgctcgccgaaaatgtggacatgtttgagtatgtagacaccaatgataacgagcagcagcgaaccggcctgaaaaatcatgttcttctcttatcccacaagcacccgccgcagcaccggcggcggtcaggcgcattacaaaccagccgtgagtataggagcgttcgcgcggcgctggcgcggggcggtgcatattgtggacagtcccgtaacgttgatatgccatgctggcgagatgaatatatccaataccaagtggagctcggcacgatagagaggtaggaaaacatggcagagcagacggtcaccgtaggcgttggggcattgagcatcgaggacgttatcgccgtagcgcgcggcggtgccaaagtggcgatttcggacgaatcgaagcatgagatggcgctaagtcgcgcggttatcgatcatttggccgacgacaccgtgccgcattacggtatctccaccggattcggcgcgctcgcctccacttccatccccaaggaacagcgcgcgcagctgcagaaaagtctgatccgctcgcatgccgccggtgccggaccggaagtggagcgtgaggtggtgcgcggcctgctggtgctgcgcctgagcaccctgtgcaccggacgcaccggtgtgcgcccggaaaccgcgcaggtctacgccgatatgctgaacgccggcatcaccccggtggtctacgaatacggttcgctcggatgctccggtgatttggcgccgctcgccgcctgcgctttggtggcgatgggcgaaggcgaggcccgcaacgctgacggccgcaagatcggcggcggcgaagcgctgcgtgcggccggcatcacgcccgtcgatttgaaagagaaggaaggcttggcgctggtcaacggcaccgacggcatgctcggcatgttgtgtatggccatcaccgatctgcgcctgctactcaagacggctgacatcgccgccgcgatgagcgtggaaggcatgctcggcaacgaccgcgtgttcgccgccgacttgcaggcgctgcgtccgcatcgcggccaaggtgattccgccgcgaacatcgtccgcatgctcaagggctctggtctgatcgaggccggccgcccgggctccaccgtgcgtgtgcaggacgcctactcgctgcgctgcaccccgcaggtgcacggcgccgcccgcgacaccgtggaatacgcggcctccgtggcgggcgtggaactcgcctccgccatcgacaacccgtgcgtcacgctggacggccgtgtggagtccaacggcaacttccatggcgcgccgctggcctatgtgctcgatttcctggcgattccgactgccgacgtagcctctatctccgagcgtcgtaccgaccgcttccttgacgtggcgcgcaaccgcggcctgccggcgttcctggctggtgacccgggcgtggactccggtttcatgatcgcccagtacaccgccgccggcatcgtctccgaaatgaagcgcaacgccgtgcccgcctcggtcgattcgattccgagctccgccatgcaggaagatcacgtgtcgatgggctgggccgccgcccgcaagctgcgccggtcgattccggcctttgcgcgcgtgctggccgtggaactgctgtgctcctgccgctccttcgacttccgcaagccgtaccgtccgggtgcggcgggcgccgccgtataccgcgtggtgcgccagtacgccaacgaaatcggccccgacgtacgcgatacctggaccaccccgcaaatcgaaggcgtagccaacgccatcctctccggcgaaatcctatccgccgccgaagctgccgtcggcctcctgaaatagatgtgagctccctcatcagagggggctactgttcaccctccccaccaaaatccaaaacttgagtcacctgcactcaagttttgggaatagaatgggttccaggtcggttgaccatatcagacaacgacaagttgcggtctgcggtggcgcttgcggggctttcgaagcccgcgagccgctccgcgcgggccgcatgatatggaggaatacgatatggaacagaagttcaccactatggcccaggaggccgtcggcgacgcgattcagagtgcgtccgccgcaggaaacgcgcaggttgagaccctgcacgtcatggatgcgttgctgcgtcaggaaaacggcgtggtgcgctccctcatcgaggctgcgggcggagacccgcaggccatcggcgccgccgtgcgtaacgctttggtcgcactgccgagcgcatccggctccagcacttcgcagccgcaggccagccgccagctgaccgccgccatcgcccaggctgagaaggaaatgcagcagatgggcgacgaatacgtctccaccgagcacctgcttatcggcatcgcggccagcaagccgaaccagtcggccgaaatcctggagaagaacggcgtcaccgcagcctccctgcgcaaggccgtacccggcgtgcgtggcggcgcgaaggtcaccagcccggacgcggaaggctcgtacaaggccctggagaagtactccaccgacctgacggccgccgccaaggaaggcaagctcgatccggtgatcggccgtgatcaggaaatccgccgcgtgattcagatcctctcccgtcgtaccaagaacaacccggtgctgatcggcgagcccggcgtcggcaagaccgccgtcgtggaaggcctagcccagcgtatcgtggcgggcgacgtgcccaccaccctgcaaggcaagaagctcatctcccttgacctaggctccatggtggccggctcgaagtaccgtggcgagttcgaggagcgcctgaagagcgtcctcaacgaaatcaagaacgcggacggccagatcatcaccttcatcgacgagattcacaccatcgtcggcgcgggtgcggccgaaggctcgatggacgccggcaatatgctgaagcctatgctggcccgtggcgagctgcgcctgatcggcgcgaccacgctggacgagtaccgcgagaacatcgaaaaggatccggcattggaacgccgtttccaacaggtgttcgtgggcgagccgagcgtggaagacaccatcgccatcctgcgtggcctgaagcagcgttacgaggcgcaccacaaggtgacaatcggcgatgacgcgctggttgccgccgcgaccctctcgaaccgttatattccgggccgtcagctgccggacaaggccatcgacctggtcgatgaggcggctgcccacctgcgtatggagctcgactcctcgcctgaggagatcgatgaactgcagcgtaaggtgacccgtcttgaaatggaggaaatgcagctcaagaaggctgaggatcctgcatccaaggagcgtctgggcaagctgcaagccgaactcgcggacacccgtgagaagctcagcggcctcaaggcgcgttgggatgcggagcaggccggccacaacaaggtcggtgacctgcgtgccaagctcgatgacctgcgtgtgcaggcggacaagttcacccgtgagggaaatctggctgaggcctcgaagatcctgtacggagagattccggctattcagaaggaactcgccgccgcggaaagcgcggatgccgaatctgccgatgccggcgcggccaacccggccgatgagccgatggtcccggaccgtgtggacgccgactcggtggccgagatcgtctccgactggaccggcattcccgttggccgcctgatgcagggcgagaacgagaagctgctgcatatggaggactacctgggcaagcgtgtgatcggccagaaggaagccatcgccgccgtgtccgacgcggtgcgccgttcgcgtgccggcatctccgacccgaaccgtccgaccggatcgttcctgttcctcggtcccaccggtgtgggcaagaccgaactggccaaggcgctcgccgacttcctgttcgacgacgagaaggccatggtccgcatcgacatgtccgaatacatggagaaggcttcagtctcgcgcctgatcggtgcggctccgggctacgtgggctacgagcagggcggccagctgaccgaggccgtgcgccgccgcccgtattccgtggtgctgttcgacgaggtcgagaaggccaatccggagatcttcgacgtgctgctgcaggtgctcgacgatggccgcctgaccgatggccagggcaggaccgtggacttcaagaacacgatcctgatcatgacctccaacctcggctcacagttcctcgtgaacgaggacatggacgccgacgccaagaagaaggccgtgatggacgccgtccacatgaacttcaagccggagttcctgaaccgtctggacgacatcgtcatgttccacccgctcacgcgtgaggagcttggcggcatcgtggatatccaggtggctggcgtggcccagcgtctgaccgaccggcgtatcacgctggacgtcaccgactcggctcgcgaatggctggccaacaccggttacgacccggcttatggcgctcgtccgctgcgccgcctggtacagaccgaagtgggcgaccagctggcccgcatgctgctggccggcaaggtccacgatggcgacaccgtgctggtcgaccagaccggtggtgagcatctggacctcaccgcacgttcgggcggcgacgatccgtccgtgagcgtggacgggattcaggaagaccggtgaccggacgattcgcgccgacgccgtcggggcgcatgcatatcggcaacgtgtacgccatgttgggtgcatggctttcggcccgttcgcgtggcgaacgcatgatgatgcgcatcgaagacgtggacgggccccgcgtggtcgccggcgccgaccggctcatgatggacgacctgcattggctcgggctcgactgggatggcgaaccgatgttccagtcccagcgcgccgaacgatacgagtatgcgctggaatgcctgcgctcgcagggcgtgctgtatccctgcttctgttcgcgcgccgacattcgcgccgcctcggcccccaacgagggcgacggcttcatggtgtaccccggcacgtgccgccgcctgctgcacgaccatcccgacgaggtccgtgcccgtctgtctcgcggcgaccagcattccatccgtatcgccatgccgaaaccggcagcgggagaaaagcaacgtacagtgcctgacgattccgctgcgctgtcgggagccgtgccgccggaacagcagggcgatgccggaatcgttgatggtgtcgcatgctttaacgaccgtgtctatagtccacagcactacgatttggcccgcgaggtaggcgattccgtgattcgccgagccgatggactgttcggctatcaactggtcgtggtcgtggatgacctcgatatggatgttgatgatatcgtgcgcggccgtgatctgctgcgctccaccgcgctgcaaatgtggattcgccagtgtctgttggctggcggctttgagccggaatgcggcaacacggaaaagcctctcgccgagcaccccgagtatgcgcacctgccgctcatcgacaatgcggccggtcggcgtttagccaagcgcgaacgttcgctggatatgggagccttgcgcgcccgcaacgtaacccccgagcaaatcatcggatactgcgcctggttgctgcgtctgcaacccactccaatcccttgcaaacccgccgatctgctggcagatttcagctgggagccgctgcgtgccaaccacctggaccgcgcgctgaagccggacgatccaaccactccacaatggctggcagaagcgttaggctagaggcagcccaacaggaaggattccaatgtcgtcgaagctctggagaaacgtggcgctggcaggcgtggccgccgccggtgctgccgtgtgggccgtggccccgcgcacgttcaatgacaagcgtcgtaatttcgtgccctccattccgaaggtatggtatgcccatcgtggcttgcacgatgcgggttctggtttggtcggctataccgatatcgctgattatggtggggataattcggtcagcgcccaagccgataccactgagcgatccatcgccgaaaacgatgattatgtgtcgcttgcccgtcgcatggctgtcaaggccggctacggcagtgcggatatgaccggtccgatcgctcctgaaaactcgctggccgcattcgccgccgcctgcgaggccggctatggcatcgaacttgatctgcagctgacgctcgacggccaagtggtcgtggtgcatgacgccgatttgctgcgcgtggccggcgaccctcgtcgcgtcgaagacctgacgtacgacgaactgacccgcattccgctgttccccggcagcaagcccggcgatctgaaggccaagccgctgcccggtgccgacgcgaatccgccgctggtggtcacgccttccaccgcccccgctggctactaccagcatgtgccactgttctccgatgtgctggacgtggtggccggccaggctccgctgattgtggaatacaagttcagcgacaatagcgcttgggatgctcgtaccgaggagctgatggagaagggccacgccctgcttgaggattatgacggtccatacgtcatcgaatccttccatccgggcgcggtgaattggtacaaagaacatcatcctgaggtgtgccgcggccagttgagctggccggcgaagctgagcaagaatggtgcggctgaatgggccgccggcttactggcgttcgactggctgtctcgtcctgatttcgtggcctatgactggaccggtggcacttcgccgcaagtcaggctcgctcgttcgatgggtgcgatgccggtttcatggaccgtgcgcagcagcgatgaactcgcccagtgcgcgccctacttcgaccgccacatcttcgaagcgttcgtccccgacgcagtgtgaggttgagggcgttattgatgtgcccatggggcggtaacttgcccatggggcggtttgaagaatatgtgaaaccgcggaattaagccattttggcataccgccccatgagggttttaccgccccatgaggcaattaccgccccatgagggttttaccgccccatgaggtatggtgttttacttgtgatatggctcgccagcgttgatcttataagcgcgataaatctgctccagcagaatcacgcgcatgagctgatgcgggaacgtcatcttcgagaaactcagcagaaaatcagcacgacgcagaatcgcgtcgtcaaggccgattgagccgccgatgaccagctgaatatggctggtgccacgcaatccaaggtcgttgattttggcggccaattcttcgctggacagctgcttgccattgatggcaagggcaataacaaacgcgccgtccttcagatgcttggcgatgcgttcgccttctttggccttgatctgtcggtcaacgccttcggaggcgtggtcaggcgttttctcatctgccacttcaatgatgttgagcctgcagtagcgcgaaagtcgcttggaatactcgtcgatggcgtcgcgaagatatcgttccttcacgcgtcccggcgcaataatgtcgatttgcataaaaagcccatcacattggctcccctctctgaggggagccaggaaaatcagtcaattacgccatagagacggtcgccggcatcgcccaaccccggcacgatgtagcacttgtcgttgagcttctcgtcgaccgcgcacaccacgaccttgaagtcgatggacggatcgatgtgctcttccacgaacttgatgccttcaggcgccgcgatgatgttgatcgcggtcacgtccttggcaccgcgctcggccagatagtgcgtggcagcaaccagcgtgccaccggtggcgagcatcgggtcgatcaggaagcactgacgaccggacagatcctccggtagacggttcgcataggtgacctgctgagtggggtgttcctcgtcgcgcttcataccaaggaagccgacttcggcggtcggcataagacgggtcatgccatcgagcatacccagacctgcacgcagcaccggcacaatgatcggacgcggtttggccagcttcttaccggtcatcggagcgaccggtgtttcgattggtgcggcaactacggacaggttgcgggtggcctcataggcctcgagcatcacaagctccgagacgagctcgcggaaagtggaggaaggagtgttcttgtcgcgcagcacggtgagcttgtgctcgaccagcggatgattcaaaacgtgaagttccatactccccagcctacccgtagttcgcggggaagtcacttgggcggcagtcgcgcgcgtatcgcacaccaatgtaaacagcgttcgacggcgggccgcgtaacaccgttgattttgtaacgtgagcgttatgtatgagacgcatatgaaatattcaggcaacggaaattcacgcaggcactgccatcgtatagtgcagtcggccggaagccagccgtcgatatacggcaagtggttcagcacgatatcaggcatcagggcacggtacggcaatcagcgtagacattccgcgggcgggcaacgttcgcggaatgtagtcgtatgtggggaggaagagtcatatgactcgattgcaaagactgaagatgggtgctgcggtgtgcattgttgccgcagtgcttgccaccagcggttgtggctggggtcgcaccgtggccgagaaagaggcccaagagaacaacgcgactgcggcaagcgacacctcatcatgtgtggacacctcaggcaacaccatcaaaatcggtttcgtgaattcgctgtctggcacgatggccatttccgaacagacggtgagtgattcgctgcacatggccgttgatgagattaacgcaaagggcggcgtgctgggcaagcagctcaaggtagtgcagcaggacggcaagtccgagccggctgtgttcgccgaaaaagccaagaccctcatcgaaaaggaatgcgtggccgcggtgttcggcggctggacgtcctcttcgcgtaaggccatgctgcctgtgttcgaggcggataacgcgctgctgttctacccgctgcaatacgagggcatggaagccagcccgaacatcttctactcgggtgctgcaccgaaccagcagattgtgcctgcgcttgattaccttaaggagcaaggctacaagaagctgttcttggttggctccgattatgtgttcccgcagaccgcaaatcgcgtggtcaaggcatacgccgagggcaatggcatggaagtggtcggcgaggaatataccccaatgggctccaccgacttcaccaccatcgtcaacaagctcaagttctccggcgcggatgcggtggtgaacacgctgaacggtgattccaacgtcgcattcttcaaggaatacaaggcttccggcctgaaagccgccaccacgccggtgatttccatgtctatcgccgaggaagaggtttccgctatcggcgttgacaacgtcaaggaccagctcactgcttggaactactaccagacgctgaacaatgcgcaaaacaagacgttcgtgaagaacttcaaggcgcgctacggagccaatcgccccacctccgacccgatggaatcggcgtacacatctgtgtacctgtggaagggcatggtcgagaaggccaagtcgttcgatgtggacaaggtcaaggctgcagcagacggtgtcaccttcaatgcaccggaaggcaaggtcaaggtggacggcgaaaaccaccacatctacaagacctcatacatcggcaagatcggctcagacaagctcatccacaccgtctggaagtcggacggtcccatcaagccggacccgtacctgaagacctacagctgggccaagagcctgagcgccagcgtcgagagcaactgagagaagaggacacaacaacatgggtatgttatttccacaaattgtggcaggtctgtccaacggatcgattctgctgctcgcagccctcgggttgtcgttgaccttcggccagatgggcgttatcaacaacgcccacggcgaattcatgatggccggcgcatacaccgcatacgtcatgagcatggtcatcggcaataaaacagtgtccctggccgtggcgctggtggtcggtttcgtagtagccggtttgcttggtttactgctggacgtgttgctgctggagcgtatgcgcaatcgtccgcttgatacgctgctggttaccttcggtgtatcgctggtattgcagcagctcgcacgcgatattttcggtgccactccggtctacgcttcggctcctgaagcgctgaccaatccggtgaccatctttggctacagcttctctgcaggccgactgttcatctttattctgtcgattatctgcgtggctgcgctgtacgcgatcctgaagctcacgccgctgggtcgccagattcgcgccacttccgagaaccgcgacctcgctgaggtttccggcatctccaccaagatggtcgaccatgtgacgttcttcctgggctccggcatcgccggtatcgctggcgtggcgctgagcctgctgaactcgattagcttcaacttcggtacgaccttcatcgtgcaggccttcctggttgttgtggccggcggcgttggccagctcaagggcgcggttatcgcctcgttcgtgctgggcttgtgccagtcgtccatcgaactgccgacctctgcctcgattggtcaggttgccgtgttcctgattgtggtggtgttcctgcagttcaggccgcagggcttggtctccatccgctccaggaacctcgcgtgagtgcttcagaagggtaaggaaacgacaatgaagatgactttgagcgaatacgccacgaaatataaggctttgatcggtgtggtcattgccgtggcgctgatcttcctttctccgactgtgctgagcgtgtacaacctcggcctgctgtccaaatacctgtgctacgcgatggtcgcggtcggcatcggcctggcttggggccaaggcggtatgctgacgctgggccaaggcctgttctttggtctcggcgcgtacgtgatggctatccacatgaagcttgaggacattggcgtgggccaagtgccggacttcatgtcccagtacggcatcaccaaggttcctggattctgggaactcttccgcaatccggtcatcgccgtgattggcgtggctgcggtaccgggcattatcgccgcaatcctcggtctggctgtgttcggccgtggcgtgcgtggcgcctacttcgcaattctttcgcaggcgctggttgccgcgttcgccgtgctgcttatcggccagtcgaaaaccaccggtggcaccaacggtctcaacgatttcaagggattctttggttacgacttgactgataacgccaacaagcagatgatcttctacatctgcgcgttcctgacgctggccatggtgcttatcgtctactggattcgcaaatcgtttatgggcgacctgattatcggcgtgcgcgaccaagagaaccgcatgaagttcttgggctataaccccgcctccatcaaggtgttcgccttctcggtggctgcaatgttcgccggcattggtggcgcaatgttcgtgccagtggtcggcatcatttcgccgtccgatatcggcgtgacgccgtccatcctgatgctcgccggcgtggtgatcggcggacgtgccactttgctcggcccggtggtcggcacgctgctggtgcgctttgcggaaacgcagctgtctgaggcgtatccgtccgcgtggacgtacatcgaaggcctgatcttcattctggtgattgcctttgtgccgaagggcttgggacagttcaagggcgtatggccttggattaaggagaagatcgggctcggaaagagttcggttggagcttcggctggtgctggtgctggtgctggtgctggtgctggtgccggtaccggtactgctactgcaaaggcggtgaacgcatgagtgaggagaagaacatgagctcgaatccatcggctcccgcacctgcatcgcaggccgatttggagcagttgcgcgccgaaatgattgagatgcgcgacgaagccaagcgtatgcgcgacgaagcggcccagatgaaggccgaaatcattgaagagcgtacgaagctgcacgatcagcttgcggtgctggatgatcgcggcggccagtggagcgattatctggaagttcgtggactgcacgttgagttcgatggattcgtggccgtcaagaatcttgatttgactgtgcagcacggcgatttgcgattcctgatcggcccgaacggtgctggtaaaacgaccatcatcgacgcgattaccggactggtgccggccactggttccgcggaattccgtggcgagcagctgttgggccgcaagccgaacgacatcgtcaagctgggcgtcgggcgtaccttccagaccgcatcggtggttgaagagctgtccgtgttggagaatctgcagctggccgagggcttccgcaagaagggtcgtgagctgttccagccgatgggcggcgtttcgcagaacatcgaatacatgatggacgtgtgcaatctgactgtggatgcaaacaagcccgcaggcatcctgccgcacggcaagaaacagtggctggaaatcggtatgctgctcgtgcaggacgcgcacctgctgctgctcgacgagccggtggccggcatgactccggccgagcgtgtgcagaccggtgagctgctcaagcgatgcagcaagaaccgcacggtcatcatcgtggaacacgacatggatttcatgcgtcagttcgccgattcggtcacggtgctcaaccagggcgaaatccttgccgagggttcggtcgaagacatccaaaacaacgaagaagtagtccgcatctacctgggcggcggagaaaactaactccctgtctcccctccctgaggccgaggcgttaagcaaacagcccagtgggctgtttgtagtcgaaggtgagacgatagtcgaaccagcaggttgcaggcaaggcccgtccttaattgcggacgagctgtcaccgaaggtgactgaggggagtaggtaagaggaagaagcgcaatatggaccgcactgacaacaaccatcgcatcccggaatgcgctttttcagtgcatattgagggtgatacaacgcgcctcaacatcaatatgcacgacgccgtagaaagtgaataatcatggcaatgcttgaagtaaaggatttgaacaccggttacggcaaagtgaccgtcgtcaacgacatcagtttcgacgtggccgccggcgaatgggtgagcatcgtcggcaacaacggtgccggtaagaccacgctgttgaaggcgattctgggcttgctgcccgtttcgtccggttcgattagtttcgagggcaaggacattaccaaggctgcaccgaaccaacgcatccgcaagggcatggcgttcgtgccgcagggccagcagtcctttggcaccatgaccgtggacgaaaacctgcacgtggtcgccgaccgctacggttcagaggccaaggcccgttacgacgaagccgtggaaatgttcccggtcttgaaggaatttgctggccgacgtgccggtctgctgtccggtggccagcgtcagcagctttcgattgcccgcgcgctgatcacccgccccaagctcatgattctcgatgagccgaccgaaggcatccagcccaatatcgtcgccgaaatccagaaggccattcgcatgatggccgaagacaagggtatcggtgtggtcttggttgagcagaaggtccaattcgccgtcgagcgcgccgaccgctactacgtcctggcctccggccgtttcatcgccaccggcgaaggcggccccgaccaagtagaagccgccaaggaatccatgagagtgtgattaattcgacccccgtttatggccatagagcgttatgagaaacgtcccgttcttataacgctcttattattgggcgatgttagggctcacattggtgtgcctgaaaaactccagtcaacaacagaggatgttatgagacttacaccacgagagactgacaagttgatgctgtacttggcggggcagcttgccaaagaccgcaaagccagaggcgtgaagctcaactatgtggaggcgattgcgttgatttccgccgaatgcgttgagcgggcgcgtgagggaagcactgtggcggagctcatggcatacggtcgcacgctgctcaagcctgaagatgtgatggatggcgtggccgagatgctggaagtggtggaggtcgaggccacgttcccggacggcaccaagctcgtctctattcataatcccatcgaatccaccgagaagttggtgccgggggaatatctgctggctgacgatgatttggaactcaatgaaggttccgaagacatcgagctggacgtggtgaacactgcggatcgaccgattcagattggttcgcacttccacttctttgaagttaataagtacctgaagttcgaccgtaaggcggcgtatggcaagcggttggatatcgcggctggtacggctgtgaggttcgagccgggtgaaacgcatcgagtgcggttgattgatattggtggcacgcgtgagattcacggcttcagcgcactggttgaggggaagttggatgaccctgaggtgcgggaggccgcgtttaagaaggcgcatgagcttggattctcgggaatctgagctaagggccaccctcagtcagcttcgctgacagctcccgccagcggggagcggactacctctcagtctcgcttcgcgagccagctcccctgacaaggggagctgaaaaacagcaaggacttttgacatgaagattattacgcgcaaggattatgcgggaatgttcgggccgaccacgggagaccgcgtgcgactcggtgacacgaacctcatcatcgaggtggaaaaggactacacgcactacggtgatgaactgaagttcggtggaggcaaatcattccgcgacggcatgggccaaagctccgtgcagctcgacgttgaatcgccggataccatcatcaccaacgccctcatcgtggactacaccggcatctacaaggcggacatcggcatcaaagacggcaaaatcagcgccatcggcaaggccggcagcccgcagaccatgagcggtatcacccccggtctcgaagcgggctccggcactgaagctctcgccggcgaaggcctcatcgtcaccgcaggcggactcgacacccacatccacttcatctccccgcagcagattcgcactgccctcgccggtggcgtgaccacgatggtcggcggcggcaccggtccggccgacggcaccaacgccaccacctgcaacccgggagccttccacctgacccgcatgatcgaggccgccgaagcgctgcccatcaacatcgcctaccttggcaagggcaacgactccagccccgaaccgttgcgtgagcagattcgcgccggtgccgcaggcctgaagatccacgaggactggggtgccaccccggccgtcatcgacactgcactcggcgtggccgacgaaaccgacacgcaggtggctatccacaccgatactctgaacgaaggcggttgtgtggaagacaccatcgccgcgttcaagggccgcaccatccacacctaccacaccgaaggcgctggaggcggccacgctccggacattattcgtgccgctggcttcccaaacgtgctgccgagttccacgaacccgaccatgccgttcacgcgcaacaccatcgacgagcatctcgacatgatgatggtctgccaccacctcgaccgcaatgtgcccgaagacatctctttcgccgactcgcgcatccgtcccgagaccatcggtgccgaagacgtgctacacgacatgggcatcatctccatgatgagctccgactcgcaggccatgggccgcgtgggcgaggtcatcacccgcaccatccagaccgccgacaaaatgaagaagcagcgcggtccgctccccgaagacgaacacgacaacaaccgcaacgacaacttccgtgtcaagcgctacgtctccaagttcaccatcaacccggccatcacccacggcatttccgaatacgtgggctccatcgaagtcggtaagatggcggatctcgtgctttggcagccgtccatgttcggcgcgaagccggaaatggtcatcaagggtggctccatcgcctactctcgtatgggtgacgcgaatgcttctatcccgaccccggaacctgtctactaccgcgatatgttcggcgcgctcggccgtgcgcttggcaagtcctgcgccacgtttgtttcgcaggccgccgtggatgacgatatcaagggcaagctggagctgcagcgccaggtgttaccagtgcatggctgccgcacggtaggcaagaaggatctgaagttcaacgacgtgctcgccgacattcaggtcaatcccgaaaccttccaagtgacggtggacggcgaaccggtccactctgacccggcgtacgagttgccgcttacccagcggtacttcctgttctgagagaactggtggctctcctcaaaggggagagccacttggttttagccttcggccacgaaatcggtcacgaaatcggccacatctcgaatgaggtcgaaggcgtcgtcgcctcgggtggtcagtacacgcaagcagatgccattgattacgcggctcacgccgagctcgccggtgaagccgatggcgtctgcgtgttcgtggatgcgagtgatgagcgcgtcttcggcggcgatgcgggcagtctcgatgcgctcgcggatggcggcggaggatgcttctttagttgcggcatcttgtacagcgtcgctagggtcgagttcgggcaggtgagcgtagagaacgccgcagtgggtgaattcgcgccacatgccgagttcggtgtagtcaaaagcatcaggttccaacagcatgcggtcagcaaaggccagatgttcgcgcggttgggcagcggcggcttccgccttggaaggccggcctcggcgatgtgcgtgctgttgcgccaattcggctgcggcggccttggtcacggcttcgggttcggccacatatacgcgcatacgattcgtaaaacgtttcatggcccaacgctcatccatcccaacgcggccacatgtcgccacatccgcatacacgaatgctgactcggcggaaatatgcgcggtggtcaggttcatgaatgagctgttcttgaacggaatcactgggaacggcaggaacacggctttggcattgccacgcgccctgagttcgatggtgcgttcggccgagccgtccgcggtgtcgaacaccttctcgtagctttgcgttttgatggtcgaatcggtgcctgggccgaagtcgatatcgatatgggcttcatcgcccctcaggaagccaggggaggcgagcatcacgacgaaatccgaatgacgtccgttggtgaacggggtcatcagtttgaacggcgcctcgaaataaatatcgtcgattttggtacgtccgtggcggaatgcagtggatagacgaaaagtgctactgcccatggacgaatcgctgccttcttatgattggtgcctgacgatgacatgggcaattatgccgcacttggtgcaacggtatgtttcggcccgtccgtttttggatacgggcgggccaaaacatcacatgtcctcgaacagcacgctcttcttgatccatgcgatgacgtcgtccactccggcaccgcccatcaggtcggtgaagatgaacgggcggtcgccgcgcatcttcttggagtcgcgggccatcacgtctagatcggcgtgaaccaacggggccaggtcggccttgttgatcaccagcaggtcggagcgggtgacgccggggccgcccttgcgtgggatcttgtcgccctcatcggtggcgatgacgtagattgtggagtcggccaggtccgggctgaacgtggcggacagattgtcgccgccggactccacgaacatgatctgcacgtccgggtgggtgcgggccatttcctcacaggcctcgaggttcatcgagcagtcctcgcggatggcggtgtgggggcagccaccggtctccacgccgacgatacggtccggcgcgaggcgtgagtgctcgataaggaactcggcgtcttccttggtgtagatatcgttggtgaccacgcagatgctgtattcgtcagccatcttgcgggtcaggcgttcgataagcgcggttttgccggaaccgaccggtccggcgacgccgatgcgtacgtatgacatggggtttctcctttatgtgggaattagttaggtatgtggtttgcgggtgaggttatcctggctcccctccttgaggggagccaggataattagctcatgtagagcctcgagtacaagatttcatgctgcatggcggcgatgtcgaggtaagctccggagatgccgagatcctcgggcttcaacgtcatcgcgatattcaccgcgcgcacgaggcgcgggaacgaatcatgcagggcgacttggccagcgtactggctgagcggaatcgccttcgcggcgcacatggtaagcgcgctcaacagcgaatatccatacatgatggccgcgtcgcgcacgtcgttcgcatggtcagccgcgtacaggcccatcgcgatcgaatgcaggccacggcagcggcgctcgcgaatcagcccggcatacaggtcgagcgacggcgagccgtacaggccgtcggcggcatcgtgcagctggtggcgttcggtgtgatgctcgtgcacggcgatgatgctgttttcgcgcgaatccgcagcggatgcggtggcattgtcggcaggacttggcttggcgaccccacgatgcccatccgaggtctgcgcctggccggcatccatctgctcggccagcttgaccaggcgggtacacatgcgctcgctgccttcacggatttcacgtgcggattgcagggccgaggccagctcgtcaagttcgatgagtcgctcggccagccctttgcgggagactcgcgaatcggtggcgtacttgccggccagcaccatctgcccgatttccttgtacggtgcgacttcgaggtagttcttcatatactcctcgaaatcggcgccacggcgcaagaagtcgcgctgtacgaaggtctccatgccgttggacagcgcgaacgcgcccacggggaagacgctgtcgcacacctgcagcatggccagacgtcgcgattcggtttcgttgatgttcatggggctatcagtgggtgtgccaggtgcggccgccgtcgtggctgtgggagccgtccgggcggtgcagcacgccgttcatctcatattcggcgggctcaccctcacctgcgtcgtgtgtatgcacatccagatggccggcggcctcctcggccgggaattccttgtcggcctcggcttcctgctcctcctcggccacgtcgcccgtggtcttgttggtgcccggaatcagtgtgccggtgccggcgtgggccttgacgatcaggaagccgtcaaacccaccctcgatgatatgcggttcataaccgatcttcttcgtgtattccatggtcggatggtcgtacggcaccagcacgcggtcgttctcgaccttgagactcaggtggcggttgcccagttcgaagcacaggcgtcccatttccttcatcgagttaaccggaatctcaatcagctgtgcggttttaatgcgtgcgaaatagcgcttgtcttcggtttcggcgagcacatcgccatccttgatggtcttgccaaccatgatgccgaactcggtgccgtcctcggccaccttgcgcatgcgcttcttatcggtttcgaaccagtcgaaggcaatcgacacattaagtttgccgtcgctgtactgctgactgatgatgttgccggtgatttctttggcgatcatccgttctccttggagaaaattgcttgtggcgtgagaatccccacgtccttcatgccacagtgtagagagcctgttgcgtcactttgtaacgaatgatcgaaatatgcaaaaaatatagcggaaaaatatccgaaaacacggaaaccggatatatggtacacggtgtgtcgctagtaattgcaagctattttgcatggttgtgcattagacgaatcacagttgtggtattacatatcacgttcttggagcgggaggttgtggtcgagctccgaaatcaacaaaaagagggaagttggatataatcgaagtacctgacaccgtcacattggcgatgcacattccggataatttcatttcgccgtccaccggggcgttgttctacgtcatcatgattccggtgtgggtgctgtgcctacgctacgtgatccgcaacagcacgccggagaagatggcctacctgggcgccggcgcggcgttctcgttcctcatcatgatgttcaacgtgcccacgcccggcggcaccaccgcgcacggtgtcggcggcgcgctgatcgctctgctgctcggtccccagtacgcgacggtcgccgtgtcggtggccctgctgctgcaggcgctgctcttcggcgacggcggcctgatcacgctcggcgccaactgcttcaacatggcgttcgtgctgccgtttgtggcttacggactgtacgtgttgctacgtaaggtgctgcccgacggctggaaggaacgcgtggccgaattcgtgtccggctatatcggcatcacgctcgccgcattctgcgtggcgctggaactcggcgtgcagccgctgctgttcaaagccgctgacggccaggcgctctacttcccgttcacctttaacgtgacgattcccgccatgctgatcccgcacctggccgtagccagcgtggtcgagggtctggtgaccgtggtggttgtcgaattcgtgcgccgcaccgcaccggagattatcgaagacaatgcccgtgtgaacttcgccgagaccgccggtgctgacggcaaacaggtcgcgcacgccggactgcgcaagtctgcgtggattgcgctggccgtggtggcggtgctttccccgatcggcctgctcgccaccggcgacgcctggggcgagtggggcgccgaggacttcatgagtgccacggggctcaactacgtgccgcagtacatcgcccatggcttctcgtgggatgcgctgttgcctgactactcgctgcagggtctgccggacatcgccggctacattctctccgcagtgattggcatcgccgtgctcactatcgtgttccgtctgctggcgctcgcggtgagcggcaacggcaagacatccgcgcgttgacgatacctgcatggatgcgtgagtcggaggattacgatcctccggctgacaagtcatccttcatcgaacacaacctggggcatttcggcagcgtactcgagcaggttggtcatgcgttgccgattgagtcgagcccggtcgacaaggtgctgggctcggtcaatccgggcgtgcggctgctgggcatactggccgcgattgtctgcgtcaacatcacatgcaacatgctgttctcgtacatcatgctggcggtggtgctgctgatgatggcgacccggccggcgcgcctgatgagggcgttgctcggcccggtgctggccgtatgcatcctgagcctggtcgtggcggtgccgagcctgctgattgggcagtacagtgcgccggtccggctggtggtgcgtgcgttcgtggcggtgtcgctggtgatcgcactggcgcgtacggtgccgtggaatcgcctgattgccggactgcgcgcagttggctaccctgattcggtgatttatatctgcgacgtgacgattcagttcatcgatattctcggtcgttcgatggtggagttgctgggtgcgctgcggttgcgcagcgtgggccgcgaccggaccaagctgacgtccgccggccagttgatgggcgcgctgtttctgcgtgcgaatacgcaggcgcggcaaatggctgaatcgatggtgtgccgggggtttgacggtacgtatcatatccaccacgagcgtctgctgacgtggcgcaacggggtgtatgccgtgtgcattgctgcaatgattgcgctggcggtgtattcgggatgagggtggttcgaatgaatggagcccaataatgttcggattaaagcgtaatcataaacaaactgcagccatgcagccagataactcatggttccgcggcgacccgctggtcgaactgaatcacatcgacttttcctataaagattacggcgacgccgacgatgaaacctcgtcgcacgccgtgctacgtgatttttcgctgaccgtcgaacgcggtgagcgcgtggcgctgctcgggccgaacggcagcggcaagaccacgctgatgcgcatcatcaatgcgctggaatttccggactcaggcgagtatcggtttggcggtactccggtggttcgcgaggaagtcgaggcgaagaacagcctgttcgccaaagcgctgcatcagcgcatcggattcgtgttccaaagctccgacacccagctgttctgcccgtcggtggaagaggagattgcgttcggtccgttgcagatggggttgccggatgccgaagtacagcgcagagtcgatgacatggtgacgttgttcggcttggatcggatgcgggagcgggcgccataccgtctgtctggcggtgaaaaaaagcgtgtggcgattgcctgctgcatgtcgatgaatccggacctgcttgttctggacgaaccgaccgacggcttggacgagcgcaatactgacgtagtggttgaggtattgcgcgccttcactgatgccggcaagactgtactgttctccacgcatcaccacgacatcgtggagcggctcgacgctcgcatcgtgcgcgtgcatccgtcactatggcaatgacattcacgtggcgtctattggatatcttcatcgaaaaaagcagaaaggcatcggcgaggatcgcgagtccggcgagaactgcgatagtcgctttggtgatggttgccttcatgagagtttccccaaggtgttgacgttgatttcatgagattcgaaaaagagcgtatctaggccgaaccggacagtaagtcaacggtttctggaaaccagctgaaaaagctacggtattgtgaaatatgtctcatcggaatgggtcaagtttggcctagcgctcgcagtcgtgcgcgaagattcgttggattgattctcggtggattaagtcataggaagaaactagacaccttgcggtgtaaaaccgggaatcggaatggtgtaaaaccgggaatggaaatagtgtaaaatcgggaatgagaaaggtgtaaaatctatattgaggtgattgggtagctgagaaaggccggaaaatgaacgatttgaacaatcgtagtgataccttgactcaacctgattatcgtgctcgcgtggtcgatggcaggttaggtaagttacttaaagcattcggcgcggtggaaatcgtcgggccaaaatggtgtggaaagacatggacggcgctttcccgctcgcgaagtatggatcgtctggatgatgccgctacctttgcggccgcacagactgatccggcattggtactcatgggtaatgaaccgcatttggtggatgagtggcaagatgtgccgcaaatttgggatgccgctcgtcgtcatgtggatgacaatgcgaatcgcaaggggcagctgattcttacgggctcggccattccgaaggaccgagaaacaattcaccacagtggcacaggtcgaatttctcgcttgcgtatgtggcctatgagtctgtgcgagtcagggcaatctaccggtgtagtgagcttgtctggtttgtttgatggacaattcgagcctgccgaatgtgcaaccagcattgaagatattgccagatggtgctgtcgaggtgggtggcccgcaaatcttgatttggatgacgagtttgctctggaaattccgagtgaatatatcaagagtgtgcttgatatcagcgtgcccaagatgaacaagaaccctgaaaccgcgcgtgcactcatgcgtgcgctcgccgtgaacgtatcgcaggcaccaaaatatgcgacgctggctgcggatatggcctatggcgatgagcgccgtgaaccggatacgcagacagtaaagagctatttgggaatgctcaaggacttgtaccttctgacggatttggagggttgggagccgccactccgcgcaaagagtcgtgtgcgaaccaagcccaagcgatatttcgtggatccttcgttgcctgctgcggttttaggtgccgcgccgaatactctgatgcgcgatacacagacgctcggcgatctgtttgaaacgctgtgcattcgtgatttgaatgtatatctgtcggccatgccgggcgcgaacaatcgcatcgcctactaccgcgatgacaaggggcttgaagttgctgtcattatcgagttgtctgacggcaggtggggtgctatcgaaataaaactcagtgaccttaaggtgaacgatgacaatgcggataagctcaaatccttccgcgacaaaatctgtggcaaccccatggcccaagttcgcgaaccagagttcatgatgttccttaccggccgaggtgggaaggcctatcgccgcaatgacggcatactggtcgtgcccatcgcaacgttcggggcgtgaatcgggtaaaagaaaagaagcgccgaaccgcgaaagcgcctgtcggcgcaagggccgctcgcggcggcaaaaaatggagcccggggcttaagcacggtccgacgcggatacttagtatagcttgcgatggggctcgccgcgccgggggaggtgtggtgttggctggtagctgattgttggggtgcggttggtgggtctctccctcagtcacgggcatcgcccgtgacagctccctcatcagagggagcctggagcagggctactccaaccgtccgcgacgccagaggttggcaccgtgctggaaatccttggcggtggccatgaggctgccggcggtgtgcataaggcgggcggctttggtgcgcacggccttctcatcggcatccgaggagaaggcgccgttggcctcggcccgggtcaccatgcgccgcgcctccacgcgcaagcccaacgccaccacatcggtaaacgccgccgcacgctcaagcgccacggcaaaatcgcccacaaaagcaccggagagaatcgaatcggccaatcgcacgatgtcatcttcactgggagcctgatccacgccggcgatggcggaggcggtagtggccaccggctcacccaagcgccacagatgcgcgatcgagtcgcgattcgatcgcatccacgtacgcaacatatacagtcgccacagcacaccaggcagcgaatccggctcggcatcgctccatagttcggcgatttcatccacgccgaccgtctccaccaacgtgagcacccgctcaacaaccgccgggtcttcgctatggcgcacacgatccagcaatgcggcagcagacagatgactcatctcgctcaacgcctgcgggtccatgccaccggccaatccatcggccacagccgggtcgagctgagccgggcgcgaggggcgtgaagaacccatgcgagcaggtctgaatgccgctccggccgcacgcaacgagccgaagcccgggcccagactgccggcggcaccattgtgcgcggcatgagccgcggcggcagcggccgaggagttggatgaatcaggaaatgcgggtctagtagacaagcggttgaaccttctgaatatcgatgattttgggaccatgaggcgtcggagtgacgaacagcgccaccgccgtgccggtcggcatgaacggtgtcttggcgatcaggcgtttgctcagagacggcgcaacgcacatgctgcgcaggtgtccgaacataccaccaatcaccggccggtgcatgcatatcgctatgggctgacggcgctcaagtgcgaactcgatttcgctgagtagacactcccatgcggtgtccggcgcagcggcgtatgcatcttcggtgagcggatcgagatgaaccatgtctcgtccggtctgccacgcgaacatctccaacgtctcctggcagcgcacccaaggcgacgtggccagtcgggtcggattgaaacacgccagctcgcggttcagcgcgtatgccgcagccgcgccgcgcggcgtgatcggacggttcgcgtccgaacccttccacagcttgcgcgcttccgctttgccgtggcgcacgataatcaccggcaccgcgtccagtgcaccttcttcgacccgatcaacgaatagcgcgaggatgtccttatcggtggaatggctgagcttcttgcgggcctcggccggcgtcagccacaaaacttcgtcgatttcgccgatgtccgcccgatgcaccgggccaaacgcatgggtacgccgcaggttgtcgatggcgctgatcggcgtggccatccagaactggatatgcttggtatccgccgaccgatccttggtatggcgctgtttgctgccttcttcggacagcgggtactcgatgtcgcccagataggggccaagttccacggacaggcccgattcctcgccgatctcgcgtacggcggcatgccggtgcgattcgttcgggtcgaccttgcctttcggccagctccagtcgtcgtatttcgggcgatgcacgacgcacagttcgatgcggttgagtacgttgtccgccgcggccgggctgtcggcctgcgccgggtccggggtgggagccgcgtccgatgcgccgtgtgctgccgtggccttgccgtcagaatccgtggtgttcgcgatgatggtgccatcggtggcaatattggatttcgctgatggagatgatgcctgcgtcggctcggcatcatccttccaccggtacagaataccgccggcggcttccacgattcgtctcatactgttcgtacccatctcttgtattgtaggtcacgttggaccgctgctacgtagttttgcgcgctgaacaacgatgcccggcatcctctcgaaagaggagccgggcatcgtaaccaccctcagtcagcttgcgttgacagggagcatcgagtgaaatcagttgtgcgaattggggcggcgctggtgcttgcgaatcaggtattcctgactatcgaccagcgggcggccctcgtcgtccttggtgtgcagcacatacgtgccgtcgggctgcatgtgccagctcatggtggagtcggccatctgcaggtccacgtacttgatgagcccgtcaatctgctccggggcggtgacacgcaccagagcctccacacggcggtcaaggttacggtgcatgaggtcagccgaaccgatgtagacctccgggccggaagccggaccctcgccgatctgcgggccgtccgcattgcagaaggcgtagatgcgggagtgctccaggaagcggccgagaatcgaacgcacgcggatgttctcggacagaccgggaacgccgggcttcagagcgcagatgccgcgttcgacgatgtcgatcttcacgccggcctgagaggcacggtacaaggcgtcgatggtcttctcgtccacgatggagttgaccttgatcttgatccaggcctccttgccggcgcgggcggcgtcctcctcgcggcggatgcgctggattagaccggtgcgcacggtgcgaggggccaccagcaaacggtggaagctggacttcggcgcgtaaccggagagctggttgaacagacgagtcagatcctggccgaccaccgggtcgcaggtcagcagacccagatcggtgtacagtcgcgcggtcttcgggttgtagttaccggtgcccacgtggcagtagcggcgtagaccgtccgcttcctgacgcacgacttcgatgagcttgcagtgggtcttcaagcccacgatgccgtacaccacgtgcacgccggcgcgttcgagcttgcgggcccacgcgatgttggcgtcctcgtcgaaacgagccttgatttccaccaaagccagcacctgcttgccggcatgagcggcgtcgatcagggcgtcgatgatcggcgagttggagctggtgcggtacagggtctgcttgatggccagcaccttcgggtccgcggcggcctgcgcaaggaaggcctgcacggaagtggagaaggagtcataggggtgatgcagcaggatgtcgcgctcgcggatggcggcgaaaatgtcctgcgcacgggaggactcgacctcggcgatctgacggttcgtggtcggcacgaacggacggttcttcaggtccgggcggtccacgttgccgagctcaaagagcacggtcaggtccagcgggctgggcagacggtatacctcgtcctggctcacgccgagctggtcggcgagcagctgggagaggaacgggctagtggtgtccgtgatctccagacggatcggcggtccgaagcggcggcgcagcagctccttctccatggcgttgagcaggttctcggcgtcatcctcttccacgtcgatgtcctcgttacgagtcacgcggaaggagcgggcttccttgatgatcatgcccgggaacagggattccagatgcgcggcgatgagcttttccatggcgatgaagccgtaacgctcgtccttggactcctcgtcggtcatgtcgtccaccggcaccaggcgcggcaggttgcccgggatcttgacacgggcgaagtgcgacttgccggaggccgggttctccacaatcacggccaggttgatggaaccgccggaaatgtaggggaacgggtgggccggatccacggcgagcggcgtcaggaccgggaacacctgctggcggtagtagcgcgagagacgctcctgctcggaggaggtgagcttgtcccacgtcagcaggacgatgcgctccttctccaattccggcagaatggtgtcgatcgcgtaatgtgcgtgctcgtcttgcagacggtgtgcggtctcgctgatcgcgcgcagctgctgacgcgggctcaggccggcggcagacggcacggcgatgcccgagtcgatacggcgcttcaggccggcgacgcggaccatgaagaactcgtcaaggttcgaggcgaagatcgcggcgaagttggcgcgctcgagcaggggcatgtcttcgttctccgcgcattcgagcacgcgctggttgaacttgagccagctgagctcgcggtcgaagaaacggtccttgggcagcggtgcctcgccttcctgatcgacgcggcggtcgttgttgtcgttttcggcaatatgctctgcgatttggctgcgcagaattgccttcgagggtgcgtcaaatatctgtgccatagtctatatcgtaagctctggcgtggccggaaaacggctgaacgcgccagaattcaacgggtgttcatgttagttcggtgttggttggttctgagtgtgctagcgtgctcgcgacacgccgtgagcggcggtgaaacgaacgaaaccgaacatcagacgggttcgatgtgaacggttcagctcgttttccgatagccagaaagtgcgattgaacagttgtgataaaaaacgcacaacgactctctgcaggttgcgagaaacgggagtgatgaatagattatgaggtacaagaacaactgaacagagcagagcccacaaatagtgtatggtcacgaggactgttacgttggacgggcattggaaagacttaccgttacgacgatgatgttgtgcagagattctgctccagtagttgaacttgtagaaaaggcccgctccggcgggccttttcgtttgtgtgtacagtggagggcatgacggaaacacagcgtacgccagaggggatgtcgtcgaaaccccgtatcaagccggccgatgccgaagacggccgcccggtctctatctctgcgcgtctcggacgactgcaattccactattccggcaagttccgcgtgctgcagattgccgacattcaggatgggccgaaagtctccaaagacaccatcgccctgattgaggccagccttgatgccacacggcctgatctggtgattttctccggcaaccagatcgccggctacgatccggcctttgccaagagcttccgcaaacgccgttggtgcgaagaggcgattcctgaatctgtgttgaaccatacgcgtgaattggtgcgcaaggccatcggtcaatttatctctcctttggcgtcacggggcataccgtgggcggtgacctacggcaaccacgatttccagtgcggtttgagcaatgccgaactcgacggaatctaccgcgagtttcccggttgcatcaatccgccgagcgatgcgctggccaagcagaccgtatatatgtgtcataaggacggctcgcctgcggcaaccaatggtgaagaaaccgatgcgccgatttccgcgtccaccattcccggcacttttgcattgccggtgatggatgtggattgcacgcgcaacgtactgggactggtactggtgaattccggtgactatgcgcatggaggcggtttcggcacgccttcgcccgagacattggccttcctcaaggctttgcccgaacatatcggagccaaatcaatggtgttccagcacatgccgctgccggagtattaccaggtactcaaaccggtggccgccaatgcggctttcgccatgcagggctaccgcaagcatgcggatacctattatgtgctggacgaggatcgcactcaagccggcgggtatctgggggaaggcatttcctgcccggatgagtcggacgagtttgaggcgctgcgcgaggggtatttcggcgtcgtagctggtcatgatcatcgcaacggtttcgtcggcgaacatgagggtctgttgcttatcgctacgccaacctgcggattcaatacgtacggaccggctccggccaaacgtgccacgcgattgatcgaatttgatatccgtcacccttacgagccgcgtacgcaattgctggagtttggcgaactggtgggcaagcccagttccaaacgcgcctacacctatgcggtgaaccaaaccgcgcctggcgagggcgagggtgatgatttgctgcgcaagccgtcgctatggagccaactgtccggcctgtttaggtagcgcataacaaaactgcccccgccagcgggggcaatgtatgtgatgactagcgaacggctttgaccagtgcctcggtgaggtacttgccggcggccatcaccagcggcgcatagcggcgtccgggggcggcacccatgcggccggtcgggccggaaatcgagatggcggcgatgacctggccggaggcgttgcggatcggggcggaaatcgagcacacgccctcttcgcgttcgttcacggactcggaccagccgcgcttgcgtacggcggccagcttggtggcggtgaacttggcgtggcgcaatccctggtgcagacggtcggaatcctcccaagccagaagaatctgggcggcggaaccggcttccatcgacagcatggcacccaccggaatggaatcacgtaggccggaggtgcgttccacagcggcgatgcacacgcgctgatcgccttggcggcggtaaatctgcgcagactcgccagtgcgatcgagcagggtctgcaggatcgggccggcggcggtcagcagacgatcctcgcctgctgcggcggcaagttcggcgaaacgggagccgagtacgaatcggccatgctggtcgcgcagtacgaaacggtggcgttccagtgcaatagccaaacgatgtgcggtcggtcgagcgagaccggtggcggccacaagctggcccagcgtagacgggccggattccagtgcgtcaagaatctttacggttttatcaaggacgccaacgccggaatggatttccccatcgtccttggcggcggtgtcttcaaccggctcggactcggtcaagctgttgttcaatggttcttcccgggaatcagtcataataagggcgattatgccatctcacatagtgaaatggcaaattggggaagtgtctcacagggtggccatgaagttgaaagggcgttcgtggatgccgaagagacatgtctggagtggaaccgagtcatgactaggtcatgttcgagtcgggtccgagtcatattgaggccatcatttgaccgtatctcaatatccggcatgctcatggccgggcccatcgcaagcacataggctaataccacgaacaaggcgcgaacacaatacctcgcgcggaattttttggaggaatcactatgggaacgacactggccgagaaggtctgggccgatcatctggtgcgcaagggcagcgacggagctcctgatttgctgtacatcgatctgatgctcatgcatgaggtcaccagcccgcaggcgtttgagggcctgcgcttggccggccgcaagccgcgtcacgtggatcagctcattgccaccgaggatcacaacacgccgaccgttgatatcgatcgcccgaacccggacgagacgagcgcgttgcagttgacgactttggagaagaactgcaaggagttcggcgtgcgcctgcacccgctgggcgacgccgatcagggcatcgtccacgcgttcgccccgattctgggcctgacccagccgggcatgaccatcgtgtgcggtgattcgcatacgtcgacgcacggcgcgttcggcgcgctggcgttcggcatcggcacttccgaagtcgaacacgtgatggccacacagacgctgtctctgaagccgttcaagaccatggccgtcaacgtcaacggcaagctgcccgcggacgcgacggccaaggacatcattctggcgatcatcgccaagatcggcaccggcggcggccagggttacgtgatcgaataccgtggtgaggcgattcgcaacctcaccatggacgaacgtatgaccgtgtgcaacatgtccatcgaggccggtgcgcgtgccggcatgatcgcgccggacgagaccacgttcgagtacctgaagggccgtccgcacgcgccggaaggcgagctgtgggatcaggccgtggcgtactggaagacgctgaagaccgatgacgatgccgtattcgacaaggtggtggatattgacgccaccaagctcggtccatatgtgacgtggggcaccaaccccggccaaggtctgccgatcaccgcctccgtgccggagccgggcaagatcgccgacgccaccaagcgcgccgccgccgaacgtgcgattacatacatgggtttgaagccaggcatgccgatcaaggacatcgccgtggacaccgtgttcattggttcgtgcaccaacggtcgtatcgacgatttgcgccaggccgccgcgattatgaagggccaccgcaaggccgagaacatccaccgcgtgctggtggtgccggcctcctcccgcgtgcgtttgcaggcggagaaggaaggcctcgataaggtgttcaaggactttggcgccgaatggcgtaacgccggctgctcgatgtgcctgggcatgaacccggacaagctggtgccgaacgagcgctcgatttccacttcgaaccgtaacttcgagggccgccaaggcaagggctcgcgcacgcatctggcgtcgccggccgtagccgccgccaccgccatccgcggcacaatctcgtctcccgccgatctctgagccaatacacgtgagccccctctgacgaggggctgtcagtcgaagactgactgggggagagatccccgaaaggaaaattgttatggaaaaactcaccacactgaccggcgtgggcgtgccgctgcgccgctccaacgtcgataccgaccagatcattcccgctgtgttcttgaagcgcgtgaccaagtccggcttcgatgacgccctgttctacgcatggcgccgagacccgaacttcgtgctcaacaagccggaatacgccggtaagggccagattctggtcgccggccccgaattcggcatcggctcctcccgcgagcacgccgtgtgggcgctgcacgattacggtttccgcgtggtcatcgcgccgagcttcgccgacatcttctacggcaacaccgccaagaacggcgtgctggccgcgattatgccgcaggagtccgtcgaactcctgtggaagctactggaggaagagcctggtcgtgagatgactgtctcgctggagacccgcacagtcacttgcggcgacgtgaccctgccgttcgaggtcaacgattacgtgcgttggcgtctgatgaacggctacgacgatatcgatctgacgctgcagcacgaggacgacatcgccgcctacgaaaagatgcgcgccgaaaagttccccttcaagcccaagaccatccccgccaaacactgggccgaagaaagaatcgagtccgcccgcgagcctgaggacgcagactggacagggccgttggccgatcgcggcattatttagccgcgatcggcctgctgaaagcccggtgggctttcagcaggccctgtgccgagctgcgacagcagcgaggccagcattgagcctcgccgaaaggcgagtccataattgcaggcccagggccgttggctctgtgtctgattgagattattgggtcgcttgcatcgcatcaaacaaaggtctcactggtgcccgcgccccacatccattgcgcggcgggcaggagttgcggcaatattcccttcagtgccaacaacgccatacggtcgttatccaccgcagccaccaacaccggcgtggcggcgctttcctcaacactcatgaactccgtcctagcgttcgaaatactgtgcctgaattcgtacacatttgtggacataatcacgattcatccagtaatgacggttaggttgagcatcatgaccatgaatgacatgaatccgtcgaacgattccgatacggctccggcgcaatcgctgtcagcgcaaccgttgccacctcgaccggcaccgcagtctgcggcacagtcacagacgccgatgccacagacgccacagtatgttcagcctgggccgagcatgcagccgcaatatgcgggtcagccggaggcatgggcacaaccgctacctccacaagatgtttcacggggtgttccacggattgtttcacaaggtgtttcacaacctgtgccgcaagccgcaatacctgctgtgcagcctgcacaatacgccgcgcagctcgtatacccgacatatcccgtccaacctacgtatcctgcccagccgatgtatcccacgcagccgacgtatccggcgcaatccgcctattccccatacccggcgcaacagtcggctccacagcccctcgctcatccgtactacgctcaaccagtgggctacgcgccacaaccctattccgctgcgccgcaaccattcgtgcaaacggctccggcaatgccagtcacaatgcccaacgcaatgcccaacgcaatgcctgccacgatgcccgcagcaatgcccgtggtcatgccgatcgatcctcgccgtgtatggcgcacgtggcgtcgcaaggtggtcaatcgtgtaatgggactgactctcgcctatgaaggcatgatgctcttgggcgcaatggtcgccaccattatcgtcggcgtaataaccgcgagcgatttgtccggcgtgcagtgggatggcatcatcagcctgatatcggtgttcgtcgcgttcggatttctgctgctcatgcgccaccgtgacatcttcacctgcgaattctggcttggtggccagcatcgcgactcgtacggggagcccaatcagcttggccacatcagccaatatggcggcgggcgcatgcagcctctctgggcgttgatgttcatcgtgctgggcatgggcgtgcaaggcatcgttatgttggtgcaggtcgcttttttcaggctgggcatcgatcttgcctctcccacgtcagacagcatcgccgaatccagcgtcaccgtaagcatgtggctgtacgttgggctggtcgctccgatttgcgaggaagtactgttccgcggcgtactgatgaaggagctcaagccgttgggcaagaacttcgccatcgtcacctcggcaatggtgttcggcctgttccatgacgacgtagtgcaaggcacattcgcgttcctctttggcctgattctgggattcgtggccatggaatactcgttggtttggtcgattgcactgcacatcttcaacaatgcgattctttccggcgccatcgatacccttgccggcaactatcttgatgacaacgcatatttgatattctcattgtcgctatctgtgatcggcgtgatcggatcgattatcatattcgtgatatacggcaaagagatgcgccaatatcaccgtacgaatcgtagtattccagacacgtactttggctgggcagctccgacgttcatcatctttgtggtagccaatgccgctttcgccattatttcgtttgtcggcgcgatgatgggttgagtgtgcgtgtgcgcatgcaggttggcttatcgttgaagcatgagtgattttgagccgttttacgatgtcagccgcagttacgaagacaactatgagcaagggccgttcggcgcgttcgccgaggcgctgaaggatggcagcggtgccgatgccgccggaaccaccagcgagggtgccttggccacctttttgggccagccggtcaacctgcctttcggcattcccgcaggcccgctgctcaacagccgtttcaccacggccgctttccacatgggtttcgatctggcgacctacaaaaccgtgcgttcgcgcgcctggggctgcaacccgttcccgaacgtgctcgccgtacaccccaagtcggcggacggttcactgacgccgggcagcgccgaactggacgaaggcgtgctggccgacaccaactatgaacagccgatttccatctccaacagcttcggtgtgccctcgcagagccctgacgtctggcagccggacatgcgcgccgccatcgaggccgccggtcccggtcaagtgctggtcccgagcttccaaggctcgcgtgtggagggcatgagcgaggaggaatacatcgccgaccatgccactaccgcccgcctggtcaaggagaccggtgccaagctcatggtgatgaacaccagctgccccaacgagggccacaaccgcctgctatgccacaatccgctgctcgtgggccgcatcaccgaggccgtgaagcaggagatcggcgacatcccgctgatggtcaagctcgcctacatccccagcgacgacgctctggagcttatggtgcgttccaccgtgggccacggcaccgtgcagggcttcagcaccatcaatacgatttccgccaaactggtcgatgccaatggcaatcaggccctgcccggcgcgggccgcgatcactcaggcgtgtgcggcaatgcgattcgtggcgccggcctcgacatggtcgcccgtctggccgcgatccgtgaaaagctcgggctcgatttcgcgatcaacggcgtcggcggcgtggtctcgcccgccgactaccaggcgtaccgtgacgtcggcgcggactcggtgatgtccgccaccggcgcgatgtgggacgccgaactggcccacaagatcaaggccagccggtaaatcggctccaaaaacaagcaacagcctgtacgggccgtgattcccagacgattcccagacagtgcccatgttgcattgaaactgttgctgttatatgtaatcacggccgaacaagctgcataacttaacctctttcttcttctctcctttctctccccggcgcccatcacgccggggtttcttttttgcggtgggtacagccgtcttactcggccgccgccttcatggccacggcgccgacgtagtagaccggcttgtcgaagttcggctggaacaggaagtccacgttggcgagctggtcgatggtgaagccggcctgaatcgccatggaaatcacgtttgccgcgccggagatatcggccttggaacagaactggccgcccttgaccttgcgggtttccgggtcccaggtcagaatcgacgtgactggggtggtggtgagcatgaagtccgggcgataatcctcggtgagcgaggtctcgcggaccgtgagcccgcggcgttcggcaccggcgcgggtcaggccggaggcggcgagcgagagatcgtacagctgcacggcggacgtggcctgcgtgcccatgtacttcacggtcggcgtctcgatgttgcggcccaccagcaggccctggcgcaccgcgttggtggccagcggaatgtaatcgtgctggccggtggggttgtagaacacggtggcggagtcgccggcggcgtacacgcccggcgcggacgcctgcatgtagtcgtcgaccacgatcgcgccgttcggcagcatgtccaccttgcccttgagcaggtcggtgttcggcaggaagccgacggccagaatcgccatttcggccgtgtactcgcccttttcggtgaccacagtgacggtgtcgtcgtcattgtcgcggaactcgaccaccttctggccgagcgcgagcgtgacgccgtgctcctcgaacgcggccgccacctgatcggtgatggtcttatcgaaattattggccagcgggcgatcaaggccgtcgaccagcgtggtcttgacgccggtgacgctgaactgctcggcgatttccgcgccgatatagcccgaaccgatcaccaccgcggacttggcggttttcgccttctccttgatggcgatggcgtgatcccagttcttgcacagcagcacatgcgggctgtcgatgccggggatcggcgggatgaccgggcgcgagccggtggtcacgaccagtttgtcgaaagcgagggtctgttcggcggggtctccggcctcgtccagcgcgcggtaggtgagggttctggcgtcgaggtccacggacgtcacgtcggtgcgcatatgcatggtcgcgccggcttcggccagagcggcaggggaggagtagaacattttcttcgggtcggatacgtggtcgcccacccacagggcgatgccgcaggagaggaaggacagcgtaccgttgcgctcgaaaacatggacggtccaatcggggtgctcggcgagaatcgaggtggtggcgaacgtgccggcgtgcgtgcagccgatgacggcgactgtggtcatgaatgctcctttgcttgtggccatggcgtctgatgccattgccctgaatcgtagcgtagaagtatggagaacaccgtggcggcaaatgtgaggaagatcacgttatcggtttgattcgacggggggtatgggatccgttgtgcacggtgatcaaagttcggctggggtgcatttcacggagtcggcacatggcttatggcaaactggacggtagcattttttgaatcttgattgattgaggagagtggcgtggctgagaatccggatgacgtgttgcatgtcgagggcggcaagcctttgaatggcacgatcaaggtgcgtggcgcgaagaacttcgtgagcaaggcgatggtcgccgcgttgctggcaccgggcaagtcggtgctgaagaacgtgccggagattcgtgacgtgcatgtggtgtctgatttgctacgtctgcacggcgtggacgtggatgtggacggtgcgaacggcattgtgaccatcgacgcctcgcgtgtgcagctggccgatgtggccgacgtggatacactgtccggttcgtcgcgcatcccgatcctgttctccggcccgctcgtgcaccgtttgggtgaagcgttcattcccgcgttgggcggctgcgcgattggcggacgtccgattgacttccatctggagacgctgcgcaagctgggcgccacggtggacaaggaacacaaggacggcatccacatcaccgcgcccaacggcctgcacggcgcgaagatccacctgccctacccgtcggtgggcgccaccgagcagactttactggcggccgtgctggccgagggcaagaccgaactgtcgggcgcggccactgagccggagatcatggatctggtgtgcgtgctgcagaagatgggcgcaatcatttctgtggacgttgatcgcaccttccgcatcgagggtgtcaaggaactgcaggggtacacgcacacgtcgctgacggatcgcatcgaggcggcgtcctgggcgtccgccgcgctcgccacgcacggtgacattttcgtcaagggtgccacccagccggagatgatcacgttcctcaacgtgttccgcaaggtgggcggcaaattcgaggtgacggacaagggcattcgtttctggcatccgggcggggacttgaagcccgtggcgatcgagacggacgtgcatcccgggttcatgaccgactggcagcagccgctcgtggtggccctgacccaggccaacggcctgtcgatagtgcacgagaccgtgtacgagaaccgtttcggcttcaccaagccgctggtcgagatgggtgccaccatccagttgtaccgcgagtgcctgggctcgctgccgtgccgtttccggcagcgcaactacaagcattccgccgtgatcttcggaccgaccccgctgaccggacgcgacatcgacgtgccggacctgcgtggtgggttcagccatctgatcgcggccttggccgcgtcaggcccctcggacgtgcacggcatcagcctgatcgaccgaggctacgccgacttccgcggcaaactcgaagcgttgggtgccgacttcgattaattcggccgttcctcggctcccctctctgaggggagccacaattttttacaacagcccgtccgcctcaagtgcggcggccatgcggtcgaagcattcctccagtagcgggtagggcatggcgaagttcatacgcacgcaaccgcgcccgacctcgccgcattcgcggccgtccgtcaacgccacattggctttcttgaagaaatagtcggccgggtcgtcaatgcccagtggcgagaaatccagccacgcgatatacgtgccctgcggctccacatagcgtaccttggcgaatctcgtgcgcatctgctcgttgaccagcgcgatattgcgctcgatgtacgccatcacgccctcgaaccatgccgcgccgccgtcataggccgcagtggtggctatggcaccgatggtggccgtctggtgctcggaccattccgcgttcctcatccacagttccagatcgtccggattggtgagaatcacctgcgcgcacttggtgccgggaatattgaacgacttcgaggctgaagtggaggtgaaagcctgcatggccgtctgccggttgattgaggcgaatggcacatgcgtgtggccttggtagacgaacggcgcgtgaatctcatcggagaatatacgcacgtcgtacttggcggccaggtcggacaatcgcagcatttcttcgcgcgtcaataccttgccgatcgggttgtgcgggttgcacagcacgaaggcatggcagccgttcgcgaacgcctgctcaatggcgtcgaaatcgaacagccattcatcattgcgcccgctgctctcgccggcgccctcgcacagcatcggaatctcaagaacctccactccatacaggcgcggcacgctcaggaacggcatataggccggagtcggcaccacgatggagttgccggcgcgcacaatctcgcgcaggaacacttcgaacgcctccagcacgtccggcaccggacggatgcacgtcggatccacatcccagccgtatcgacgctgccatgcggcgcacgagcgggcgacctccttcttccacgggtcgggaatgtagccgagcgcgccacgttcggtggcctcttcgatggcttcggccacgcacggcgccagaccgtaatccatctcggcgatgaatgcgccgatgcagccggggtagcgggtccatttgtccgaaccgacctgcttcagatcttcgatggtcgtcacgtcgatgtgattggcatcaaagcaagaggcaccggcggttgcgctgctcaaagtcgttgactgggaaacgttgttcatgctcataacatgtcattgttcccggtgcagaagggctgctcaacggtctggctccccgaaatcgtgatggcgttcgcaagcttgcttatcgctgtccgactacttggcactcaaatatttgagtgacgtgcgctcgagctcttcgagcaatgaaccgagcgcgggacgatggtcgccggcacgagtcacgatgccgacctcgcgcgccgcaaaatcgtcggcgatgggacaggccaccagatcgccttgcagattgatatgtgtatcgagcgccggcaccagcgagacgcccatgccaacctcgaccaggttctgcgtggcccagtaatcatccgtgcagtggcggatatccggcttgaatccggcacgggtggccagtttcaccaaatttgcgcggcaggtggggcagccggcgatccaatgctcgtctttggcggcggacagcggcacgggttcgccggtctcctcgaatcgtttggcgatgtcgctggagcggcggaccaacaatcgcatcggatcgtaacccagcgactggaaggtcagatcgtcgccgatgtgcaggaagttcgggatgctgctgtaccggaacacggcggcggcatcggccttgccttgggaaatcagaccgatcgcctccggcggctccatctgaatcaggctcagctcgatgtccgtgaacatactgagcttgaccacggtacgggccgcgatagtagagcagattgacggtggggccaccaaatgcaggtgagcaaaccgatgatgccgataatcctcgacctcacgggccgcccgctccagccgatcggcgatggcctcgccgtggcgggcgagcatcgaaccggtggcggtgagttccacaccatgcgaggtgcgttgcaccagagtcgaaccgcactgtgcctccagctttttgatctgctggctgatggccggctgcgaccaacccgtggccttggccgtggcggagaacgaaccatactgttcgatctgccacaacgtgaccaatgattgggggttgagcccggccatatgcacctctttcgcgcgtcgttccattatggccgccgacaatgaccggacgcggcacggtgtcgccatcgccggtatccttagaagaatgagccctgaagccttaagtgaactgatttccagcattgcccacaacctcgtcgccgccggccaggccggcgcgttgaccgacgagctgattccgcccgtcgacaagctcgccgtgatgcgcccgaaggaccgcgcgcatggcgactgggcctccaacatcgccatgcagctggccaagaaggccggcatgaagccgcgcgatctggccgagccgttcgccgccgcgctcgccgaagccgacggcatcgccaaggtcgaggtggcaggccccggcttcatcaacatcacgctcgactccgcctcggccgccgccgtggtggacaccgtactcgccgccggtgccatgaccgacaccgacaagcatctcaacaaggtcaacgaatacggccgcaacgcccatctgggcggccagaccctgaatctcgagttcgtctccgccaaccccaccggtccgattcacatcggcggcactcgttgggctgccgtcggcgacgccatggcccgcgtgctcgaggccaacggtgccaaggtggtgcgcgaatattatttcaacgaccacggcgagcagatcaaccgcttcgccaagtcgctggtcgccgcttgggctgaggccaacaacctcggtgaggccggctaccagaccgaaaccccgtgcgacggctacaagggtgcctacatcaacgagatcgccgcccgtgttcaggccgaagccgagtccgacggcgtggacctgaccgcactggcccaccaggatcaaggcctcaacgacgacggtgaaccgctcggcgaggccgacaccgaagtgcgcgaggaattccgcaagcgcgctgtgccgatgatgttcgatgagattcagaagtccatgaaggacttccgcgtgaacttcgacgtctggttccatgagaacagcctgtacgccgacggcaaggtcgacgccgccatcgaagagctcaagtcccgcggcgacatcttcgacaaggacggcgccacttggtttgaatccaccaagcacggcgacgacaaggaccgtgtgatcatcaagtccaatggtgagttcgcctacttcgccgccgacatcgcctactactgggacaagcgccatcgcgccgaaaacccggctgacgtggccatctacatgcttggcgccgaccaccacggctacatcggccgcatgatggccatgtgcgcggccttcggcgacgagcccggcaagaacatgcagattctcatcggccagctggtcaacgtgatgaaggacggcaagcccgtgcgcatgtccaagcgcgccggcaacgtcgtgaccatcgacgacctggtctccgtggtcggcgtggacgccgcccgctactcgctggcccgctccgactacaaccagaacttcgacatcgacctggccctgctcgcctcgcacaccaacgacaacccggtgtactacgtgcagtacgcgcacgcccgctccaagaacgtggaccgcaacgcagccgccgccggcatcagctacgagggtgccgacctggccctgctcgacaccgaggccgacggcgaggtacttgccgccctcgcccagttcccgagcgtgctcgccactgcggccgacgaccgccagccgcacaaggtggcccgttatctcgaagaactggccgccacctatcacaagtggtacaacgtggagcgcgtggtgccgatggccctgaccgatccggaaacccgtggcgacgatgaggctcgcaaggccttggagatcgccaagaatccggagccggcccgtgccgccgcccgcctgaagctcaatgacgccgtccagcaggtcatcgccaacggcctcgacctcctcggcgtcaccgcccccgaaaagatgtgattatgcccatttctccaatttggccggccgctacggctgtgaatgccgacggtgccattacattccacggtcgtaccgccgaatcgctgcttgacgagttcggctcgccgctctatctcatcgacactgatgaagtagtcgcacgtgccaggcacttcgtgcgcgctgccgctgaagcattcaacacatccactacgcacgtgagctttgccggcaaggcgttcctgtccaaagaagtcgtgcgattggtcaccgaggccggcatgtttgtggacacttgcacgatgggcgagatgaaaatcgccctcgccgctggcgttcccgggcgtcgtctggtgctgcacggcaacaacaagtccgatgaggaaatcgcgctggccatcgaacagggcttcgccaaaatcgtgatcgacgagcccgacgagccggagcgcgtcgccgccatcgcccgcaggctcggcaaacgcgcccgtgtgatgctgcgcgtcaccgtcggtgtccacgccggcggccacgagtacatctccactgctcacgaggaccagaagttcggcgtgccgctgctggccgccggggccgacgccgctgtgctcgacgtgctgaacgccctcaaagacgtgacgcctgccgctaccaacgcgcgtatctctgcgacgcattccccggaaaatggcgcggagaagaccgagaaatcagagcgcgagctgcactacgacgtcaagtacccgtacgacctgagccacgaggaagtctccgacacagacaaggcgctggccgccgcgatggaagccattgcggacggtccgtccatcgccgtgctcaagatcatcctcgccaaccaggacgtactcgaactggtcggagcccactcgcacatcggctccaacatccacgatgcggacgccttcattcacgcggccaagcgcatgatgctgctgcgcaagaccctgtgggccaccgacgcctacatcctgcccgaaatcgacctcggcggcggctactccgtggcctacaccgatggcgaagattcaatggacattgacgtggaactcactcgcttggcggatgcagtcaacagcaccaaccgtgcgctcggcatgcccgccccggccatcagcttcgagcccggccgctacatcgtggcacccgccggcgtaaccctgtaccgcgtgggcgccatcaagcacgtgcacttgtccgatgccaaagacagtgccggcaacccgattaccgagcgcgtgtacgtgtccgtggatggcggcatgtccgacaacattcgcccggcactctacggtgccgactacaccgcgcgtctggcgaatcgcaccggttccgctgaaacgatgcttgcccgtgtgtgtggcatgcactgcgaatccggcgacattgtggttcacgaggtgcagttgcccgccgatttgaagcgcggtgacattctcgccgtgccggttaccggcgcatacggccgcaccatggccagcaactacaaccaggcgctgattccggcggtggttgctgtcagcgagtccggcgcgcacgtcatgctccgccgccagatcgtagacgacctactcaacctcgacgtcagcgagtaatcagcgtgcagaggtgagcgcctgacagtctgtaatgtgcggccaaaaccgtcataatacgaaaagggccgtcagcttgatgagtactttcggtctgctgtcggaaataatccgtaaaataggcgtgggatatagaaaactttttggaaggaccctgaattggctcacaacagcgaaaccccgattcgcgtaggcctgcttggtgccggcaccgtcggctcccagaccgcccgcctgattgtcgagcagaaggacgaactgtccgctcgtatcggccgcccgatcgaactgaccggcgtcgcctgcctcgacccgaaggaaaccgagaagttcccgtggatcgaccagtccatcgtcaccaccgatactttgagcgtggccaccaactcggacatcgtcatcgagctcatcggcggcaccaccgtggcccgcaagttcgtgcttgccgccatcgaatccggtgcttccgtggtcaccgccaacaaggcgctgctggccaagtacggcccggagatctactccgccgccgaggccaagggcgtcgacatctacttcgaggccgctgtaggtggtgcgattccgttcctgcgcccgctgcgcgagtccctggtcggcgacaaggtgaccagcatgctcggcatcgtcaacggcaccaccaactacattctcgacgagatgaccaccaagggtctccagttcgacgacgtgctcaaggacgcccaggccaagggctacgccgaagccgacccgaccggcgacatcgaaggttacgatgctgccaacaaggccgccatcatggccaccctcggcttccacacctccgtgaccatcgacgacgtgtccgtcgaaggcatcaccaagatcaccgccgacgacatcgccgccgccaccgccgagcacaaggtcatcaagctgctcgccgtggtcgagaacggcgaggccggcgtctccgcccgcgtctacccggccctgatcgacgagaaccacccgctggcctccgtgcacggctccttcaacgccgtgttcgtcaaggccgaggccgccgacgacctcatgttctacggccgtggcgccggcggcgctccgaccgcctccgccgtcgtgggcgacgtggtgaccgaagcccgccacattgctgctggctgcaccggcccgtccatcccgctgtacaagaatctgccgaaggctccgattaccgcctccaaggctgcattcgccgtgcgcttcctgatccacgacaagccgggcgtgctggccgccatcgccgccgagttcgccaagaacggtgtctccatcaacggtgtgaaccaggatctgaagcccaccatgaccgaccccggctacgacggcgagattcagcagttgcgcatcgtgacccacctgaccgacgaggaaaccctgcgcaacaccgtcaaggccgtgcaggcgctcgacttcgtcaccggtgacccgtccatcctgcgcgtgctggactgacaccgtctaggctccctctgatgaggcggtcgaacagctgcccgtgagttgaaagctgaatacccaagctcccctgacaaggggagctcctttttaaggaacaaccatgaacccaatctgcaatagcgttcacgtgcgcgtgcccgccacgtccgccaacctcggctccggcttcgataccgtgggtctggcgctcgactaccatgacgagctcactttcacgctcaacgacgacccgaacgacggcattgcccacgtgatcatccacggcgagggtgccgacaccctcccacgcgacgaaacccacctcgtggtctccaccttccgccgtgcctgtgccacgttcggcctcggccgactcggcttcacgctggaagcgaccaacaacatccctcaggctcgtggcatgggctcttccgccgaggccatcgtggccggcatcgccgccgccgcggccttcgcccagaccggtgacctcaaccgtccggccatcttcgatatggccgcccagatcgaaggccacccggacaatgtggccccggctgtgttcggtggcctgaccgtctcttgggacttcgaaaccgcggaaggcgtcggctcggtcgccgttcctggtggtgaaccgctgcacggcggattccacgccgtcaactacccggtggacccgtccatcaccgccgccgtgttcgtgcccgactatgagctgtccactgagaaggcccgtcaggcgctgcctagggaactgccatacaaggacgccgtctacaacgtgtctcgcgtgggtctgctgcccgctgcgatgaatcccatggtgctggcccaggccgcccagcagggcaagtccggcgtcgccgctgccccggctcaggatgccgatacgtgcgcttgcgctggcggaacccgtgaatcgccgttcgctgacgagcttgcggccgctcaggcccagtccaacgcgctactgttcactgccacgcaggacaagttgcaccagccgtatcgcggtaccctgatgccgccgtccaccgagctcattgcgctcttccgctccaagggctatgccgccgccgtctccggtgccggcccctgcgtgctcgtgctgcactacggcaacgcccgcgaagccatcgaccagatcgcatcggagcagcttgcttccggccactggcgtgtgcttcatctgcccatcaacaccgccggcgtcgaaatcgagcgtcgctaagtcgaggagaaggctcccgctggcgggagctggccgccgcaggcggtctgagagtggtccgccataccggcagagaccaccctcagtctcacttcgttcgacagctcccgccagcgggagcataaggacttaagtcatgtccattccgctaattcttgcttccaagtccaagcctcgccgtgacgtgctgtattcggcgggtatctgccccacaattcgcgtctcgcacgtggatgagcctgctgcgctggaagcggccgcccgtgaggaaggtgtcaccgtcgacgatttgagcatcaagcagcgtgtgatgattcttgccgcagccaaggccgaggccgttcaccgtgcgtatcgcgatgtggccgatactgccgccgccgcaaccggcgatcgcgtgattgcctacccgctcaaggccaaggaaatcaaggattcggaacgcgaagccgtcgtcgaagacctgcgcaaagccgccgctggccagcccatcgactattccaaggcggaagtcgccaccacgcgcgacttctccggcatcgacatgccgaccatcaccgaacccatcgccaccgctattgccggacagccgggactgaccgaggcgacggtcggcccgctgattctcggctgtgattcgatgttcctcctggacggcgaatgctacggcaagccgcacagcgaagccgtggcccgcgaacgactgaagcgcatgagcggcgcgaccggcgaactgtggaccggccactgcctgatcgatttcgcgaccggacgtaccgtgcgcggcgcaagccatgccaaagtccatttcggcgaattcaccgatgacgacatcgaacggtacatcgtcaccggcgagccgctggaagtcgccggatcgttcacgctggaaggcttcggcggcgcgttcatcgacagcatcgagggcgatccgcacggcatcatcggcctcagcctgccgctggcccggcatctggccggcgaactgggcatcacgtggaccgacctgtggaatgtcggccgtggcgaactggagccggaaagcaaggcctcgggcaaccagcacgctggcattctgccgccggtcgaaaacgtgcatcagcccggcgatggctgggtggactgcgcctgcggccgcaagcattggggcaccaacggtgcgtccggcattctgctggctcgccgcgacccggcgagcggcaaggtgactcacgtggtcatgcagcaccgtgccgcgtggagcgccgaaggtggcacgtggggtatccccggcggtgccactgcggacggcgaatcgtccatcgaaggcgcgctgcgcgaaagctacgaggaagccaacatcacccccgaagacatcgaggtggtcggctcctaccgcgaggaccatggcccgtgggcctacaccaccgtgtttgcctttgaaaagcccggccacaccgtcgagcccaaggcaaacgacgacgaaagcatggaaatctgctgggtcccgattgacgacgtgcccaaccgcaagctcctcaccgctatgaagaccgactggccccgcttcgccgcccgcctggacgagctggcctgtgctggacatcggtagtggtgttggctgggccaatgttttgccgatgagtttacttgggtaatgcgtgtgaaccgcgtgtggaccgggacggattctgctgtcccggttcgtcatttcgtctcttttgggacaaccgggacagatttcgctgtcccggttcgtcattttgcctctttttgggcaaccgggacagaatctcattcacctgacgccctatcgtgcgatggtcgccgtcggggaatggcggaattccggggttttggatttgcatatatcgggtgttcatggaagggcctgtcccggttcgccaaaagaggccgaaatcccgaaccgggacagccgaatctgtcccggttcgtatgtcgatcgattgaccccgccaccgggacatcaaccgcgcatagacaggacgcttcaatgcctggcgggcatgaccatatcggatgacacacgttccctcgtgcgtttcgccacgacctccgccccaagtcagtgcgaaaatggcatttttagcggtgtggtcagctgtcgcatgcggaaaatcctaaatcaaccgccgaagagacacatcgccgactcggcggaactcgctggtctgcgcgcaatgaggagtgttgtgtctgaatgcgattcagacaatggccggcgtcaaatagcggtctccagccattaatcattggtgattgtggacattgagcggagtaaacattctagatgattcagggatatgccgaaaatcatatcgttcagagaatgaagtaccgcatctcggagtaactgactgtcgacgtgcatggtttgaaatctgatatccacgcccatcatgcctagcaaaattacgggaatggggttcggactatttcgcctcagccaaccgggagcttccgaatgctcaatgctgtatgcacttagtgtgtggaaaccagccaatcattgaccaatggcaggccgcagtcgaaaccagaaatatcctcgctcgcagtcaggtgccgaggctcagtgaagttggtcacgtccatatgggatcacgctccaacaattcattcagacgtaggcccataggttcgtttaatgctgcggtgaaatcattccacgctttactgttgagccgaatgatatgagcttcatggatgtcccgatctgcggcggcgagcagattcgataatgcccattgcaacgaagtcatgcctttggactcggccgcttggtcgattctggaacgttgctcttaggtgagtctcatttcaaaacgactgttcttgttattctctgtagtcgtactcctgttgtacgacttttgtacggacacgattggtgtgtgcgggatgtcgattgcgatggccatgtgggctcctttgcttggtctgttgtggttccagcttccgaaccggtcttccactgttcctcgtcttctcgagcaatgaacatctgatatatggattgtcgcgtcgactgcgtatctctaatccttgcggatgaggagcgggccggtgatccagaaaggttcataccgcagcccgatggtcggctgggcgttcgctccgtacgctcgggagtatgaacacagcagcatcgcaattgcagcagcctcagccggcgtcgggaccggcggctcagcctcagcagtctcagcaaccccaacagttccagcagccggcatcgcacacccagcagtgggccccggtcatcgaggcgcacgacctggtcatggactacaccgccagcatggcccgcgcacaggcagggcacggcgtcaccggcgtgatgccagccggcacgggagccggttatgcgtcggcgaatcccgctgcggccggaccgggtgccattcaggccggccagccatcccagccagcccagcccggcttcgccatgccgaccatgcacacgctcgccctgaaccacgtgaacttcacgctccgggagggtgagacagtagccgtgatgggcccgtccggctccggcaaatccactttgctgcacgcactcgccggcatcatcaagccgaccgccggcaccgtcatcttccgtggtgccgacctgagccgcatgagcgacgccgagcgcaccaaactgcgccgcaacgccttcggcttcgtcttccaatccggccagctgctgcccgaacttccggccgtcgaaaacatcgccctgccaatgatgctcgacggcatgccctaccgcaccgccaccgacacggcgatcctgtggctggaacgcatgggattgcgcgcgctcgccacgcaccggccgggggagatgagcggcggacagatgcagcgcatcgccatcgcccgtgcgctcgccgtcaaacctgccgtggtcttcgccgacgagccgaccggcgcgctcgaccaagccaccggccgcgaggtcatgggcattctcatggccgccgcgcgggacaacggttccgccgtggtcgtcgtcacccacgaccccaacgtcgcttcgttctgctcgcgcaccgtgaccatgcaggacggccagctgggaggcgtacgatgagcgctttcgcattgtggcgattgttccatcgccccggctcgcgtggcagtgcgggtcatacttcggtgttggccatcattgcttttgccgcagccaccactatctttctcaccgttttgggcggcgtgcatgggttcatgtggcgcgcctccgccgaccacaccattggatgcgcaatcaatctcgacgcttgcaaacccggaacagcggaaatctggaagcagcgtatcgccaatccccacagcctggatcaatacgccacggcatacgtcgtgctggcgttctttgcctgcctgctgctgattgtgccgttcgtggcgcttgccggttccgccgcgcgattggctgcgtcccgtcgtgacgctcggctcgcatccctgcgcttggcaggcgcgaccacggggcaagttattcgccttacggcgcttgatgcggctgggcaggccttggtgggggcgctgattggcatcgcggggtactgcgtgttgatccccctaatcatgttgctgcatttccagaatcagacgtttacgttcgagcaactgtgggtggggccgattgccttgatcattacgcttgttggcgtgaccgtgttggcgctgatctcttcgctggtcacgcttcggcgcgtggccatcacgccactcggcgtcacttcacgcgttgcgactacgctgccgtccggctggcgtgtggtggtgttcgccgtcatcatggtgattgccgttcttctgttcaagaatccgatggtgctggctcaggccggtgaagtagtgatgtacggcgtgatcatcggtttcatgctgctgtgcttcgcgctggtgaacctcgtgggctcctgggtggtcaccgctcgcgccaaggccaaggccaagcgccccaaggatgcggccacgatgattgccatgcgccgtattctcgacaatccgaagcgcgcctggcgcaatgtgtccggcattgcactggccgtgttcatcgccggcatcacctcgatctgcggattctttggctcggccgccgtggtcggtgacgccaacgacccgtccaccgtgttcattcgcgacatcggcaccggcggcatcctgacgctagtgttcgccgctgtgcttgccgcggtcagctccggtgtgatgcaggccggcagcgtgtacgatcaggccggcgaatatcgcatgctggtgttggagggcactgatgtcaagaccttgaaccgtgcgcgattcatcgaggtactcaccccgctcaacatcgtggtgatcgtggccggcggctgttccatgctgcttatggcccctctgttcgccgcttcgatgaccgaaccggccacgctggccagcttcttcggcgggcttgtgctgtgctatgcgctggtttcggtgggtgcgttcgcgtccaatcgggtggccgccagcttgaatctggccgattatcgggccgatgactgaggcggtacggtactttcccgggtgacgacactggtggggaggatgacgtgcatatcaccctgattgcccttgcggctgtcgatgatcatctgcacggcgcgttgggctatttcgctgaacggctgatgcacgctggtcagggagggcatgagttggccggcggggaaaatgtcgtcgaaccccatgacggacaattgctttggcaacgcgatcttatgctctcgtgcggcacgatacgtgcttactgcagataagtcgttgcagcaaaaaatcgcggtgggtcggtcggtgagttccagcagccggcaggctgcttcatagcttgtttcggcggggaagtagtcgccctgttcgatataggactccggcagatccaccccggcctgttgcagagcggcggtgaatccgctatagcgcgcgatgctggtctgtaggttcgccggcccccggataacggcgatgcgtcgatggccgagcgacagcaggtgtttgccggcctggtatcctgcggtccagttatcgatggacacgctcatcacatccgaatcgacggtatcgattgggtcgatgatgaccacgggaatactgcgcgatttcaacaaagacttcgcttgagtggtcagaccgcccatctgctgcataatcacaccttggggatttctatcgatgatgccgcggaaacagtcttccgtggcatcgccatggttggtctgggtgaccgtgatggcgaggcccgcctgctgcgcccagtatgaggcgtatttgatgagttccatcgtgccgttgtgctcaatgtattcgacgacgagctctatggtgggggagagtttggtgttgaccagaggccttgagtaaccgtgatctttgaggatttgctcgacttgtctccgcgtctcgtcggaaatgcctgtcctgccattgatgactttggaaacagtggatgcggatacgccggcgatttttgcgagctcgccgaccttgagcttgtgggtggatgtatcgttaaccatcggtgcttccctcttggatattcgccgttcaattactgagacgatttcgtcgatgttcccaccattatgacgcattgtgccgtaacaattccatgttttcttgccctttgtccggccttgaataaaaattttcgcaaataggcttgcaaatttctttattcggacgtacgatatagccgttggttcacaccaggcgaaggagcccgaacacatgagtaccatcaccaaagtcaagacgtatgacttccgattccccacttcaacgacgctttccggctcggatgcaatgaaccccgatccggattattcctctgcgtacgtggagatttccaccagcgccgacgacggcatcacgggtgtgggattcgtgttcaccatcggccgtggcaacgacgtggtttgcaaggccatcgaatcgatgtcgcaggtgctgattgggcgcaacaccgaggaactgctcgacaacatgcgcattgcatgggacctgttcgtgcatgattcccagctgcgttggcttggccctgaaaagggcgtggagcatatggccatcggcgcggtgctctccgcgttgtgggatatcaaggccaagcgtgcgggcaagccgttgtggctgctgctgggcgagatggagccggaggagctggtctccacgctcgatttccgctacatgaccgacgccctgcgccctgaggaagccgttgcgattctcaaagagggtcagaagggcaaggccgagcgtatcaagcatctgctggaggtcggttaccccggctattcaaccgctcccggttggctcggctactcggatgagaagatggtggccctcgccaaggaggagacccaggtcaagggcttcaagcagatcaagctcaaggtcggccagaacatcgacgacgatctgcgtcgcctggccaaggcccgcgaagccatcggccccgacgtgcgtcttgccgtggacgccaaccaggtgtgggatgttcccaccgccatcgactggatcaacaagttccacgacttcgatctggcgtgggtcgaggagccgaccagcccggatgacgtgatcggccacgccacgattgcgcgcgccatcaatcccatcaaggtggccaccggcgagcagatgcagagccgcatcctgtacaagcagtatctgcaggcgaacgccttcggcatcatgcagatcgacgccacccgagtggccggtccgcaggagatcgtgctcgaatacctgctcgcgaagaagttcaacaagcccgtctgcccgcacgccggcggcgtgggcctgtgcgaggccgtatgccacttcgcgatgttcgattacgtggccgtgtccggcacgatggacggccgcatgatcgaatacgtcgataaccagcatgaacatttcgtccacccgaccgagatcaaggacggcaactacgtcgctccgaccgctccgggcaacggtaccgaaatgacgctggagacggccgagaagtacctgtatcgcggctgaccgcaactgaaaattcataactgaacaacacaactcaacacaacaacacacaaccactccggctggggtgccgaagccccggccgggcgtgacatggaacacccatgaaacgcagaataaggatggacgaaggagttcccatggatctgcatctcgaaggcaaagtcatcatcatcaccggcggtttcaaaggcatcggcaaaggcatcacgctgcaactggcccaggagggggccatcccggtggtgattaatcgacccgacagcgctctcgacgagttcaagaaggatatcgagcagtacaccaccacctatgatgtgcacttgcttgacctcaacgacaccgacaagatcgccggcgtcgtcgaagcaacatacaagaagtacggccatatcgatggcattgtgaataacgccggaaagaacgacaacaaggatctcgagaccactacttggcgtgagttcgaggaatcgcttcacggcaacctgactcactattacgagctggtccacgcggccgtgccgtatctcaaggaaagccgcggatccatcgtgaacatctcgtccaagaccgcgcttaccggccaaggcaagaccagcgcctatgcggccgccaagggcgcgatcctgggcctgacccgtgaatgggccgccgcattggtgcacgatagcgtgcgtgtcaacgccatagtcgtctccgagtgctggaccccgctctatgccgattggatcaagacctttggcgatgaagcggcccagcaggcgcgcctgtcggtgatcaccgacaagattccgctggaacatcgtatgaccaccaccgaagagatcggtaatgaagcggcattcctgctctccgaccgctccagccacaccaccggtcagtgggtgtacgtcgatggcggctatgtccaccttgaccgtgcgctgagctgacaagcagccctttcccgaatattcgcgcggcaattccggagctttgatcattgctccatccgtacgccgtatccgcgtatgccgcccgtatcacccgcgccctgggtcatccgtttaccaacatggcccagggtggtccacttctcgctaggcaatatcggggaaactcgtatcactaaggagtcaatgatgacatccaaaaacacaaccggttccaaggcgaccatcgccattgtactggtgacctcactgttctttatctggggcctgaccatgaacctcgtgaacgcgttgaactcgccgttcgcaaactacatagaactcagcagcgccgaagcgtcattactgcaggtggcctattacggcgcatacttcgtcatggccattccggccggcttgatcgccaagcgtttcggttataagggcggcgtcatctccggtctgttcctgttcgctctgggcgcgttcatggtgatccctgccaccaacatggccagctacggcctgttcctgttcgccatgttcgttatcgcgctcggcgcggcatcgctggagaccaactgcaatccgtatatcaccaagctgggtgatgaaaagggcgaatcgttccgtatcaacatggcgcagagtttcaacggcgtcggcaacatcgttggcccgctgattcttggccagattctcggcaccaccgtcgcatcaggcgagtccggcttcgacgccgctaaggcgcagttcctgaatgatacccgtacgatatacattgtgatcggcgttgtgctggtcgtggtgctcgccgtgttcgcgctgttcaagctgcccacgcctccgggagacgaagaggaggccgcgggcggcgcctcctccaagaacagctccttcttcggcctgctcaagcgcccgcacttcgcattgggcgtgcttgccgagttcattttcatcggcctgcaagtggccggcatggcgatcttctccgcctacgcgctcaagcactggggcgcgggcatcacagccggcaccgcagcgatgatgctttccgtgctttccctgctgttcaccatcggacgcttcgtcaccaccccattgatggccaaattcgatcccgcgaagattcttggcgtatacatgaccatttcagccgtgctgatgttcgtggtattccttggcttgggcaaggtctccgtcatcgcgttcatggtggcgtatctgttcatttccatcggatacccgaccatattctccctgacgctgaaaggtatcaagggttccgcggcgaagaccggttcctcggctttggtgatgagcattgtgggcgccgcgttgattccgctgctgctcggtgtgattcaggatgcggcaggcatcgagatcgccatcctggtgatggtcccgggcttcctgttcgtggcatggtacgcattctggggttccaagatcggtctgaaggaggcctgatatgacactcaacgtaatcgattcccacttccatatctgggatccggatgcgcaggatctgccatggctggcaggattgccctcgctgcaacacaagtacacgattgaagacctagccgcacagtacgccaaatttggcgtgaatttcctcggcggcgtatacgtggaggttgacgcggccgaccatgagctcgaggaccggttgttgtacgagaatgccagccctctgatcctgaagcgcatgttgcaaggacgggtaagcccttggatgcgtgtcccgattaatgccgatggcatcagggaaccgctgcatgtggattccgagccgcggggccgtgcgctcgaacccgaattcatcgccggtctacgcgcgatggccgccaagggattgccattcgagctgtgcaaccgtggcccggaactgggcgacatggccaaggcgttcgcgcaggttcccgaagtgacggtcatcatcgatcatctcggcaacgtgcccgggcttgatgaggaatcgtgcgccgcgctcgcagcgttggccgaactgccgaattcgtatatcaaggtttccggcgacaacccggtggacccggacatcgtgaaatacgtgcgggacacattcggcccgaagaaggtgctgtacagctccaactggccggtcgtggaactcaactcgacctttgccacgcacttccaactcatgctggacacgttcggcgaggacgaggacttcttcgaaaacaacgcccgccgcgcttacaacatcgactaaacccaagccccctctgatgagggggctatcgtccgcaggacgactgggggagaggccgcaaacccggtgccgcttgtgcggcacccctattccgtaacgaaaggaacaatcatgacgagcagcgccgaattctcaggcatcatctgcccatccatcaccatcaccaaggacgacggtgacatcgactatgaacgttgggggcagcatctcgatcatctgatcgaggccggtatcaacggcgtgctggtgtttggcagcatcggcgagttctatgccttccctctggacgtcaagaagcaggcggtcgacttcgtggccaagcatgtcgccgggcgcatcaaggtgttcgcgggcgtgggcgataccaacttgaacaatgtgatcgacttcgcgcgggcagtcgaagcaagtggagtggatgcgctcgtggtcgtttcgccgtattacttcggccctactgcgggaggcgcgaaggcgtacttcggcgcggtcgctgaagcgacgaatcttccggtgatcctctataatttcccaccgcgcaccggcagcgacttgaccccggagctcgtggccgagcttgccgccgcgcacccgaacatcgtcggcatcaaggacacggtcgacacaatcagccacacccgcaaggtgattcacgcggtcaaggccgtgaatccacggtttgcggtgttctccggtttcgacgagtactatctcgtcaaccgcgtctccggcggtgatggcgtgatctgcggcatgaccaatgtggagccggagaccttcgttacgctgcaccgtgcatatgaggccggcgactatggcaccgcaattgaggccgccgaacgcatcagccacctgatggcgctgtacgatcagaccgacctgttcatctccgccatcaagggtgcggtcaaggccaagggactgaacatttccaccctgatccgtgagccagcggtgcaactcactgctcagcagtatgaggcgattaaggcgattctcaagtagtgtatatctcaggcttccgcggaatcctacggtggatttcgcggaagtttttttacggtgattacagttgccggctcagctcagcagcgccgcgatgatcgcgataaacaccgggctggtcatggtgctcatcagaatgccgtcgcgcgcgaaggtgaggcccacgttgtagcgggccgcgtagttgtacacgttctggccggtgggcagagcggcgagtaccacgcaggcgtacagctcggagccgcggaagcccatcacgaaataggcgagcaggaacgcgatgattggcatgatgatgttcttgaggaccgcgaccgtgaagatggccgggcgatcgcccttctgctgcagcggcttggtgccgtgtagggacatgccgaacgccatcaggatcattggcaccgctgaatcgccgatcatgtcgatcgggtcgaaaatgaatttcggcactgggaaccagccgcttttagcggaaatcgcagagaccacaatgcccagcagcgaaccgataagcagcggttgatgcagtggctgcttggcgatttccttgatggagaccttgcccttggtggtcacgtccagcactgtcaggcccaccggtgtgaagatggcctgctgcatgaccagaatcggtgccaccagagccggattgcccagaatgtaggtggcgattggcaggccgatgttattggaattgaggtacagcgaattcagggcgccgatggtggcgtccggggcgttcaggtggaagaacatgcggttgagcaccaggaacaccacgcctaccagcacggcggagaagaacgccacgataatcgagggatggaagatgtcgaagatcggttccttggagaggatggcgaacatcaggcacgggctcgatacgaagaaggagaaccggttgagcaccatctgagcggacggcccgccgattcgcatttgtgcggcgacatatcccaccgcaatcacgatgccgataacgcagaagccttgcatggcgctgattagacctgacataatcctccctttcgccaccccagtgtggcacataaaaatgtattcggccgcaaaatctcatgtagtgggtgtgctgggcccgccgcccacgcggtacgctgttcacatgacgcttgaattgaaccgcaccgcatccactgccgagcagctgaacagcctgctcacccagatcatggagaacttctccgtgtccgaccacgagggccccctcaccgacgaggtcgaggccttccttaacgagcaagagcacctgaccgtccgccgtcacggcgacacagtggtggccagcaccgacttcggcgagccgaaccgtgtgatcttggccgggcacctcgatactgtgccggtcatcgacaatttcccaccgaagtggctggagcccggcgattcgctgattcgcgaagaaatcgcccacgctcatcccgaagaccgcgtgctgtggggccgcggtgccaccgatatgaaggcctccgacgcggtgatgctctacctcgccgccacgctcgacggccgcacgccggaaaccaccccgaaagtcgacctcacctacgtcttctacgaccatgaggaagtcgtcgccgaaaagaacggccttcgcaaagtcgtcgaggcccatcccgattggatcaccggcgatttcgccatcatcggcgagcccaccaacagcggcatcgagggcggttgcaacggtacgattcgcttcgacgtcgtgacccacggcgtggcagcgcactccgcccgcgcgtggatgggggagaacgccatccacaaggcggccgacatcctgagccgactcaacgcttacgagccggccaccgtgaacgtggacgggctcgactatcgcgagggcctcaacgccacgctgatttccggcggcaaaggcacgaacgtcattccggatgaatgccgcgtacacgtcaactaccgcttcgccccggacaagtcgctggccgaggccaaggctctgatgatgggcgcggatgccggtgccgaactcggcaatggcgagcatgtggccactggcggcgtgttcgagggctacggcatcgaaatgaaggacgaaagcccctccgcgcgcccgggcctgaacgccccgctcgcccaagatctggtccgactggtcaaggagcgcaccggccgcgacccgttggccaagctcggctggaccgacgtggcacgcttctcccagctcggcatcccggccgtcaacctcggtgccggcgacccgctgctggcgcacaagcacgacgagcaggtgcccgaatccgacctggccgccatgaccgcaattcttaccgactggctggtctgacacctctcgagctcccctctctgaggggagctgtcaccgcagggaggggagccgagagaacgtcagcctcgccgggccacgcccgcacaaaatatgtggcatactaaaggatggtggttctgcataaccatcagcgtgcgagatggcgtcgatccccttgcggctctcgagaatgagacaacgcaagcgccggtgtccgccacccgcaggacagacttgagacgaagttgcctttacgcggcgcgttttcgcgcggccacggtgagagcgtggtgtgagtcaagcgtataggcctggaaataggcgtcgtgatgcagcgcgccgcgaggagcattgtgcccactgacaaccgtgaaggtttcgtcaacgacggaaccgataattcaaccgtatccaatgccgatttggctgcagccgtgaacgctgcgcctgccgccgcctcccagcccgtcgaacctgttcgccgtcgtcgtggcggccgccgcgtggtccgtggcaccggtgctgccggcgcctccctggaactgcaagtgcaggaacgcaccccgctgttcgaagcccccgcgcttcccaatgccggcaccgcggccgattccaagtcatccgattccggcgattccgatgaatccagcgattccaaggattccgccgaacgtccaacccgccgccgtacgcgccgcgtttccacggccgacgatgccgccgaaacgccgcgtcgcacccgtcgtacgtccgccgcatcttccagcgataccgatgatgacgacgagactccgcgccgtccgcgccgcgccgcttccgcagtggccgacttggatagcgaggatgatcgtccgcgccgttcgcgccgcacggtcagtgccgatgatttcgatgacgatgacgccccgcgttcccgccgccgttcagtcgtggacgatgacgattacgacgaggaccgttcggttcgccgccgctctcgctcccgccagtccgacgatgatgactacgaggatcgcccggttcgctcccgcctccgccgtgcgcctatggatatggatgatgatgacgaagaccgtacggttcgccgtcgttctcgccgtgcagttgcggatacgcacgaggacaccccggatgagcgcctgttcgacgcggtcgaatccctgccctctggccacgagaccgtgcgccgtggcaagccgatgacgtccctgctgttccaggaaccggtgctgcccgccgccgtggatgcgcacgataccgctgacactcgtgatgacgatgttgacgccgacgaacgcccgtctcgtcgctcccgccgctcgcgcagccacgacgatgacgatgcccagccgcgcagccgtcgccgcgacgatcgcgacgaccgcggccgcgcctccgccgaccgtgacgcttcccgtgacgccgcgtccggcgataccaacgccgatcacgacgatttcgacgccgacgacacctcggactcccgccgttcgcgccgctcccgccgtctgaacgcccaggagcgccgtgcagccgccgaagtcgagcagattgaggaagacctcgagctggacgatatcgcctactcgccgattgccgaggaggagggcgacgaggaatccgacgtcacccgcacccgttcgcgccgtcgccgccgtcgtggctcacgcggcgaaaccggtgccaacggcgagcacgataccaccgagaacgatgccgaggatacgcgttcccgccgtcgtgacgatcgcgatgatcatgaccgtgatcgcgatgaggacgatgaggagcagaccgtcactcgccgtcgccgtcgccgtcgtggcggcaagaacggcgagggcaccgacgaccaaagtcagaacagcgaacagccgctggtccgccgctcccgcaagcagcagtacatcgacgaaatcaccgatgtggaaggctccactcgtctcgaggccaagaagcagcgccgccgtgacaaccgccgtgagcgcagccgccagagccagcttatggaacaggacttccttgcacgccgcgagaacgtggaccgcctgatggtggtgcgcgagaaggaacaccacacccagatttccgtggtggaagacaatgttctggtcgagcattacgtctccgacattcaggaagtacagaccgtcggcaacatctatcttggccgcgtgcagaacgtgctgcccagcatggaggccgcattcgtggatatcggccagtcccgcaacggtgtgctctacgccggcgaggtcaactgggatgccgctcgtctcgaaggtcagccgcgccgcatcgagctggcgttcaagtccggcgacccggtgctcgtgcaggtcactaaggacccgatcggccacaagggtgcccgcctgacctctcaggtcacgcttgccggccgcttcctggtgctcgtgccctccggtggcatgaccggcgtgagccgcaagctttcggagcgcgaacgcagccgtctgaagaacatcgtctccaagatcgccccgaaagacatgggcgtgattatccgcaccgcggccgaaggcgcatccgaagacgccatcgtcaaggatctcgaatcactggtccgccagtgggagcgcatcaacgccaagcgcgaggaattctggcacggcaagcgcccgaaactcctgcagggcgagcccgacgtggccatccgcgtggtgcgcgacatcttcaacgacgactttagcaagctcatcgtggaaggtgacaaggtctacgaccgtatcgaggaataccttgacaccatggcccccgacctgaaggacaagctggagaagtgggacccggccgagcacgaaggcaaggacgtgttcgacaaatggtccatcgactcccagctgcgtaagggcatggaacgtcaggtctacctgccgtccggcggctcgattgtcatcgatcgcaccgaggccatgaccaccatcgacgtgaacaccggccgctttatcggcaagggcaagtccttggaagaaacggtgacgcgctgcaacttggaggcgtctgaagagatcgcccgccagctgcgcctgcgcgatatcggcggcatggtgatgatcgactatgtggatatggtcatgcccgccaaccgcgatctggtgctgcgccgcttggtcgaatgcctggcacgcgaccgcaccaagcatcaggtggccgaagtcacctcgctcggtttggtgcagatgacccgcaagcgcatcggccagggtctggtcgaggcgttctccgaggaatgcccgacctgcaagggccgtggtttcatcctgcatgatcagccgaccgtttcggccgactacgacgatccctacgcgcttcgcggtggtgacccgttcgtcaaaaccaacaagcacggtcgcggcaccgctcccgctcccgaaccggctggttccagcgccgacgtcaaagccaaactggctcagattgccgccgctgccgtcgccgccaacaatacggcggaagagtaacaggtgtgtcgtgcttgacacgcgggcaaaaatcatttgatttagtccgcatggtggtgtagatttgaaactcggtgtctgaccgcaggctcggtgcgtgttaggcaaggtagctttccaaaacataaaaggaacgataatgtacgcgattgtgaaggccggtggccatcaggaaaaggtcgaggttggcgacgtcatcctcgtgaaccgtctcgacgccaagaagggcgataccgtggaattcccggtctccctcgttgtcgatggtgacaaggtcaccctcgccgccgccgatctggccaaggtgtccgtcaaggctgaggttgtgaacgatgaagccaagggcccgaagattgacatccagaagtacaagaacaagactggtgttgctcgccgtaagggtcatcgccagaagctgactatcgtcaagatcacggcgattgcctgagttatagaaaggaccatgaatcatggcacataagaagggtgcgtccagctctcgcaacggtcgcgattctaacccgcaatacctcggcgtgaagaagttcggcggcgaagccgtcgtggccggcaacatcatcgttcgccagcgtggcaccaacttccacccgggccacaacgtcggcatgggcaaggaccacacgctgttcgccctcaccgatggctccgtgaagttcggtgtgcgtcgcgaccgcaaggttgtcgacgtcatcgcctgagcgatatagcgtcaagctttttcaagccgcgcccgtaaggacgcggcttttttgtaaggtaatcaatatgagtgattttgtggatcgagtaaccgtccatgtcaagggcggcgatgggggcaacggttcggccggcatccgtcgtgagaaatacaagccgttggccggtccgaacggcggcaatggcggcgacggtggttccgtggtgttcgtggccgaccgtaacgccaccagcctgctcgactatcgtttcatgccgcatcgtgtcgccggcagcggcaccatgggtttgggcgacaataaggacggctccaagggcgaggacctgattctgcccgtgccctgcggcaccgtcgtctttgaggcgcgcggcgaacagggcaaatccaagcatcccggcgcacagctcgccgacttgcgtcacgagggcgaccgctgcgtcgtcgcccagggcggtgccggcggcctcggcaacatcgccctggccaacaagacccgacgcgcccccggcttcgccctgctcggcgaactcggcgaggaacgcgacgtgattctggaactgaagtccatcgccgacgtggcgttggtcggtttcccctcggccggaaagtcgtccctgattgcggcgatgagttccgccaagccgaagatcgccgactacccattcaccacgctggtgccgaatctcggcgtcgtcatcgccggcgactctcgatacaccatcgccgacgtgccgggcctgattcctggcgcctctgaaggcaagggcctgggactggagttcctgcgccacatcgaacgtaccgaaatcatcgcccacgtgattgattgcgccacgcttgaaccggaccgcgacccgatgtccgactaccacgcgctggaaaacgagttggcgctctacgccgacaagctcgaactgccattgggtgccatcccgattcccgaacgcccgcgcatcgtgattctgaacaagatcgatgtgcccgaggccaaggaattggccgagttcgtgcgtccggagttcgagaaactcgggctgaaggtctttgagatctccaccgcctctcatgaggggctgaaggagctcaacttcgcgttgtctgcgctggtgcatgagatgcgtgaggaagtggccaaccgcgagcaggccgaagaggagacgcgcgtggttatcaagccattggagaccaagggccgccgtccgcgtcgcgctgacgagggcggcagtgcgcttgagttcacggtcgagcgccgcgaactcggcaatggcgaagtgttcttcgaggtgcgtggcgtcaagccggagcgctgggtcatgcagaccaacttcgacaacgacgaggccgtgggctatctggccgaccgcttggccaagctgggcgtggaagatgagctgcgccgcaagggtgcccaccctggtgacgaggtgcgcatcggtcgcggtgcccgtatggtcgaattcgattgggatccgaccatctccgccggtgccgaaatgctcgacggctccaacctcggtgcccgaggcaaggatctgcgtctcgaagagcaggacccgcgcacgcaccgccgctccaacgccgaacgtcgtgcccaataccacgagatgatggacgcccgtgccgccgtgcgcgatgcgatgatggccgaacgcaaggccggccactgggccgacccgaccgttgacgacgatcgccatgacgaaaccagtctgttcggccacggtgagtccagcgaagatggtgaaaccgaggaataaatgagcactccgagtcaggccgaggtgcggcgcatggtcgcagcagccggaaccattgtcgtgaaagtcggctccagctcgctgacccagccgagcggtcacctcgacccggacaagctcgacgctctggccgccgcccttgcccaaatacgactgatgggcgggcgtgtagtactggtttcctctggtgctattgcggccggcttcggcccgctgggctttgacgaacgcccggccgacgtggctactcagcaggccaccgcagcggtcggccaaggtttgctcatggctcgctacgagactgcttttggccgtttcggtattcgcgtcggccagattctgatcactgccgaagatacgattcgtgccacccagtaccgcaatgtggaacgcacgctggaccgtctgctcgacctcggcgtggtgccgattatcaacgaaaacgattcgttggcctcgaacgagattcgtttcggcgataacgatcgactctccgccttggtagccaatctggtgcgggccgaagccttggtgctactgaccgacgtggacgcgctgtacactgcaccgccctcgcagcccggctcccgccgtgtggaatatgtgcccaacgttatcgatgcacttggcgacatccaagtctccggctccggctccaaggtcggcaccggcggcatggtcaccaaactcgaggccgcgcgcgtggcggccgtctcgggcatccccacggtgctcacctgcgcctcgaacgcgggcccggcgatgatgggcgatccggtgggcaccgtgttcgcaccggttaaggcccgcggctcatcacgccgtctgtggattggttttgccgccgacccgcgcggcacgattgtggtcgatgcgggtgccggccaggcgattcgcggcgggcgtgcctcgctgctggcggccggcgcgctcgaagtgcatggcgatttttccgccggcgatccggtctggatcgatgccgaaagcggcgaacacctggcccgaggcctcgccggcttcgattccgaagaaattccgcagatgctcgggcgtaacaccgcccaactcaagcgtttcctcggcccccagtacgcccacccactggttcatcgcgacaatcttgtacttgtgtgactgatgggatctgtcacacgacagatcccatcaccatagtgcggctctggcgatttttcgtgctgtaggtttagcatggaagccatgactatggcgcaatggcagactctttccgaccgtatcaacactgtggcaccgagcgctacgctcgccgtcgattccaaggccaaggccatgaaggccgccggacttgacgttatcggcttcggcgcaggtgaaccgaatttcccgacccccgcaaacgtggtcaaggctgcggcagatgcctgccttgacccaaagaattacaagtacacgcctacgccgggcctgcccgagctgcgcgaagcgattgcggctaaggtgctgcgcgattccggctacgaggtgtccgccgaccaggttgtggtgaccaacggtggcaagcaggccgtgtatgaatccttccagatcttgctcaacgatggcgatgaggtcatcatccccgctccgtactggaccagctatcctgaagccgtcaaattggcgggtggcgtgccggtcgaagtattcgccggtgccgacgtgaacttcgagccctcgcttgaggcgctggaagcggcccgtaccgagcgtacgaaggcaatcatcgtcaactccccgaacaacccgaccggagccgtctggaagccggaaaccgtggaagcgatcggtcgttgggccgtcgagcaccacatctgggttatctccgacgagatctacgagcacctgaactacgacgacgcgcgcaccacctacattggtgccgccgtgccggaatgccgcgggcagctgctggtgctgaacggcgtggccaagacctatgcgatgcctggctggcgcgtgggctggatggtcgcgccgcttgaggtggccaaggccgccaccaagctgcaggggcatatgacctccaatgtggccaacatctcccagcgtgcggctctggccgccgtggctggcccgctggacgaggtgcatgagatgcgcaaggcgttcgatgcacgtcgccgcgcgatcgtggctgctctgaacgatatcgagggcgtcaactgcccgactccgaccggtgcgttctacgcttttgcggacatcaccgctttgcttggcaagccgctggggcccaacggcactgtgtccgatacgtccgctgattttgccgccgcactgttggatgaggcccacgtggccgccgtccctggtgaggccttcggtgctcccggttacctgcgtttctcctacgcactggccgacgaagacctagccgaaggcatgcgtcgattcaaggaatgggctaactgagaagagtcgtgtgccgcgcacatgccacgcgcgcgacacgcgatttgcgataatccaccggagccgttactataacaacttggcggtttcgccgtggcgaagcgttctctacggaatgcacgccgaggtggattttcacctagggaagtggcgcaattggtagcgcaacggtctccaaaaccgtaggttgtgggttcgagtcccgccttccctgccaagttttcaataatcaagcagctgacgcgaggtacagaatggctaagacgaacaacagcgaaaaggtagtcaagccgaatgtcttcatgcgtatcggtctgtttatcaagcagatcatcgacgagcttcgcaaggtcgtaacccctactgccaaggaactgttcttctggtctctggctgtgtttatcttcgtgctgctgctgatggccctcgtcacgggcatggacttcggtctgggcaagctcgtgctgtgggtgttcggctgatccgcacaacctaaggtgaataacaacgcatgagtgatgaactgaatctcgagaatctcgacgccgtgccggctgaggagcctgttgtcgaggcttccgaagctgctgccgatgaggcagctgctccggctgaaccggttgctgacctttccgcagaatctgacgcatccgtcgacaatgcagatgttgagtccgccgctccggccgcgactgaatccgctcccgttgcttccactcagaccgagaccgtttctctggatgaggacgaggaagaagtcaacgaatccgagcaggccgaggaaaccgatgccggtcagcaggccgttgacgaattctccaagtccctgcgttcccttgatggcaagtggtatgtgctgcacacctactctggctatgagaagcgcgtgaagaccaacatcgagtcccgcgtcgcctccttcggcatggaagatcagatcttccaggtcgaggtgccgatggaagaagtcgagaagcacaccgaaaagggtaagaagatcatcacccgcgtacgtattcctggctatgtgctgattcgtatgtggccggatgagaacgctcgccgtatcgttcgcgaaaccgaaggcgtgaccggcttcgtcggcccgaccaaggatccagccccgctctcccgcaaggaagtcgtggcaatgatggctccgatgatcgcttccgaggcactcaaggccgccggcgacaagcccgccgccgccaagaagcgcaaggtcgaagtctcctacgccgttggcgatcaggtcaccgtcaccgatgggcctttcgccaccatggccgccgttgtttccgacgtggagcccaccactcagaagctcaccgtgctcgtgtccatcttcggccgtgatacgccggtggagcttggcttccaccaggttcagaagctggattaaccccaaactttgcagagcccgaccatcgtggtcgggctttttgtgttgtccgggtggatttgcataataggaaagcttgtgtctggagggaagacccgctagcacagcacagcaatataagttgcgggaggagaccgaccacaggccgattgcctacagcatgcacggataaataacgagtcaagaccgagcatgatggcagacagccgaacctgaggacggcgaccattcgaaccgcgttatagaaagaagaaccataatatggctcccaagaagaaagtctcggcgctgatcaagctccagatccaggctggcaaggccaacccggccccgccgctgggcccggctctgggttcgcatggcgtgaacatcatggatttctgcaaggcatacaatgcccagacgcaggacaagatgggtcaggtcatccctgtcgagatcaccgtttacgaagatcgttccttcaccttcgttctcaagaccccgccggctgcagctctgctgaagaaggctgctggcattgagaagggtaccgagaacccgctgacccacaaggtcggctctgtcaccaaggcgcaggttcgcgaaatcgccgagaccaagatggaagatctgtctgctcgcgatatcgaggccggcatgaagatcatcgagggcaccgctcgctcgatgggcatcacggttacggactgataaggagaaggacagatggtaaagcgttccaagaagtaccgcgaagccgctgagcgcgtcgatcgcaacaacctctacaccgccaacgaggccatcgctctgctcaagagcatgcctgcctacaacttcgaccagaccgtcgaggccgtgttccgtctgagcgtcgacccgcgtaaggccgaccagctcgtgcgcggtaccgtcaacctgcctcacggcactggtaagaccgccaaggtcctcgtgttcgcccgtggcccgaaggccaccgaggccaccgaggctggcgccgacatcgtcggtgatgacgacctgatcgcaaaggttcagggcggcttcctcgacttcgacgccgtggttgctactccggacatgatgggcaaggtcggccgtctgggccgtgtgctcggtccgcgtggcctgatgccgaaccccaagaccggcaccgtgaccatggatgtcaccaaggctgtcaaggacatcaagggcggcaagatcgagttccgtgtcgacaagaacggcaacctgagcttcctcatcggtaagatgagcttcgatgagtccgctctggacgagaacttcaaggccgtggccgacgaagtcaagcgtctgaagccgtccaccgtgaagggccgttacctgaccaaggcgaccatcacctccacgatgaacccgggcgttccggttgacccgaacactctggcctgaggctagcgagcttcaatagctactgaaagggacttcccgtaaagggaagtccctttttgcatatgcgatgaccggttgcgagaaggtgaacctggatggtcacgcaatcgaattcttgcaacacgccggtgaacgcatgaatttgttacgcatcggcaatgcaaaacggattattctggtatcagaacagcgcaaataggctgtttgcgacacgccgaaggaaccgtgtgattgcaacgattcctgaggcttttgcgcgcctcgatttgcgcgaatccaaacatgcgtgtaagttattcacctgttgccgctcagcgcggcgggttccttcctctggttggtttcctgtcttgctggtgtggtggtggtttgagaactcaagagcgtgtttgtactacttctttatagtcaatgattgccagttcattcctcgcctgattgcctgtcgtggtggtc

SEQ ID NO: 3120 - DNA, 57766 bp, Unknown
  R215_18m  MAG No. k141_23382
gaagatcagcgcgcgggcaggggcctcggggtcgccgtgcggggcgggcacgtccatgacgatctggtcgagcaggtcggccacgccttcgccggttttgccggagacgcgcagcacgtcgctcggctcgcagccgatcagacctgcgatctcctcggcatgcttgtccggctcggcggacggcaggtcgatcttgttgagcacgggaatgatggccagatcatggtcgatggccatgtacaggttagacagggtctgcgcctcgatgccctgggtagcgtcgacgagcagcaccgcgccttcgcaggcggccagtgcgcgggacacctcataggtgaagtccacgtggccgggggtgtcgatcataccgagcgtgtattcggtgccgtcaaaggtccatggcacgcgcacggcctgggatttgatggtgatgccgcgctcctgctcgatatccatacggtcgaggaagcgatcgcgcatctcgcgctcgggcacaatgccgcttaactgcaggatgcggtcggccacggtcgacttgccgtggtcgatgtgcgcgatgatacagaagttgcgaatcaccgactgatccgtggaacccggctgattgtgttggacgaccaacgcattcctcctcttggcatatactcaaacttcacctagtgtagccgagggactgtattcggcgtggcattgcgcgggtttttccggggctcatgctatcctctaccttttgtatgtccttataacacacatcgtttggagtaaacgtggcaaacattaagtcgcagaagaagcgcgtgctcaccaatgagaaggcgcaccttcgcaacgtggctgtgaagtccggcctgaagaccgccatccgcgccacccgcgaagccatcgccgccggtgacaaggctgccgccgaggccgcctacaaggttgccgcccagaagctcgacaaggctgctggcgctggcgtgatccacaagaaccaggccgccaaccgcaagtccggcctcgctgttgcgatcaacgctctgtgagcataagcctcttaaggttttagcaagtcccgcaagtcatctggcttgcgggactttttatatctccgttcaaagaggtacattggcggtcttgcgaaatgacatctccgttcagaaaggtaccgaatccgagaaagcccaagtataaacgccgtcattgcaacgcttatactcgacgtttcgtgcttcaggtacctctttgaaagcagttgtcattttgcagaaggccaaatgtacctctttgaaggcagttagccctgaggcggtcttgaatcatcctgaggcttgtcttcttcgtccttggtggtatcggcgtgcggatggatgaccgggcgcttgagatatcggctttcgctgggcaggtagacgcgatgacgctcgacggctccgggcaaggtgacgttgaagccgaccgagagcaggcgcagcgccaccacgatgatgacgatcagcacgtcgagcagcatttccgagcacatgtcgaaccaaccgtagtgcacaccacgccatacaagcacggtcagaatgcaaccgatgaacgagggcacggcatagaggtgtttgtctcgaataatcattggcacatcgccgatgaagatgtcacgaatgaggccgccggccagtgctgtgaacatgccaaggaatacggctgtcatgcctgaggaaccgtaggccagagcctttgcggtgccgctgactgcgaatagtccgaggcccagagcatcgatgacagtcatcgtccatttgagtttggtgatctccgggtgggccaccaccacgataatgccggaaaacagcgtggtgagcacatagcctttgtcggtgatgccgaccggcggcagggcaccgagcatcacgtcgcgcacaagaccgccgccgagtgcggtaagccatccgcacagcatgatggtgaagatgtcgtagcccttgcgaatggcggcaagtccgcccgacaatccccaacacaggattgctaaatactcgatgaccacaaaaacgatgttgttctccaacaccacctgcatgagccgctcccctctggtaccgcttcggttcgtctcagtccgtcttcgttttctgttcccgttcatccttattcggcgctacagcccgtcgtacccgagcctacaacaggccttgcctgacgcaattggactagagaacaaaccgaataaatgctattgccggttcgactccacactttttttcttacagcgtcgccagcgcgccaaactttgagcagccaccgacgttagtccttctcatttgtcggaggttggccaaagtttggcacggcaccgacgatcacgcgctccagtgtcgttgccgtgccaacttatgtacagctaacgacgctaagcccctttttaccgtcgtttgatcgccagaacctgacccgttaacgacgctaaggtgtctcagcgacgtcagcagtccaaaccttgaaccattactgacattgaacatcccccagcgtcgccagaagctcatgtcttgtctcaccaccgatgcaacgccgtcgctgcctctgccaccggcttcagtttcgagcaatgctcgaagcctgacggcaaacggtaggctgaagcatagtattccgtcatgtcactcatcttgctcataggtttgctcctgttctcatctggatgaaccataaccaacccccgcaacacgcagaagacctaaatcatattatttgttgcgaaatgttgctaaatccatctgtacctctctagccaagaacatttccaatacgccaagaccccttggaattgttgacattctaaggggtcttagtcggaaacaaaaggtgctagttcagcacaccttccacatccagtaacgtataatgaaatcaacggctcccacggaaagaacggcggaattccaacgatttgatacgattggtataccattggaataccattcgccacggattgtttgttggagaatgttggagaatgaaggatgctgaatgcctaggataaggaaaaccggagcggtctaccccatccgccacgagcagcggaaaacactcaaggacggcacggtaaagacatacgtgaactggcaggccaaggtggacggccgatgggtgtccgccaagacctacaaggaatgcgacaggaaaatagccgaagccctcaaggagaaaaccgaatggggcatgggcgtagaccgcgccacccggctcggcgagtacgcggaacgatggttcgagctgaaacgacgcgacctgaaacccaagtccatcaacaactacgcgagcctcataagcgtgcacctgtgcaagtacgcgaacgagaagctgggcgaagtgaccgcctcggcggtgcagcgcatgatagccaacatgcgcaacctcgacggcaccccatgctcgtacaaccggcagcttggcttctacaacatccttaaccagatattcaaggcggcggtggccgaccggctgatacccaccagtccggtcaccagcgcggcaaggccgaaacgcagggacacgggattggccggggaccggcgcaccatcaacgggcccgtggccgtgtcggcggacaggcgcagcggcacgcaggaccgcaaggcgttcaccgtggagcagatgcaggacatgctcgaagcgtcctccgacgacctgtttctgggggcacgccaatggtggcgtctgctcaccggcatgaggcagggggagatactgggagccacgttggacgatctcgacctgtggcgggacaagacgttggaaaccccggacagcggcgagatatggataggcacctacacggtgaactggaaactggaaagcctcgacaaggagcatgggtgtggggagcccggcagggacggaagatacccgtgcggcttcaaacggccttcgagctgcccccgataccggtggagggtgccggacggatacgacatgatacacctgtgcaaggggtacgctttgacgccgccgaagtccgcgagaggcaaggtcgtgccgataatcccccagttgggcaccgtcgtgcaccggtatctggaggccacggagaatatcatcccgaacccgtacaacctgatattcaggacgcgcgagggtatgccgttggccgcgttggatgacagggccggtttccgcgacctcatgcgcagggcgggcatccccgactacgagaaccggtacgggcatgaatgccgcaattccgtcgtatcgctcctgttccatatgaaggttgatcccggcatcatccaacgcatcgtcggccattcgagcatagccatgagcgagcattaccgcaccgtgccggtggaggatttgatgcgcggcatggagacgataggcgacgggctcgatttgaagcagatcgaatggaaagcctgacatggcgcgccgaaacttgccgaccatacaataggagagtaagttattcggctcaccctgaccgagattccaaggaggtggcatgggcaaactggtatgggaggacgcgcgcgaacacgcgcaagatgtccttgagaattattgggacgggaagttccccgtcaaaatcgccgccatcagtaaagccatgggcgtcatcccctatcaggcctcattgcctgcgggcgtttctggcatgattgtgaagaaacccagcgaacaggcccgctcctatgtcgaggcatccgacatcgagacccgtcgccggttcacattggcgcacgaattggggcactacgtcgaacgtgtggacgtatccgacgacaatgatttctcgttcgtggaaaaacgcgagcccggccagtacgatctgcatgagttctatgccgacgagttcgctggcgcattgctcatgcccgaacaaccgttcatgaaaatgctggacgagaacgtcagcctcatcgagatagccgcccggttcggggtctcattggacgccgcccgcaaacgccgggaaagactcagaaggaatccaccggagaaggactgaccgatgacggctgacctcgatgaaccttatcttgatcagaacacggacgctctgggcgggaaagcaggtgacgacacggcggtgggccggttgcccgacagggagtccgcccgagtcgagagcgaagccagggaacgctccgaattgacagacgggctggaggatatgagccgaaacgattcacccggctcgaacaagtcggacgcctcggctttgacctctatcacgggatggcatcctttcctcaggttcctgttcagggtggccgacatggaatacgccttcgaaaacaacagggccatccgcgtccatcgattcatccgcgaacataaatggatattccgcatatgcttctgggcggattgggccatcgtagcaatcggcagcatgggcgtggtggcagtcgtgattttcgccgcgttgaaaacgcttggccttgtctgaccaccattttgtagagttcaacagaatggtctcgttctccaatacaggaggaaaggtcggggaacagcctggccccggtcggaaccgaggttgacaccatgcgtgccgctaagcataattgaagtgtctcatgaaacgttaatagccaaccgaaataagcaaaacatacttggatggtgagcgtctggtatgcgtcaagtgccgtggccccagcagggtcacggcacttttcatacgaacagcaatggtcccgtcctccaatacaggaagacgggaccattaatgccattatgctgtggaatcaggcactggcatgtccagctaaaggatattcccagccatgtccgctctcattgccatagaccaagtatccatccgttgacggaagatcaaacagcaccttgccttgagccttcaccccttggcctattatctggggaagccgctgattttcgggtaggcatgtgtaggttgttatctttgaactggttccatcgagattgccgttccactgggtgccatcattttgaatatacgtccaatagccgggagcgcccagtcccaaaggcccataggaatccgaatcaaaatcggaagttgtttcaacggtgatgtccagaacgacgaaatgaccgtttgcagggcttgtttcagctccttcgtaagccgggacgcatggtgcgtcaagggttatgttggttacggtccatgaagcgagtagggttttgtctgcctgactcttatagatgctggcagtgtcgcctattcgtttgatgaggttgcctcggctgcttgtcttgggcttctccgtttgctgaggttttgccttttccggtttcttgtagtccttggacgaggcggcttcatcagtattattgcggattgctgtgttcacggcaacggcaactcctaccgacagcgccaccacgacaatcgccgcaaccagaagctgccaccatttcagggtgacggtacccttgccttcagtcttgtgcgatggggccggtacgggttgttgctgtggctcgctcattattatccccttctcttcattgggttggttcttcatattctacttatttagtgctattcgcaggcaattccgtcaccgtcacggtccaatgacgaacgatagcccggctggccccgatacaatggcgcggcgccggcagctcgcgctgctgaacagttcttgtaatacgcccaaccggtcgaggagtcgtcggaggaataagatgagcccgaattggttgacgtcgaagccgctgctgcggcgtcctcccgttgctttaccgcgttctcgcgtgagtcaagctcagatgaccgactatccaaatccgattgccttttatcgagttcagccttcttgctgtcgtactcatccttgtagggtttgagctcatctatccgcttctgattgtcaatcacaattgactgcaagtcagatatcttactgttgaggttccggacttcctctttatgggcgtcgatcatcttcgtgtattcgggctgctccaccggatcacgagaatcgtatccgccttgccagcccatgaagaaggcgattagcgcgaccaataccaatgccagcaccatgaataccgcgaaaagcggtgccggaatcctgttcactgcacgactcgcggcttcaatggatttctcgacaagatcatccttctccggcttcgaccccttaacctcagtcgcggcagtagaaaacgcgggcttagtggtgctgggttgagtcttggcggcattcgcctgctgtttcacctgatgcttctctatttgggagattcttctgctcaggtcatggaagaacacgctaagaactctgtctccatcctcgccttctttgatgagatagacgatggcctcatgatctttcacccttatccgcaatttgcttccaaaggacgagcgagctcctatatcagtaccttgcttaaccaagacgagaggagaatacggccctgatttaagtagggaatcgattgccgtcttaatcagttgtggcgagcattcgtatgtttttgattgactagacaccacgtccccttgccgaaacccattctctccgtatgagcgatactatcattatttggcttgaacggagaacatctgaattgcgattatccaatatctggtgcataatcagaatcatgcaatcgaacaaatgttcgggtcagtaggaaaaagaatggggcgcgtctcctccgccaagatcggacgcgccccaaagcattgcccctaccggaaaggataggaacatgaactagtgtatatcattctccttatcttcaagcccagttctcgcggcaatggactcagctcgggacacaaggtctgacaccttgattcccagagcgtcggccagtttacgcatctgctcaaagtcggctaccgactgaagcttcagaattttccgaagcgtcgagagaggcacaccagacttttccgccagggcggggtttctaatacctgcttctgccccataggactctatggcttttgccagagccattgagtacggggtgatttctcgtttatttgtacccatgtgggttacattactccatattaggacataaagcaaccccaaatgggtgacacgccgtatttgaaagtgacccaaatgggtgataatgtattccacatgagcagcaaacaagcaacatccaaagagcttggagaggcgatgaagagcctctttaagtggcgcggagttaatcaagatgaagtttcacttgagactggcataccgattacttcactcagtcgaaaactgaacagcggtgtttttaggtatgaagagatgtgctcgatagcttcaatcctgaaagtccagctttcaacgatcattaccttggccgaatggatacacggcggaggagattttgaaaggttcgctgttgagcatctttctccttcttctcttaataagtctcctgtattggaggtaacagcatgagtgcaaaaaaacatggaagcccctgagatttacagcggaaaggtaggagtggagatcgtaccggacatgcgcaaactcaggagcttcgccaaggacttcatcgccctcgtggacagttactggccggagaaccccggtggagtagacgaacgcgagcaagcctcgcaagcatcatggaagacgccttgccgcaacgttcgtctgatgatggaccgatacgaatcgaagaatcatgtacaagactaagtccaagaccaatgagcatgggaaacatgtctatgactcccctgctatcggcaaggtgatgtacgacccgttggaggcggatgtcacgaagacctttgaggcccacattttcaaaggtgaggcgtatccgggatacgtaaaggtgacggcaccgctttccgtatgcgaaaaactgaccccggaacaggcccgcgagatagcgaaagcactcaatgatctggcggataaggccgaatcctttctattccgaaggaacttaacccgataggcaggtggcgatatgagtgacggcaactattcgtatgtctcggattcgtcggagcgtgttgccaacgagctgaacattctcaacacgtggatggctcagatcgtggaaaccgggcttccccaaatctccgcgcagttggcggagatctggggagaacaagccaagcgtcgtgagtcagactccgagtttgtccagacggtcggaaagctcgcgctggttggcggtgataacgtcaatggccttggctgtggagtccatcgacgttttgatgtgtctcagccaggtctcggcgttgttggaggcgttcaggaagctcatgtctcccctgatctcccgagccgctttttgaagcgcgtcgatgtcggtcatttttcattcttcctttcgggtttggcatgtggtttggcgattacaagcctaatccgaaagggcctttaaacgatattcacaagaaagagaaaacaatggtcagccaaaatcgtaacctttcccagaagctcgtggtcgaggaacgtcacacccgtgaatacttcaccggcaacgtcactgccgaaggtcttatcaacgcggaaatcgacaccgattacggtgcccgccccctcactccaagtcaggcgcgtttcgccgccaaggcccttgaagacctggccgactgcgccgacgagaagaacgaggaataacaagtcctgccgcagtgggtcgttttttatccacctatcgactacaggcaaataaataccatactgcgatctgctgcggcaaccatcggccggaacccttcggggtgtctggacacgcaccatcgccgccacaccataggactcgtcatccatctctcagaaaccagaaacacggtggcggcaaggacgttctcggttcgaatccgagtccggccacgaggaaaggacatgccatgaacaggaaaacgtatggggctcactgctccggctggcagcattcacctgatgaacgccggcaccggcatgagaacacgaagacaatcacttgtctgacgttggcggcgaccgggttcctgattctctcactgcaaccctatgcgggcccgtggagcattctcgcaggcttcatgtgctgttcgcccgtcatgctctcgttcgcattgtcgaaaggaacacaaaaatgatctggttcatactcgccgtaatactcctgctcatcggagtcggcatgatagccgtcgcactcaccaacggtggcgacggagccggtttcggcttcattcccatcatcgtcgccgcactgttgatgattccggcatgcctatactcgctggacgtaggcgaggtggccgtcatccgcagcatgggcggctccgtcgccggtcatgcggagaacgcgggcttccatgcgaaggtgccgtggcagtcggtcatcaaatacgatacgcgcaacaacctcatcaacttcttcaaggacaccgactacaagtacgacggcggcagcgcggaaggcaaggagatcacggtcaacgaccgtagcggtgccagcgcgaacatcgacattcaggtcaactattcgctcgaaccgtccgccgccgaaatgctctactcagaatacggcaagcagaccacgttcacgcagaactacatcggcaacgacctgcgcagcgtggcccgtgaaacctccggcaagttcgacacgatcacgatgctcaccgaccgtggcaagtacacgaaggccgtgcaggacgcgctcacctcgaaatggaagagcatcggcctgaccgtcgaacaggtgtccgtgcaagacatccgctacccgaagtccattaccgacagctacgcgcaagcccaagccgccgaggtcgccaagcagaaggcgaagaacgagcaggagaccgcgaaggtcgaggccgagacgaagcgcatcaaggcgcagggcgaggccgacgcgaacaaggtgctgaacgattccctgaccgacaacgtgctccggcagcattacatcgacgctttgaagaacgccgaccagctgatcgtcacacccgagggctccaacaccctcatccaacccaaatgattcttccgggcggggttctttattcctttacttcctcgtccggtggcagccaagcgcatggtgccgcacctacgaagccttccaatggtcatggacttctccaaggtgcaccgggttcgactcccggcttggcgctcagaaaatttaaccccttcgcgtcctacgccggaaaaaccaatacaagggttttcggacgtgtcagcgccgacgcagaaggacaacaaccaaccatcccagtggagggacaacatcatggcaatatcaccgttcgaccaaatgagtctgctcatggagaaaacgtgggctcagattcaatcggaggacgcggactgatggcatctgatttcaactctatcgccagagccatccgttatctcggtgattgcgtccgttatctcgcggacaagtatgtggccgtgaacgatcgcgtgtactcggattggaacgaggcgtcgaaagtcgtcggggatgttggacgtgaccatgtggccgattatgcggaggcgtcacacaagcagggcaagtcgcgtacttggcgtcacagtcacctgatggagcgtgaggagcaactgtccatgcagtcgaggggttctcatgttgaccccgaatgatgtccggcatagaaagttccgcacgtatcgttccctgctttacggagaggtctacgacgtggaggacgttgacgattttctcgactcggtggccgacaccatcgaggttttaggcaaggaagcactcaaagcaagaaaggagaggcaatgaccgtcgagcagatgaccgatgacgattacttcgcgtttgacgcggtggaccagaccgcgttgaagaagtatctggtcagcccgttggcgtattcgcagtatctgaccggcgagcattcgtcctccccccagttcgagttcgggaaggcggctcacagtctcatattgggcagtggccccgaggtgctggtgaaaccgaacctacgcaccaaggaaggcaaagccaggtatgcggagacattgaaactgcatgagggcgaggatatcgtatggctttcccccgatgatgtggagaaggtcgaggccatgcgagacatggttggagatttcttcacgaagctggatggtcagccggaggtggcgatgatcgccgccgaccctgataccggattgttgattaagggcaaggcggactggttgccgtccactcccgacccggatggtgtgctgcgtatccgtgattacaagaccacggtgaagtcgccggacgagttcgagcgttcctgctggcagtacgggtatcacattcaggccgcgttctacatgcgtctctaccggttgacgatgcccgaatataaggggccgttgggtttcgagttcgtcgtgcaggagaagaacccgccgttcgactggatgcgttacgagattcaggaggattcgcccatcatcaccgaactggcggaaccgaagataaaccacgccttgcagggcatcagatggttccgtgacaacacggaggacccgttggaggctatgaggacctacgggttgcctaaatacccgcaggatgtcgtgttccccgactggaagctgttggaggaagaggaggagattgaatcatggcggtaattaagaaggacgctcagggcgggcgtggcacgtatgcgaccctggctcaggtcgtgaactatgtggacgagcaggggttcgacctgcaatggccgacccagttgattgacggacgcctgtatgtggatacggccgtcagaaagaagggcacggacaagtggattgccagtaattgtcttatcccggtcgaggtgggtgattcgcgtggcatgagcgtcatgcaggccctcggttccgcattgacgtatgcgcgacgctacagcacttgcggcgcgttcggactggcgaccacggatgatgacggtgagacgagcggctacaagaagcgttccgtcaagggtatgaccgacgagcagaaaacacagatcgaccggattcttgaagactgcaagattccggtgggtcaggagaacggtttcatcggcaacgtcctgcaaacgcgggtcacctatggcacgttgaccgaatatcaggcgcaacggttcatcgacgcttatcgacagcacaacgacaaggttaaggaggctcccagtgagcagtgagattggtttgaacgacgtgaaaccgggcatgtgggttgagttcgatgatgattacgggcattatgcgggcgaactgcatgaggtgaagaagccagaaaatctggtggacgttttcgtcatgcttctgggtaataagccgccactgtacatcgagaccgaggatgcgggcaatctcgtggttttcttggattttggcgatgggtacagtaccggttccgcccggaacgtgcatgtgtatgagtcgaagcccgagacggaatccgtcaagcaggccgaagatgatggcgagcaaccgttctggaagggcaaaacctgcggggagatggcacacctgcacgtcaaggtcacatacaagaacgggaccgtagtgaccggagtgacgaacgagatcggtgatatcgataacgcttactgcctcagcgcaggttttttccccgatgaagagttcttcccgaacgaacgcatcatcgagtccatcgaactggtggatgatgtcccgtgcacggatgatgccccgcgtgagcgtatcaccgatatcacgaaggttcgtcccggagacaaggcggtgatgaagaacggtaacaagtacacggtgacgcaggtgcgttctgagtgtacggacggcataactctgtgcctgcgtgtcgaggggttctgtgttgtgtgcgattggtgggcggaggactacgccttccagtatgcgtatcacgaaccgtacacgatggccgaccttccgaaggagccgggattctacaaggctcgcaccgaatcggtgtggaagcatgacggcaaacgttggatgccggtgctcgcccatggtggcaccatcgcccccgccttcccatgccagtcccaatcccgcagccagttcttcaagaccagtgtccgggatggtcgcttcccgttcacgaaggtggaggcgagcttcgagtgactttcaccccgaggccgggctgcaagtgcgccagatgcctgtgggctcacagggacaagatcacgctcccccaatgccccacatgcggagccgttgattgcgccggagcccaatcacacatgctggtctgcaacaggctggtccaagagaaacacaagacgaacaattacaggaggaatgcgtaatggccggagaaccaagcatcgagtttaccggatatgcgggagagatcaaggattttcaggattctagtattctcaacgtcagcgtccatccgggttacacggataagaacacgaaccagtgggttgacaaggagcctcagttctatggcgtgcgtcctttgtcgaatcaggcgaaggatgctttgaatcagattcgccagttgaagtcccagccgaacatgagcgtgaaggttcttgtgaacggcagcttgtccaaaagggtgtcggagaaggatgggaaacggtatgagaattgggatgtcgcggcccgcaccattgcggtgttgagcgcgaaacccaaggcccaacagtctcagcagtccggtttccaacagtcgcaacagcagtatcagcaaggcttccagcaggcgcaacagggattccagcagccgcagcagcctgtggacccgtggagccaaccacaggacgaatacggaaatgggcagatctaacccgtcccaacacgtcaaggatttggtggacgcacgcgaccaataccggtgcgtccgctgcggcaaaccattccactggagcggtttcagccgacatcatcgcagactccggtcacacaagtggccgggactgcatgaggcgtcgaacctcatcttggcgtgtgggagtggcgatacgggatgccatgggtggattcactcccatccgcgtgaggccatgagcttggggtacatcgtgagcggtttcaacgatcatcccgaactggtgccgattctcaccgcccaacatggttgggtgcttctggacgataagggaggttggatgcgatgcgaaccgccgaagcagtaagcctgttgttcatcctgttctgccgtgacccgcaatttcggcaggcgttgcacaagctcgaccctgtgttgttccgcaggttcactgacggggagatttgagtatgacacaggcgaggaagggcccgcgactgccgttgaaccggttgggtgaggcgatacttgccggcccgtggctgtcaacccaattggggcgcagactacgtgacgcggaggcgcagacgttcggacgcatggtgtacgacgagtgggcgaaaacccatccaggcacactcccctacacggtgagaatcgattccagtcagaaaaccgcgtacctgccagaagacatgcccctgctgcacaaggcgctcacacggtacacgaacagcagattataccaacgcatacaagcggaaatcaaaggagaacaccaatgagtgagaaaccattctgggaaggtaagacccttatggagattcagaatctcgataagcgagtcaaggtgacaatggagaacggagacgtattcatagggaagctcgtgcggcgttccagagacacggacggtatatgtagcctttcgatgcaactcgacgcgcatcgaacatatttacacgtgttctcggctgaatcatctgatacgcagcccgtcattcccagttacgtcgataccgtcgaattgttggatgaccccgagtacgagcgtatcgacaacatcgaggacgtgcgcgaaggcgacgtgtacgtcggcacggacggcaaccggtacaccgtcttgcgacgcactacgtccaatctccagcccctgacggtagcagtcatcaacacgaccttctacccacaccgttcctacttcggctacgctttgcgtccaaccccgaagctccccgaccatgacggactctggctggacagggtcggtaacacgtggacgatgcgcgacggcaaagtgcatatcatacgcactagcgacggtgattggtgtttcacgcgcccatggttctatacggacagcgtgcaggtggtaaatgccggcccgttccgccctgctaaggcggtggaagcatgagcatcgaggtgggccaaaaataccgaaacaaccaggatggtgaattaatcatcatagccaaggtggcttgctttaccgcctcccgatctggcatgtatctaggtgtagacgtgctaccgggaacagaactgttcgtcgcggacgacccatacggcacaggctctgacgtgattgttaacgagcagtctctgaccgaatgcggatacaaggcggtggaagcatgaacatccacccgatcattgatgaacctccatcgtttccgcaaactgtcttacgcttgctcacaggcagcactcattgctgtgactggtgcgagaaacgctggatcaaggttcaccgcactggccaattggaatgccgaaaccgtcgatgtccctactgcgggcaatacggatgcccccgagccgaaaaacactggaagaaatgccccgtgtggaatcacatgaccccgcctgcatggctataccccgtgttgaatcggctctgcgaaagagatctgcaacgaatggcgaagaaatcgaggaatgatgcgtgacacgattctgtgcctatgcgacctgaccggtgtcatggcccgcccttgggtagaacacgggtatcaagccgtgttggtggacccgcagcatggttgcgaccatgaagacggtgcctacctgaaactggcttgcaccatcgaggaagcgttcgaccagatcagcgtactggtccgttccggccggctcgcgttcgtggccgggttcccgccatgtacggatatggcggtgagtggagcgcaatggttcgcccgtaagtacgaggccgaccacatgtttcaggcgaaggccgtgagcgttgccgaacaatgccgggtgatcggtgaaatgagcggcgtcccgtacatggttgagaacccggtgagcgtactcagccgtgtttttggcaaaccctcccacacgttcgacccgtgcgactacacggcctacgagcccttggacaattacacgaaaaaaacgtgcctttggacgggggggggattccaaatgccgcctcgcaaccaggacatgactcttcctcccgctgaccggaatcgtatctggtacatgagcggcaaggatagggccaacaacagaagcaagacaccgcttggtttcgctcgagcggtttacgagaccaattcgtagggagaactgaaaaacatcatcatagtcgcctttaacgcggcgaggagaaaggcaacggaagaatgaatcttttagatgaaaccaagagtgcgatctcacaaagcaagcattcgaccgatgacgttcgattcgtaggctcccgcgacgagaagctgggaattccgtggagtcaggccgaaaaggtgctcgacatcgattacgacgccggctacggcagtcaggagatagccgccgatctggtcgtggcgttcactgatggcgggttcctgcgccgcgaagaatacgacggcagcgaatggtgggagtacgagccaccgttcagaggcccggagacgcagaaaccgttcaggctcgtgaagctgacctattccgcggactcgcttgaagacatcaattacccgatggaggcaactgaggaatgagcgacatgaggagcttcatcaaggttgagcacagtcgttttactttgattttgcgcaaggggatgctcccgttccactggattgcggaatcccacgtctacccggacaaaggttatgtcacggcggtgcgggagcgcaccaactacggcgctgtatgggcattgagcagtaggggcgctctcgatcaggtcatgctctcgatctgggaggacatcgaatggttggacgaaaggatggactgatgcgtgtgcatcgtccgagactacaaaaccaaaccgaaggagacaaccaatgagtgattacaagcagcggatgatccgcgaacatcgagaattgcaggagcgtatcagcaagctggcgcacatgcttgagggctacgcggagggcacgttggacttcacgcccgcgtgctccttccagctccttgaaagccaattgtacgcgatggggacatacgcgaacatcttacaggagcgtgcgcgtatcgaacaggtggatttgaacgcgcctcttgagggaggtgagtctggtgaggttccacaggattagcccgtgtcccaagtgcgggggcaaggtcaaggcgaagtgggagcgggacggcgtgcaggggttgcctgaatacacgttctttatcgtgatgttccgctgcactgcctgcgggctcagcttcgagggaggctgttcacgtaagccagcaccgtatgagttgcaatacaacatcgccgcatggaaccgtatatgcaacggtgataaatgcttcgcgttgacctacaagagtctgggaggcagacgatgagagacaaggcgatgccgttgggcaagaagttcaaggtccggttgaccatcacgccggaggaaaccggaacgcccgtggacatgctgggattcacgttcaccagcggcaagaacgggcatacgacactgaacgcacagtacagcaacattcccaaactggttgacgacgggctcgactcactgtcgattctcgtgatcctcaaaacactggagatgtgggcccagaagggatatgagctgtgccagcccatcgttcaacgattttacggaggcagacgatgagctataaggcgaagatattcacccgcgaggagtttcgagaggtcgtcgcagccgccatctacgactacgaacaagcgcccgcgaaatgcctctacacgaccaaggatgcggcagaccaactctacggccattacggcgaggaaaccgaggtggaggaatgaacggagtacagcttaccaaccatctgaccgcgcaattcagggcctcagccctgagccggtacgaggccagaatcaccgaggacggcgacttcagagcctacatatacgccatgagcctcaaacgtctcaaacgcaaatgcgagaagtatgcgaagcgtgaacgcaaggccatcgcatatgtcgccacgctcaaggaggaatcatgagcgtaagtagtctcaaaacgcgaagaaggaattgaattgagcggctggcgtgacaaggccgcgtgccgtgacatggaccctgacctgttcttcccaaccacgtccagcgaggaacgattggcgctcaaggcctgcgcccaatgtccggcgatatgcgaatgcgcacggtacgcggcgcaacacgacagaatcagcggctacccattgcaaggcgtatggggtggcgtgaacaggagcagaagaaggaatcgaaatgagtgacaaggatatggtcacggtttacgaacgacgtgacggcagcaaacccggattatggtccgtgtaccggtatttggggtgggacgtgttttgctcgttctccctcgcggtgggcatcacgtcaaagaatacgatgatggccattgttcaagcgttttgtctgctggtttttcttggactcaccgtctggcagttgaaccatctgacttggagcatcaccgactatcgggtgcgtatcagctctaatttggagaagggggctcatgttgagcaaagcgaaaagtaaagcatggcaactgctcattgaagactcgaaccgtccggcagaggagattcgcttggctaccggacttcgggtcgatgtgatcgagcagatgcgcggggacgtgcaaaaacgactacgagacaacccggagttctgattatgagaccgagttatctgcccgtccagtatgagcattgcccgtactgcggaggaatcttgaacgtattcggggactgcgtggactgccagtttcacgatgacccgactgaatggtggatggacgaatgagccgacagaaagccaaaggcacactgcttgaatccaaggtggtcaactatttgcgcgcccggttgggtgacagcgagcagacgatacaccgtgaggtgttgcatgggacgaaagaccagggcgatatcaccggtctgcgtatccacggccagccggtcgtattggagtgtaaaaactacagcacctatacggggagactcaaggagtggatgcaggagggccgtaccgaggcgggtaacgctgacgcgccttactggttcgtcgtgttcaagcagaagggtctcggcttgaacacgttgtcaagcatggacaaccagcccgtgctcaccgacttaaagaccctcgcattgatagcaggacatggaatcatcgaaggagacgaagaatgagctacgacctgttcatagtggacaaggatgtgccggaaccggaatggtttgacgtatgcgaacgggacggcgagcatgtgcggaccgctcatggccattatttcaactacacgtataatctatccgcgtttttcaccgattacaaggtccatcctaagcatgacctggacgggttgacggccggggaggccgcagcccgtatcgacaaggcgttgaaagacatctacttggaaccattgtatgttttgcgcggcaaatacaatccgccgaactattggggcagcgtggacagcgccatcgcatggttgaaactgatatacgactattgccgggaacacccggactatatcgtgagggaacgctcctaaggggaaatgatggaagataggaaactcgttgatttcgcccgttggctgaacgatcatccgggcgaatggaatctttggccgtatctcattcccatacaggccgaccgcagggataccgtcgcatcgatgaggcttgtcatggaacgcatcaaaaaccatcagtacgacgagttccgcgtggacaccgtattgctcgaatacgaactattcaacggtttcatgggcttcgataagggcagcgtgcatgaaaacggtctcgcgttgaagatgaggctcaaagcatgaccgcgcggggggacgaccggaaactcatgcactggatagcctcacacggatacacggtggtcagggccacgaccggccactggaaagtctacgacaacggcgtgctgctcacggcgacgagcggcacgccatcggactggcgaagccgccacaacttcatcaagacgttaaggagacgatcatgtcagaccccgtgaacccggaacggctgctggaggaggcggaatgagcatcgtcggcttggcgcatttcatcgaactggccgtgttcttcatcatcgggatacaggcgttccgctacctattcaggaaatggaatatatccctatccgatgaaggcggcgacgcgatgacgatcgttgccttcagctttggattgatagcggctttcgcagcgtatggcgtctgctgggcgttcatgcaaatggtgttccccgattacacgtactggctgataggagcatgacaatggtacgcaaaggatacgttcaactggtcaacagcttctacatgaaccgtaaggtacgcaagctcaggcacacatgcccgagcgcaataggcgcgttcacgatgatgcttactttctgcggagacaatctttcagacggacatatcagcgaagacgatgcgttttacgtgttggatatcaccgattcagaaatcgatgcgctttgcgaagtcggcatgatcgagccgggcgggaacaacgggtactacattcacgactatctcgcacacaatcgaagccgcgaacaggtgcagaagaagcgcgaaagcaatgctgaaaattaccgaaaagataaaaacgaggcgaaaacctccgattcagataactttcagacggctgaatcgcgtctgaatcgggacaaacaccagaacaccagaacaccagaagaattatctaaagataattcaactccccctaccccctcgaagccggacttcggtaatctgcttgaccgtatcgaggctttctatccgacgaacaggtttgacgggaaaacctcccagtcccgtatgcagctggaggtcgattggccgaagatcgtgaaagccgctggagactccgacccgagcatgtttctcaaagccaaggctcgagcgtatgcggaggccaccgacgagcagtacgtgaaaacgttcagccggttcatcggcggtgaactgtacgcccgcaactgggagaaacccaagcccgaagcgccgaagccacgaccagggcaaccgttgaaatcccgaagccagcagaaccttgaggcgaatctggcgaaaacatggcagtacatgacacccgaggaacgtgcaagataccagcagcagggaggtttcaatgctcagcaggggtgaggcagcagccgtattgtcgcttatcaacgcgcatcacggcaacgcgcaatgggatgacgttcagcttgaagcgttccattcggaactgaggacggacatcaccgccgccgaggctcaggaggcggtgagacgcttctatgcggagaacgataccggccgttggtgtggttcgggtgacatcaacgccatcgtccgccgactgcgcggcaaggcgaagccctcggaggcggagatcgcgcgtgagtgcgatgcgcggggcttggagggtgacgcggcgtggctgtaccggcgtcagcgcatgttgggccgtcaacccgaggaggcggctcgaatcacggcctcgagtcgcaacccgttggagttggagccggcgaagccgaagcggcgtacaccggtacggcatttcctcggcgcgggcgacttggggttgggtgacatactgccgcgacacgccgaaccacatttggaaaactagagacgcccgtgcattattggtcttgctgacacgtccgaagctcttaatgagtgaaggtctaggtcagtttgtctttttcccctgaaaacacgaggctctgccgctatgacggttgctggcgggagatcgtgaccgacgcgccgtccatgctcatcgggcatgggatacccgagaaccggagcctgttgtgcgcatggcatgaacgccagctctccaacgacctgcaatggttggaacgcaacctgcccgacctgaccgagtatcgcatcaaccgcgcctacgggcacaagaacggtggcggcgggaacgcgggcacggctccagcgcccgtaagggaaaccctgcacgacctgctgtacgctgacgacgaccacggttatccgggcttgcaaggcacactctacgagtgggtgcgcagcctgaaactgaacctgcgtgaatcggcgccgctggccgacatggtttaccgaatcgccaatcacccgaaactcgacgagcacccgtccacgcccgtgtacgcggaaccggttcacgggctggtgcgcaaactgcgtcgtttcctcacggacgatgacggggaaaccgtgttgtacgggccatgccccgccaacgggtgcctgggccagctctccggctatgcggacgcggagacggcgaaatgcccgcaatgcggtttcagtatgccggtcgcccttatcagggcggaacgggtgaagcgtctcctccaatcggaggcggtgagaacccgtggcgaactattggacatcatcaaggcgtgcgggatgcgcgtgaaccgcagcactttgcgcagttggatacatcgcggccagttgccccagcagggcgaggactcgtacagcaatccgctttacaggttcagtgatttctaccggctcacaaccggattgtccgagaacgcggacgtgtgggagatcatgcaagccgcacaaaaccaatccaaggaaggagacaaccaatgagcagccagattcaaccattcgacttcaggggcattcaggtgcgtgtcctaaccgatgaacacggcaacccgtggttccttggagcggacgtatgcaccattctcagtacggccaccaaccatattcgggaatacctcgatgccgatgaaatcaccaatatccgtagtacggatattgctcagaacggtggcaaggcacccgttttcgtgtccgagtccggcctgtactccctcgtgttacgcagccgcaagcccgaggctcgcgagttcaaacgctgggtgacgcatgaggtgctgccatcgattcgcaggcatggtgcgtacatgaccgaatcgactttggaaaaggcagtcaccgaacccgacttccttatccgacttgccacacaaatcaaacaggagcgggcggaaaaggagaaggcccaagcacaggtcgaacggatgcgtcccaaggcattgttcgctgacgctgtggaaacctcgaagaccagcatccttgtgggcgacttggcgaaagtcctgaaaggcaatggcgtggatattggcggcactcgcttgttcgcgtggctgagggacaacggatggctgatgaaaaccggcagctctcgcaacatgcccacgcagaaatctatggaattgggcttgttcgagatcaaggaaaccaccgtggttcactcggacggtcacacgaccatcaacaagacgccgaaagtcacgggcaaaggtcagacgttcttcgtcaacaagttcctcggacacagggagattactcaatgagcatcaatcttggtaccacggaagtggtattgggcttgtattccaaggcgcttcaactagccacgttcaccgtggaagtcccggtggtgggcgaactggaaccgggcagcgtgtttataggtgacgacatgcgaccatgcgcgcacgtgaccgtgatgccgccgcccgacggttccgtcgaaaaggccgttggagccggtgttgaagcgtttcagaaggcgttcaacgagtcgatggaatcgaggggcatgtgaaccggctgaaacgactgttgcacttggaggagccggaaccggtcgaaaaaccggaacctgaaccaccggtagtggaaccatgccccatctgcggactcgtacccaaactgaagcatgtgtgcgtcacccgcaactaccgcgactactggctggaaaaagactcgtggcagctcttggaatggtgcgatcacgtcgaaagcatcctttcgttcgcctcgttttttgaagacgagagtgttcagaagtggaataccggttgcagacggttgaaggcagtggttgacgagccggttcccgaatgccccgcctgcggggagaaacccgtcgtgcaaacggactcggagtcggacatcccccagcttgtctgctcatgcaacgaactgttgagcaatgtggagataacaaacgtctataagcgcaaacgcgagtggatacgtcgctgcaatgcgttgaaacgcaagcaggacaacgtgaaagacatggaacagcttatcggagaaacacaatgaacggacattattcggttatcacgaatttcggctgtcattggacatgcccttactgcatcgtcagggaaaccggattgaacgtgccggtgaccgacatgcaggccacgctgcggaccatcagccgtgaaagcgaacgccaccccatgaggttcctgagcttcagcggcggcggagacccctgtttccccatgcgcgagccggaagcatcgaaacgtgtcgccttctaccgggaggcgatacacagggccggaggctggctcacggaaaccgagatgcacaccagctacttccaatgcggacgcaacgtggctcaggtcatgcagcagatcaggttcagccgcgtagtgtatcacatgcggcccacgagcttgtccgatgacgtggcgttggcattgccccgcaaatggttcgaccgtcagaaggtgcgtgtcgtgtacgtggtcacccccgatttcacgccggagcgtatcgaccggatagccgatctcgtggccggcaaccacgtagtcgatgaactgtcgttcaggcagaaggtcaaccccgacaacaccatcgaccacacgtgcgaggagtatctgaaggccggccatcaaaaccgctggtggtacatccaacaggatgattacaacacgtacgtcgtgaacgaccggctttacacacgattcagcgatatcggcaaggaggaccacaggtgagcaagaagattcgcgtcgcatgggatgacctgaagcccggtgatctgattcacgtcaaaggcagcacgaacacgtatgtgtttaagggctggtttttggacgcagccagcgttgaccatcgtaaatctggcgcagaaacctacgtgattacgaggtccaaaaacaattcaccagtagatgtagccattgttgtcactcacgacaatttcgcgtacgcgacccgtcccgcaccaaagaagccgcgtccaaacatcgtggagccgaaggcaccgggggaatactggctgcgtgttcatgcgggggaattgaacggctggtatatgtgcattcgccgccaattcgactcgattaaggactcgtgggataagcccagtgacctcagggcatggcaaacagtcatgtggggcattattgctttctccccgtggctgacgtggcatgaaatggtggacggcatgcatgtgtctgaagtgttgaccgctgaggaatattacatgcgcaaagccaagggggaactatgaagaccattcaggcagcagacctgtcacctcgcatgctgggaagaaaagtcatcatacaggtcggcaaaagcgtcatcaggggcatgatcgaacacattgaaatcgacatgcgaacggaatacacgttcaatgagtatcaaaagccagggagcagaatcataacccgtgaatatatgaccattcccaccggagagattcgcgtcaccgtcggcggtattgatctcaaactcaacgacaatcacgtaatcaccgtggcggactcatgagccaaccgatgactctacccagccagctcaggatcgtaaacaacaagctgacggaactgggcaagatcatgtactaccagcctgacctgttctgcagtagcgtcaggctccaacaaggcatgatcggttgctgcaaggcgtatctcggctacatgaaatggcacacgctgaccgtctcccagtatttgacggagtcgaactggggtatgagacgtgcccgcgcaagctgctgcctcaccaaacaagcatatcgtgccgcttatggcctgcccgacttggagcgcagggcggacaccctgtactggatgcggaggctccactagtggaaccagtgccaatcatcttgttcatgctcctattgggagccgtcgctattatcgagaatcggaggaaacattgaccgaggaaacaatgaacagcatgactaagggaaccatttttacggctggctcattaggcgatttgcctgatttcaaccagtggcctatatggttcacgccgaaactgattctgattatcaaccatgcgtgccgtaggttcatcacacgttacgcaaaaggcgtggacggtaaaatcgttcagcgtttctatcgcgcactgagggacgcatggcttcggggatacatgaccactatagaggcatgggcggagttttacgtattcgtagcgcatttccaccgccactacctgctgtgataggaatgccgtcctagtgtgcttccatgagaggcagtgacggcttctaacacgtccattatggactaaaccagcgaaaaagcaataaaaaattccttttcgcgggtttagacgaagcagaaccatgttttcgtataatcaggcccacttttcacggttattcgttattattctccaacgccttggtcacggtcacggttgcgttatcagtgacagacaatcgacccatgtcgtagtaatcaaccatttccctgctgctccacccgccagaagccatgatctggatatccggcacgccttcctcgcgggcgagggtggcgaaggtgcggcgtaatgaatgactggtgatacgttccgggcaacctgcctcatggcccaatctgaccacgacggacagaatctgaggctgcgttaccctgactcccccacggacgaacataggcccgctcttcctgttcctacatgcccgttcaagggcacgcgaggtccggtcactgatggcgagattctgcatccaatcatattttcgatgcactcgtaccgtttccacggactcgtgcttatgccaatcctcgatatccagattcagggtttcgcccacgcgcgtaccgttcaacagcatgaggcagcagcagccgggcacgaaatcatcaggatgtgattccgcgagcatgaggaaccgttgcgcctcgtcacgagtcagccacgaaccctgagaccagtgacgggtagggggacgtttcacatgcaatccggggttccggtcaagatacccctcctcgtagaggtacctgtaatacgagcagatcgttgaatacacggttttgagggtgcctttcgacagtccttggcttctcagccaggtaccgtacatttcgatatgcacccttttgacgtccaacggtttcaactcatatatggcgcaccattcgaaccatttctccataatgcgcctgtacttgccgcgactggcatcaggtgcagtcgccagatactcctcggccagagcttcggcatccgggcgagtcaacaggttacgcaccaaaggcagaataccagtcatgcttctaccttcgccagttgacggtcgatatcggctatacgctccatgagccgctggcgttccgtcctgagcgctatgagcggggagccgtcaatcagctcgtatttggacttgtccaataggtcaagcgcagtcgcgggcaagtcacgaatctccaatatcacgtcgtcgcattccccgacctgcgggtacttcacactgcctccagatggggcgaactctcctttaacaatgacgacgttgttggcgagccgtacctcgtgatcacggcccggacggtgggccacgcaacgtccggccacgcgaatctcttctccggcatagtagtcgtccgcattaacgcgaatcgataccgtgtcgccgctaccgtccgaccagccccatagttcggcggcgagctgttccactctttcgcggtctctcgcgtcgaatttccatgaacgtgtggccgcatcccatttgccgccgatggccttcgccttcttcggacaatcgggatgatatgggctgaccagtctgacgccatcacccgtggttacgatgttcacatcctgcatgatgattttcctccttatggaggcttgtgctacgctgcataagcctccaattaattgctttcagagataattgattgataaaggctggtgtcggacgtgagctagacgtccggcaccgttttcccaccgtttcagtcactggaatgacgatccgcctcatattccctgcacaggtcggtagcgaacttggcgagattatcgggggcaagcacatagttctccccgctctcccccgcctcgtcatagtatttccacacctcatgcaaggcggctctcatacgttcagcgtccattgattacctcctgattccagtccaacatgtcagcggccaaccattgcccgccgcctgaagcattggcgtacagccacgccccgtatgagattcgagccgccttatcgcgtttcagccacgcttgaatccacatgagacgcagcttccagcgtggtatacgccgccacaactcggtgttggtggcggggtcgaaacgctcgaaacggtagatcgcggtaatcattccgactcaccgcccgccttacgcagcacattgttcagcaccgcgtccttgaagcgtccgataacgcctccctgaagcacatacgcttcatcgttcacgcattcgtcgtaatcctccaacgcctgctgaatggcctcgtcaagcacggtgcccaattcaccgatcgagaacgcctgacgcaggtcaacgccatgcgcggagaacgaacgcaccacatcagggtcatagcccttgcccataagttcggttgccacactcatctgaaaactcctattgttcggtttaacgattgacggaacaatagacagctctaaagtcccgtctaaatgctgatttatgtgaaaaccgcaccatagaaagccctatgatgcggttctaaatgatggattctataagaatggcctcatagaacaagtccatgaggccatgaaaacgataatggctataacaattcgcttgtgaacagttccgaatgggaacctatacgcaccatgcgtatgacggcacgattgccgcgcttccaatacaggacaagcacgtcaacatcaccggccaaatggaattcccaatgcccgttatagttgccgcccgggttatccagcacatgaggccggtatccttcgggaagttcgccgttctcacgcaacagtagaatcgcgtcgttcagatcgtcgcacagttcagggtgcgtacggctcagccactcataatcggagtcgaaccgtgaatcgaactttatcgtatagctcaccgcgcacgctccctgagaacgcgcagatggtcaagcacctcttcttctgtccggcattccacggcatcgtcgggcatcagtcccagttccttggcctccgcttccaccatggccttgcgcgtctcctcggtcggcgccaaccgtatgccctcatatcggcgcggcctgaacggcaacccattgtccaccagagactggcgcaggaacatgttgacggcggtgctcaggctcatgcccatggaatcgtagagcgcggcggcacgcgccttgacatcatcatcgatattggcgaccagcttacccataacaacctccttaacggttaacagatggtatcaatcatataccatattggattaaaaaaaaaatggaatgccgcccagcggaagtgagggaaaacgccaggcggcaagaacttagaacagcggcaaagcaaaccgcttatcgggcaaatcggtggcgttcaacgccgccagaatcagatcggacgtatgcagtggaatgttggcacgcacggccgcgatattctcggcagtgtaggcgcaaccggacgattccagcacctcacgaatcttcgccgtggatatcctgacttccatcacagtactcccagcaaatcatcgataagcatggcgatagcggtttgataacgctgatacgtggtggaataggcgcagtcgtaaacctcacgcgctctcttatccagcacgtccaacgtgaaaccgctatcagcggtcaaacgttccatttcatcattgtcaggcggcgtactgggcatacagccgacaccctccagggtatcgatcgcacgcctacgtaagtcatccgtgaaaccatgctgaccgtcgaacacggcggatagctcatcttcgttgtcatcagccatttcccacgcggacttcaacaacagtcgcgtggccttgtctctcagcttgctcatgtcacgccgccttagcccacaggtcacgggcaacggccacgtaatcggccaccgcctgttctaactgcttgtcactgccacgctcataccttgcacggtaggcgactacgcatttgccgttggccgaagcgatgtacgccacctttttacccttgctggtacggaacgccttgatatggcccaaaccttgcagttccgggcattccttagccatcatcaggtcaggcagagtcgcgtaggacacggcaaacgtgttgaccttgggcgggacttcagcaatctcctgagtaatcggcgccggctcatcatccagaaactcatcctcaccagcccacttgctctcatcttcaggtacaggcaccggccagtgaacgccgctcaggaaccgttcaccatcattacgccaattcatatcaaccagcggatcagccttaatggcggccacacgtttcgcgtccataccggcaggcaccggcacccgaacgattccacatcgttccgagtcaggcaccagcaaccagccatgctcaaggtcaaccgaacttgacttcatgccgttcagaaaatcctcatactggactcccctggcctgaacgttccacgcggtaccctcggacgtttgggacaacgaccagactcgtttcaccctagcgttgacatacctcacgtcgtatttcgagccgtccttgcgtagtcgtacccacatgccgcttacggcattcacgttacgcgacgggtcattattgagcttcttcattttgtttacctcacttcaaaaaaaaaatcgattgtcagatttgcgcgccacggtgataggcgtaatcgccatacacgcaagtggcggtatcatcaacgccgtaaggcgtggaacattggggagtcggctggataaaaccaacccacctgagaaagagaatggccgcgactagcgcggccacaagcagaacatgacggactctcaacactcgccatcctcagtggcttcagtgtagaaaacgtcgtccatctggtcattatcgaaacgctcattgatgtaatcggacaacgcttcaacgtcgccgtcgttgtagagtcgggcgattcttccacaccctacgccgttgccttccagcatgtaagcgtcctgggcccagtagggttcgcctttgaaagccgcgttatattcggtttcggtgacatacccgtaatcgcccagacggtagatgccctcataaggctcgaaaccctcatagtcacagagcggcaacagtttcgcgtcaacacgctccgccatatccgtaatatccttagcggtaatcatttgtttagctcccttaaaacagcggtggcatggcttcaatgccacgccccgaaacgattgatttaacgacggactcgcaccatatagccgcgtccccagtggtcgatcacggcaatcactccgcgtaatacctagccgggttattctgcatgtcaacacgccgccatgccctgaccagttcgacggtgggcgcataccgttcgacagccgaccgactgccgtcgtaccggacggccatgtcattgtcgcaaccgataacagtgtccgccatgatatgacgcgcctctttcgacgtgatggcctcacgatgccagttaccatcaaaaacgtcgtcggcaacccaagcgtcacgctcagccatcgagtcgaacacgtagaggctacccggccatgacccatcatcccatgtcgtgccgataccataagcccagcggaaagcgtagaagtagcgtgccatcatgccacctcgccatcgaagtgacgttcggcggctaccgcgtacagcacgtcatgcatggtgtcggtactgtagccattgatattggtgataacttgcaaagtctgctcggacacaccgtaatcatctttcagcgcgtcccacatttcctcaatagacattgttgaatctcccttgaattgatgaaagcgcggagacagccgcgcgactgaatgaatctgattgaaacgcttagtagcgttcgtcgattagaatgccgtcccggtagatgtacaggccggtaccgcgtccgttgcccatacgggcagagtcccaatagcagagtcccgcctgaccagacccgtcttcattaacgcaaggcggtatgttggccgtgtcactgctaccgcaagcggctaacgacatcaaggcgattactgcggcaaacgccgcgacacacttattacgcatggtttcctcacttccgcgtgaggcgctacaatcgtagcgcctctttgaatctccaatttgaaaaggtcagccccgcaagtgttggcgcacttgcggggcatttaaattagtggctaagccacagtgcgtagtcagggtttgcacctgattaagccgctaaccggcctacgctcaaagattgattagggcacacacctaacaactaatcgttagtgttttcttttggcttatcagcctctaacagtttgcgaggattactcacgcgcaaagcgtcacaaattttcagcgcaacgccaagtgacatgccctcaatcggacgccgcccattctcgtaatcagcgatacgcccatagccaactccgtcgattttatcggctagttgacgttgggtatatcctcgcttctgccttagctcccttagactcataacccacctcacttatgatcggtgggcccaattatacaattccagacgctcggtttagccgtcgcaagaagatatcgagatatctccatgtctgccaccataagtggcaacgtccatagcggggacaattccatgccggatacccgctctcttatcctcactagcccggtaggctagacgccggtagacgcaactcatttatgcaaccttgtttgacgtactctcactacgcagattacaaccgactttcggcaacactttttagttatcaatgagcatgtccgcctgattacccgccgctcactatgagttttggatagaggggactaagtgcgcgactagggacttgcaccctagcgttagccactatggccgcgctgattacttgttgaggtcattccacacgttgtcaaacttgcggtatagctcggcggggtattcctcgttgtcgtccatctcgataccgagggacatggccgtgaggtcaagcacgttgtcataggtgcagggcttacataccgtggccaggtctaccgccgctctaaaggccttggctttaatctccgtggtgttcatctcgtggttcctttcttgttgttccgtggttgatagctatcactatacatgcaccccatacggagtgcaaatcggtatcgcaaaccaccaccaaaaccattgcaattactagcgtttaccggcgtgtcgaagcctgtgaaacatgacgaaaaaccgtgagtatataccttatatacccaataaaggcttaacgagaatattctcaataagaaatatcgaaaacaaaacctgagaccaccacactcaacaacgcaaacatgagccacgacacaccaagtttgacaaaccacaccacacagctatcattctccgcccacacaacagccatgacatagaggcacaccaccacgtgacggactcacacggacggatagacaggcaacggcacagacggccacgaccacgccacactcacacccaggcaacgcggatagccgcgtcacagacacggccatactcacaaccgcatacgaccgcgcgcataccacgcgccacactacgacacgccgacacatacaccccacccccaagggaagggtacccacgggcaagacgcggggccgctgcgactctagctctgacgctggatgcgatctggggctattatggaaaaaccgttcgcttctgtggtgagtgctgttctttcacattttcttcactgcaacgcttgctgcaacgcttgttgtgagtaaactatcgtgtagatgaattgtcggggattggggtgaggcccaggtttccgacaaattattattcaccccgtatgccattggcgtcggggttttgttttttgccgcgcctttagatcacatcaacagacagtgttggtgtcgtttcttgaaccggggcgcggtgtggacggttggcagagtccggttgattgcagtggcttgctaagccgccgaacgtcgttttggcgttccgcgagttcgaatctcgcaccgtccgcgaagtatcgagggtcgctcccttgatgctttatgaggttggctgaataaacccggactgcatgtatgccgggttaaggctgcgtcacggcttagcggcaccctttagcgggggaagtgtgacgaggaacgctacagcggtacacggttagtgcatcacatgctcggcgttggtggtaaaacgcaatccaccacctcgcaattcttagctcatctacatgtcgtagaaggagtctcctaggtcgtttctatgaagcggcctttgttttcccgatctggcctgctacgtaggggctgggggtggatgacctacgggtcgcgccacaatcggggtctggcggtaggcacgtggagtgcgcgtcggctgtaacccgactgcctttggcaatgggagttcgattctctctgccgccacaatcgcaatgtagtgccaaatatctggttgttaggactggggctgaatacctagggtgccctggtcgcagagaacgtcgggtagcgcccggagatcgtcgcattatattcgtgcggcgcgttgcgagatttggagaggccagccgattggcggcggcaactgttccgaaaacagtctgccctgacgggcgtgtgggttcgactcccactctctccgctgtctggtcaaggtatgtcagccagcctaaacaattgactaccccaaatgcccgtgaccgagtggttcaggcaccggtctccaaaaccggttacggaagttcgattcttcccgggtatgcgatgccttgagaagaggcagctcttggcggtgacagcttctcggtcattgccagtcgccggcggcggcttcacgccatgccgtacggcaataactgaatagcgctccctctagtgggaggcgtggcattctagctcattggaagagcggcgctctcgtaaagcgcaggttcgagttcgattctcgggattgcctctaggaaccggtggcccgtgggccaactcccttgtatttggattaaccccgttggaatgctcgctcgccacgctcccaccggttccgtccccttatatataaggagtcatcatggcttggtcatcttccaaccgtgatgcacggttcaatcccggatgggagcggacccgcaagcagatattggagcgggaccgctatcgatgccagtggattgtgactgattggcatacgggggcaaagcatatttgcggctattcggccaatgaggtcgatcataaggttcgcgcggagaacggtgagcccgatgatgattccccgtcgaatctgtgggccttgtgcccgtaccatcattcgcagaaaaccgcgcaggagtccgctgagcagcggcgcatgaatcgtgaacgccggaaggaagagcaatggtattcgcatccggcgtttcagtgagcggctatgtatgcatggtggccggctgcgggaatacggtgtatgcgcgcggcttgtgccgtcatcattatgaccgtgaccggtatgcggggagtccgattatcccgtttcgtacccgtttgtgtcctataggccattattttcaaccgtctcgtgttgaccagattttctgttccggcaggcatcgcagcaagtacaagcggctgtcggataaagaccctgtgaagtatccccccaatccggaaacccccttgttcgtcaagcaggtcgaggccgaggatatcgagccggatattcgggtggagtcgttcaccgacgcggatgtcatcgcggaatgcgatggcgtgtgtgctgtgtgcggcaagagggtcgatgttgattctttcgggcctgatggtccagcgtttaagtggaaggttcctttggagaagtcgcgtcaggcgactttggcgaaccgacttctagtccataaccgttgcctgtaggcggaatgccttggcttcggcgtgcccggaacgggcggaatggggttgaagcatggctggcaatggtcattccggtcgtagcaaggccggtaggaatatggttttgaagagtcctgataccgtgatgggtctggacttgcccgcgactcgtcctgatgggcgtgagtggcttgacttgacgaaacgctggtacaagtcgatgcagacggggcctatggctccgcgcatgggcatggaggccgactggttttcgctgatggatttggcgaagctgaaggatgattactggcgtatgtcgaagccttctgcggtgatggccgctgagattcgtcagcgtgaggactcgtttcttatcacgcccgccgcccgcatcaaggcgaagatcgaggccattgaggctgatgatatgagtaccggaaccggtcgcccggaaacccgtggcgaggcggtgaaggaggatgttgaccgtcgccgccgtcagttgagggtggtgaacggtggcgcatgacattattccccagctgacgcagtgggagtacgatcattccctcggtcatctggcggtgtggtggattgagacgttcacgcttatcggtcgtggcgacggcatcggattgcctatgcatttcgatttggacgagtaccagttcatggtcggcgcctatgcgttgaagaggaatggcaaacgcaagttcaatcgtctgttcctttcccgagccaagggtcgcgacaagtcgggcaaggccgctggtgttggcatgttcgagggtttcggtccttgtcgtttcgaccattgggcgcgtgagggcgagacctacacgttcatgggtgagacatacgagtatcgcgagggtgagcctgtgggcaagcctgtcacccaacccgaggtcgtgtgcttggccaattccgaacagcaggccggcaacgtgttcgagtccatctactacaactgcgattccggccccttgtccgattggaagggcatgggcatggatgtgggcacgacccgtatcatgcttcccgagggcggaatcatcatgcccatcacttctggcgcttccagtcaggatggaaagctgaccacctgtggtcttgccgacgagacgcatcttatggtgcagccgaagctgtggaacgtgtacaagaccgtggcccgtaacctcggcaagcgtgccggtaccgctggcacgttcatgatggagacctccacgatgtaccgtcccggtgagggcagtatcgctgaagcgtcgtacaagtatgcgtgggatgtggccgcaggacgaatcaagcatcgtgccggcatctacttcgaccatgtgtacgcgacgttggacgtggaggacttctcggacgagaagaagatgaccaaggctcttgagattgcctacggtcaatccttgaaaagccctgatgggaaggaccatatcattctcaaggacggtaccgacgtgccgattgagaacaagaccggtctgagcgccgatggccgttattcgctgaccgatggcgagcttggcccgtccaaggacgggtggttgacgttggatggtcagcttgaccagatctatcagccggacaccgatcccgcagattcgattcgctacttcctgaacaatctttccagcgtgcagaacgcttggctcagggagtccgacattcaatcccatgtcctgtacaaggacgagatggccggttatctgggttcccgcaagctcgaaaccgcttggcagaaattcgtcaccaagaaggagccgataacgctcggcttcgacggttccgtgtcgaaggactccacagccctcgttggttgcagggtgtccgatggtatgctgttccttatcaagctggagcaatgcccggacgggccggagaaggccacgtggagggttgaccgtgacgctttcgaccaagccgccagagacatgctcgacaagtacaacgtggtcggcttctttgccgacgcggccttcttcgagtcgatgataggcgcttgggagaaggactacgggaagaaactgaaggtcggcccccgcaagaacggcgatctcgtcaagttctatacgaacaactggaagaacgagatgtatcaggccacggagaacgcggccacaggtttccgctacccgtatgaggagccggaaggcagaaagccagcgttgaacagcatcgcgttgcttgccgacccgaggctcgtcaaccatttccggcatccgcgccgggtggacaaatcgtatggctacaagattctcaaggaatcaccggccagcccgaacaagatcgatgcctgcgtcgcgggcattctcgcataccgcgcacgcgcccgctatctggagatagccgaggagaagaggcgtcgcgcgccgtcgagaatctactgatggaagaggtgccctgtggcagagttgcagctaatcattgacggggcatccattgatgacgatgatgcttacgtgattacgtcgttggcacaggagtggggttcccgtctcttggatattgccgaattgaagttgttcaaggatggcaaggagatggtggacaggagcagcgttccgcagggtgttgacccgaacgcggctcctgtctacaagctgatgcgccagttgggtgtcgtgaatctcgcgcgtcgtatcagcgagagtgtgaccgaccggcagcagcctaatggtttccgtaaggttgaggattcctcgttgaaggataccgatgccgaccagatggccaagcagtgtggcctgtcgttcattctccgccgtcatctactgcctgacaagggcgattacgggtgttcgttcgctctcgttggagaagggcagggaaaccgttatatcaaggcgttgagtccttgggaagcgtggatgtccgacaatgacgatgcggcgatcatgtattcgcatgatgacaagcatggtgtcgagactcttaccttgttccgtatcgaacgtgacgatgacgggttctccaagcgtgtgtattcgcgtgtggcgtacagggaatccgaacgtactgtagtcaatccttccgatgatggggaccttgccgttttcatcaatcaaggcaaggcgtggagtcctggaacgaactggaagtgggatgatagtaagggtgacgaatacgattacgctctggactgtgactcattgcctatagtccggttgagcacggttgacggtcaaggcttgttcgagccgtatcttccgatgttgaagcgtatcgaccgtgaggtgttcgaccgcctgtgcatcacgatgatgcaggcgttccgccaacgtgccgtcaaaggtgatcttccgcagacttacacggaggaagaccccgatgtgatcaacggtcttgctgaggttggcgatcccatcgactattcgaagcgtttcgctatgggtccggcagcattgtggcagttgcctgatggtgtggagatttgggagtcgcagaccaccgataccggtagtttgcagaacatcattgtttccgacgtgaagcagcttgccgcagtgtccggcattccgttggatattctttcgcctgacgtgcagggttccgccagtggtgcggaactgaagcgtgagacgttgaagttcaaggttcagaccatgaacgatcttgacgccgagcctattgtccgtatgattcgtatggctttggcgttggacggctccaaggcttcgcagagcgagttcgagatggtgtggaagccgatggatacgaccagttcgctggaacaggctcaggcttgccaactgttgtatcagagcggcttgttggcgcgtaggacgattctcacgcacaagatgggctatacggctcaggatgttgccgaggatgatatgaaccgtcttgccgaccagttcaatgtttccggccagtcggataagggtaccgcgaagcttgttgccgcagtggaaccggctacgggttgggatgatgaaaccaagtccgctgtggatggtctgcctaatgttgatgtcgagcttgtcgatgaaggcgagtctgagtcctgatggccggtaaatcgcttgaaacgttggctgacacgcttgagaaggctcgcgcaacgctggtgaaccagtatgtgagccaagcgcacatgatatggaatgcgttgactccctcagactggtggaacgatggcatgacgtatgcagtcgcagcacgcatggccttgttggaaatggcgttgattcagcaggtgcgccgcctgggcgtctcctatgcgaatgagacgttgaggctcgtgggcgtcagtccgaagggtgacgttccaggtcttgtgttcccgcgcgacaatactgatccgtggcttgtggcgcaacgtccggctgacacatatcgaagtcttgctgtggaaactccccagattcgtccgaaggagtggcccagtaggactgatgaaacgttccaagaggtcgataagtggttggaacaggcgttcaaccgtttgcggaccactgttgacgaggatgtttcgagggcgcagacgagcgccacgcttgaccggtacaagggtagcaaggtgttggagtatcgcagggtgttgcatcccgaactgtccaagaccggttcctgtggcttgtgtgtggttgccgcagaccgttggtattccacgtcgaatctgatgccgttgcacgcgaactgccattgtggcgtcgctcctgccggcagtgattacgatccgggattccaattgaatcagaaggatttgaaacgcttgtacgacgaggctggcggcactagttcatcggcgttgaagcaggtgagggtcaagacgataactcatggagagcttggccccgtgcttctcgctgaggatgctgaggatacacctgatccggttccgtcgaaggattcggacgcttggcatacgcctgaccgtcagtccacgttggctcaatgccgtcgcatggagaatcgggcaatcgagttcaaccggcgctacaaggaagtgcagaaggccggcaagccggtgactttccgctatgagggtaggacgttcacgttcaaaccttccaagaatttgaaacaggctatggcatggcagaagaccatgctcaaccagatgcggtcgatgcttggcgaggccgcgtaacactattgaaaggattcaagcctaatggctgatgaaaataccaataccgctgcaacggcggcatctacgaatgcgcctgaaacgggcgtgaacacgcagccgaaggacactgctacttctaccgcagccgccaatacggcgtctcaaaagaatggtgcggatgacctttccgagaagttgggcatgtggaagcatcaggcccgtgagaacgagcagaagatgtatgagaaccgtgatcgtgccaatgccgccgaagcgaagcttgccgatacggaaggccgtctcgctgacgctgaggttcgtatcgccaggctgaccgcgcagaagcagcatcctgagattacggacgaggctttcgatgccttgtgcaaggaaaccgaccctgacgagattatcaaatgggccgattcgttcgtgcagttcatgccgagcaagcctgaaacgggtgagcatgatgccgctgacgattcctcgcgcaacacgggcaaacaggccatgaaaaccgctttgtccaattccgcgccgcatgttcacgcgccctctcagggggatgcgaagagcggttacgaatacgggcttaagcattcgttgattgattccaagaaggagtaaacctatggcaaacgctatggttcgcacggtgaaccttaccgcgccccaggataagcagaagtggctgcttaaccgtattacagacggcgtgaagaaggtcactctcgacttgtccacgttcgtgggcggcgctaacgagtcgaagtacttcgcgtccatcgatgacgagaacactgtcgcatacctgtattccggcattccgctggctcgtatcaacaacagcaacaatttcggcccgtatgaccaggccgcccatgatggccgtcagaacaaggtggccggtttccttgagtctcaggtcaaggtcgagttcacccgcaagggtctgaaggaacggtacgtcgattccggtctgcgctacatggccgtgatcgacaagggggagctgcccgtggccatcaccagcgcgaaggtagatggtctgatcctgtcctatgacgcaggctccggttccgatgtcgaactgttgtccaccgtgaccgcttccggttcctacactctccccgcagcatccaccaatgctcttggcggcgtgaagaaggtctccgctccaagcgaagacactgtcgccgctttgaaggcgtctcttaagagcgccggcatcttcgcttgacgcgcatcacacaacaaacattttaaaaacccgcccatcgtggcgggttcccttatataggaaggctttttaatggctctggtaaacaaggatttcattacccctgccgaagcgtccggcatcgtgcttggcgcttatcagggtgccacttccgctttgccgttcggtcagattctgaccgatatgaacaatccgactggtgtcaacgtcagctgggttccgaaccagccgcgtttcgaggtggacactattgagttctccgcatatgacgccgaggcaccgtatgacgagactcacgccggtggtaggaagaagtatacggagatgctgccgttgcgtaagcgtcaccgtgtgtccgaagaggatatcgtaaagggtgtcgcttctccgagcttcaccatcgacccggaagtgaatggcgtggttgccactccaaccgccgccgataatctgcgtgaggcgttcgtgcgtcttggcaaggaattggcgttcactttggagaggtaccgtgtcgaagctactgttaacgcgaagatcagcccgaaggatggttccgctttcgataatgagtgggattacgcgcgtgactcttctctgaccatcaataaggattctggtcagacttgggctgatggcggcgatccggttcaggacttgcgtgattgggccgacaagattgatgccgccgaaggtgacgctccgagcatcatgctcaccaccaagaaggtgtggcgtgcgttggctaagaacgccgcgatgattaagtactattatccgaccaccgctaagacttcactgccgaacctgttgaaggatgacgaactcaagtacgtgctcgtgcagatgaccgacattcgagacgtaatcatcgttgacgacatgtacaaggagtacgcgcgtcagatgaagattgaactgccgggcaaggtcaagtcgttctttcctgagaacaccgtgctgttgatcccggcgttgggcgacacttccatgggctacaccgctttcggtccgaccgctcaggccaaggagaaggccgtgtatggcatcactcgtaaatatgatgccggtccagtcggtgtcgtgctggattccaccggccccaatccgggctatgaggcgtttgtgaacgcttccgccctgcctgtgctggtcaagtccaacagcactttgaaggcaactgtcctgtccgcctgattgacgggaggcatccgtgtctactgcgatcattgacgatattgattgggtgaagtacatggcggagttcgccactgcggatgccgccttggtcaccggcgatgatgcgccatatgacgatgtgtgggtccagacccgatgccgtagggccgcgttgacttgcttgggggtgagtcctctcgttcgcgtgcggcttcgtaatggccgtctgagcgaggaggatttcgcacaagttgtctgcgaaatggtgttgcggttggcgaaggctgaacagtacaagtctgaaacgaatggctcgtacacgtatacgcggaatgctccgcaagctgacccgcccggctattctccttcaccccgtattttcgtctcgaaggatgatcgtaccgtcctgttgggttccgagaatcctgttggcggtgcgagccacatcagtttgggtctagaccccggttatgggggttgagcatggctgtttatgctgaaaaacctaagaatggtcatgtttacgacaaggatacggctcctaagcatgtgcccaaggatctgcttcatcgtgacgtgatcgtctatgagggcatgaccccgtgggtgacgtgtcatgggagtacgactgttccgaagtatttggatgcggatggtagggttcttgacccggccacggtttccaatgtggttcgcgcgggtggtttcgtgccgtccatcaccagtggcggcgtcctgtacacggctgatgtccacaaggtttactgttgcgttgtcggacgtacccagaagaacagcgtcatgagtgagaattgggcgcaggatacgactccgcagaagtttggcggtaatcgtgagatgaatcaggtgaaggttctcgcaccggaatggcatggcgacttctattcatggttctggttcgacggctcctgctatgaggttgacggttcgccggtttttcttcctcattcgtccgatatggctaggcattacgagtttccggctcgccgcgtgtatgcggctgacttggctcataaccgtatcgttccgcccgttccgccgaagggagctgaaacatggggtatgtgaagcttcgtcctgatttgaatgcgagggtcgcggaaacgttcggcggtaaggccactcgcccccacgctttgaaggttcaggctcgtgcgaaggcgttggccgacatgcgggcgaagcattcgagtgtcgccgaccgtattgatattgatgttcacgctcacggctcgcatacgagcgtggtcatgagcgtgaacggccgtgacggctcgcagatcgcgtcctacttggagtacgggtatttcaatgtgcgtgcgcaacgtcacctaccgggcatgtacgtgatgagcgaggccaagtatggctgatttgagcgtgcgtgccccgttggatgccgaaggattgatcgatgcgctgttcaagcgtgtcgatttccgtaaggctggtttcgataatgtcgtggtgttgccgcgtgccatcgcggatacggattcgtatgcgttggaccatgatgtggtgatctggcattgcggcgctccgttccaaccggattggaatgtgaaggcgtgggtttggcggttcgcgttgtcgctgaccgtggtgaaccgtgatcctgacattagttccagcctgtgtgcgttcctgcacgagacgatttcacgttggccttatggcgagcctaccgagtttggccgtgtgggcgcgattcccgacaatccggcgttcgagcaggtcgccattggtgacgtggtgactacgaagaccgctgtcgtgcgttcctgcacgaagctggtgcaggcgggttccgtccgctgattttcccaataattcaaagattctgattttaaagccctgtccgcttgcggatggggctttcttgttaaggagggccattcatatggctatcaatgataaatccgtgtttaccagtgttcgcggtgccgcttttcttgccgaggccaatactgctttgccgagtctgaaactgttcagtcttgaggcggcgaccgttggcgagaccaccaagaagtatacgaacatgggtcatttgagcgcgtccgacctgccgtctttcgagacgagcggcggcgacgcgacaaccaaggatacttggaacaagagcaagttccgcaccacttacgattccgtcaccggcaaggtcacgatttccagcgttcagggcgacaaggaaatgttcaaactgatgttcgacgctgccgaaatcaccggtggcggcaccgcagtcgccttggataaggtcgagcagccgaaggcgctgttcatctacgtcgaggacacgaacaccggcgagatgttcggcatttggattccgaacatgagcctcgcctatagtgagcttccgtccttggctcaggatgatttcaacacgttcaagctggaaggcaacatcatgacttccaccgttcttccgaagaccaagagcggcaaggcttccagcatcgctttctacgatcctgacgatttcgccaaggtcgcgtgagtctgagggtttccggttcttcccctgacgggtgttcttctcctgtctgtcgcccatcaggggattttcttttttaccgcagacgggtgttggctttttcacagattggagttttgtatggctgaaaacgatgttgaagagaatgtttttccgactgattgggatggtctggccggttacgatgatgtgatggccggattgccggaaatggtgcaggcggaatctttctcgccgtctcagaccgcattgttcgccgtggtcgaacgtcgtttgaacgagcgtctgcttgtcatgcgtgacggtggcgtgtttggcggcaaggcgaagaaaaccgtgtcggatgatgctgtcgccgttgccatggccgaatacgtggagatcgctgaccctttctacaaggggcttgccgtcaatgctgacgcttacgcggagtggacgaagggtcgtggcctgtttgacctgttgaacatgttcgcgtctctcacacgcttctacgtggagcgtctgggaaaatcaagcgcctcgaaaaagcagtctcggactgccgagtaggggttgtctccgatttccgtcgtttctaccggctgaatcttccggctgacgttcatgcgtatgatccgaattttctttgcgacttgttggatggtttggaggccattcccgattcgcagtggcgtgcgtggctgttggagcatgatggtgccggtggcggttccgaccgtgctgaacggttgcagttggggtggcttggtttcggccagtccgaaatgctgttgctgcaattgcagaacacgttggattcgttgcgttcgctggctgtttcccattggagtgggaagaaggttggctttgagccgattctcccgcccggcgttgatgccgtgtctcgtgatgtcaatcgtgtggatggttcgcatgtgacgagtctggctgactatatggctcgggttcgtagttgcttcggcggctgattctgccggttttttgttttcgcccatgtttccgaggggtctttttcctctttcttccccttggattcgtgggtctttcttttaggagtgtgcgcgtatggagcgtcccgctttttccgctggcgaggtcggcattgatgtcgttcctcttaccgaccggtttttcgccgaactcagggcgaagctgcatgatcttcgtgatctgaaggttccggttgagttcgacccggatgacatggccgcttcgcgcacgtatgagaagtggaatgggcgggacgctcgcgtcaatgtctcgtatgacgttgacatgtccggcttgcgtgaactgtcgaagcaggatgaactgctgcgcaaacggtatgagaagccagtcaaaccggttttcgacggcagtggtgtcgtcaagggtctggacacggcgatcggccgtgtcgaacagttgcgtaaggtccagaagaacgtcggcgacgtgttcaccaagaatcttggcgtgttcgggaaaacggaaacgagccgtttgaaggagcagatgcttcttcttgaccggtccgaagagaggatgcgcaggattcgcgccgaccgtgacgagcttgtttcgatgcgtggcgacgagtggaaccagctgaacaggcagattcttggcaacatgagcacgttggatgctttgcggaagcgttacgacgagttgggttccgagatttccaaggttaccgcgtaccgtgattcgcttcgtggcggtggacgccgcgatgaggcgaaggcgcagaccgtcaagcttcgtgagcttcgagccgaataccgtgccaccgcacgcaacatgcgcgaggtcacgaacgagacgaacaggcttgccagacagcaggacaggctgaagtccgatagtgtggcgaagtggattcacgatttggacaaacagcttgtcgaattggattcgcatacgaagtccgtgcgtaagacgttcgacagcgtggcccgtagcggtttcgtcaaatcctccgacatgggcaagacgaacgttctttccggcgtgagcttcttcggcaaggacttgaaccgtcagctcaatgcggaacgtgccgcgcgcatggagcaggagcggctgaacgattcgtggcgtgacggctccgaatggcaggggaacctgttagagggcacggcacggtatgcgcggaatctgaagacagcctccaacgtgatgaacacgtacggcaaggacgtgaaagaggcgaaccgtctgcttgacgagcaggagcaacggttgaccggcttgcagaaggccttgcgcggcgtgaacaagtacggcaggtattcggaagtcaacaagcagttgaacgaccagctcgccgccgtcaacaggctccgcaagcagatcgaatccaatccgatcaagacgagactcgtattggatgatagtcggttcaaccacaagtatgcgaacatcacacatcaggtaggcgagttgacgaagaagctcgaacgtgagaacgagcttaggattcgtgttgatttctggaccgacacggctgattcgcttgaaaagcgtctgcgtaggcttcagcaggggcgtatccgtattcctgcggatatcgtcgttgacaataagaatctgattgagcgtgcccgacaggtcgccgaagaggtgaaacgcaacccagatcgcaaggtcgagcttgaggccgatcttgatttggatatgaagcgtgccgagaagcgtatcaaggatttccagaaggccaatgacacgttcaacatggacgtggacttggagaccgccgcagcacgcgcccatctcgcttacttcacgagaccgcgtacggttgatattttcgcggagttcaagggcaccgatctcggtaagatcatgagtggcatgaccgctggcgctacgggtgtccgtggcgtgcagaacgagtggcagaagctcgtcaacgtgttcgacaaattcgatgagatcgtgccgaagtggagtctgctgggcgcggtgttcgcgtctgtcggtgccggcgcgttgaacttgtcccgtaccgctggcagtgccggcacttctctggtgatgatgagcaaggcggctctgaccgctccgggcgcactgttgggtgtgaccgctgctttcggcgctggatattccgccgtgaagaattacgcggattatatcgacgtgtccactacgaagttgggcggcttgcagaagaaactgtcggattcgttctggacggaagccaagcagccggtcatcgacatgatggacgctttgggcggcaacgggttcgttgacggtatggagaaggtttcctccgccgaaggcaagatagccgcgaacgccgcgaagatagtcgcccaaggcgaatacgtgtcccgtatcaattcgattctcggcaatacggtcaagggcgtgaacgcgcttgaccctggcgtccaggctgtcaccgcttccgttgtgaggcttggcgacagcaccagctcgtatctgccgcgcatggccaactatgtgagccgcaacgccacgctgatggcgcagtgggtcgatgaggcggaacgtaccggcaaggtcactcaggccatggagaaggccatcgagcaggatggctatctcatgtcgagcgtcaagtcggctggcggtatcctcaagggcacgttcggcacgttggccgagggcgagaatggcatcgagaagttctccgacgctctgagccgtgctgacagggccgtgaacggcgtgaagttccaagccacgttggccgcgtgggccgacggggcgaagaccgcttcgggcaagttccatgattcgttccgtgagattggcgacgcggcttatgagctgcgggacacgacgaagcaggcgttcattgacgcaggctccatggtgtccaccggcattggctccatcagcagtcttgccggcaagtcgaagcatggcatcgcggatttcagcaacggcgtgtccgagggattccagaaggtgttccgtgccgttgattccgcagctccgatgttcgacagtctgctgtcgatgggcggcgaattgtccgacacgttcggtggaacgttggggaacacgttgaagtcgtcggctccgacgatcaaggtgttggccgatggcgcttccgccatggctcaggcgttcggcaagctgcctgcgcccgttcaggcgatggtcggcatgtatgcgacgttcggaaaggctggcatcagcgcttacaattcgttgaagcgtggcatgttgcagaacatcgagtccacgttgcagtatcggaagactttgagccagttgggtatcacctcgcaggagactgcgatcagtatgagcgagctggttcgggctatggctcgtttgaagtccggtcagacggctggcgtgctgaccggtgaggtttccgaaattcgccggatgggtgtcgctgccgacgagaccactgcgaagctgaatcgcatgaatcgtgcgcaggctggcggttcctccgtcgcaggcgttgccgctggcgctggttctgctggtttggttcgtggtgtcggcgaggcggctgagggtgccgtccgtaagactggtttgctgaagaccgctttgagcggcgtggtcgatttccttggcgggcctgtcggcatcgccatcggcggcgcgaccacggcattgagtctggcgggcagtgcgatcagctcgtacaatgatgccgtcgcgcacacgcagacggtgaaccggactgtcgcagactcgttcaagaacgttcaaagcggtgcggagaacgcttccacggctgtttccaaagccatgaagaccgtttcggagaattggaccgacaaggattacggttggaagctccctgatggcaacgccatcgagaagggtcttagcggtattcagaagtcgataagcccgttcaagaacgcctccgatgcggccgatgctcttggcatcagcgtcaaaaaattgaattccgccgcgaccggaacgaacgacgcctatgacaagatgcataagaagcttgaggacatcaagaacgaccagcagtgggtcatgggcgcgaatggtcagatggtgaacgtcaacgagcagcagaccgaggccgccgaacgtctgcttggcgtgcttgaagactcccacgccgaatgggtgaagggcatgaaggtggcgtccgattggatcggcagcgccgatagcgtcaccaacgtttcggcgttggccgccgacaagctcaacctgctgtccgaatccctcgcagccaacaattacgagttggacggcaacagcaaaaacgcccaggccaaccgcaagatgatggccgattacgcgaacagcgctttactggccgcgaagaacatcatctacgcgggcaatggcagcgccgaagcgaaccagaaagccaagaacgccgtctattccgcacgtcaggaaatcattcagatggccgaacagtgcggcatgtcagccgaggccgctgctgggcttgccgaccagatgggtcttattcccgataacgtgtccacgaagttcgatctgacgaatatggattcggtgaaggctcaggtccaggattatatcgataagcttgagttgaccaaaggtcagaaggaaatcattcttgatctcgtccagaagggtgatataacgagtttcgaccagttggtcggtgccgtgaaggcgctcatgggtggtgcgagcgagaaggatttggtcattcttcttgacgcccaggataacgcttcggataagatcaaggatgctacggctttggctaagggttttggtctgacgaaggctgagatcgatattctcgccaaggatgaggctggcccgaagttggatgccgtcaagcagaagcttcgtgacagtgggttgactgacgctcagatccagattctcatcgacgctttggacaaggcgagcggcaagatgcaggatattgagaagcggaaggttcctgccgcgaagggcgtcaggttcgatattgatgcgaacgatgatgacgccagtgtgaaattggcgaaatatcaggggcttaacggttccacgcttgcgaccgcgcacacgtttgtgattggcgatgattcgagcgcccggaacgctttcgacaatacgagagcgtatgacggcgtgacgttggctcagccttggggccgcgtgttgggcgacaacagtgtggcacgtgccgtgttcgccggcattcaggcgttcaacggtgtgaccatagcaagcccgtggggtcgtgtgctgggcgacaacagtggtgcgcgtacggcgttcatggaaacgaacgcatatgatggtacgacgatttcccgcccgtggggtcgtgtgctgggcgatgcttccgatgcccaaagtgtgttccgtagtatcagcgcgctggatggcaccgtccttgccactcgttacgtggatgtcatcactcgtaagagcggcgatggttccgcgcgcgcggctaccggtggccgtatcagcggcccgggtactggcacgtccgattcgattcccatgtggctgtcgaacggcgagcatgttattcgtgccgctgcggcgaacaagcttgaccgtaccgtcggcccgaatttcctgaacgtgttgaacgcgaccggcgatctggacagggcggtgtctcaggctcgcacgtcgtatgcgcgttccgcgcgtgacatgagccgtaacgcctacgcttccggtggcagggtccagagaatgttggattcggccacgtccgtcacggtcaacattccttcacgggatgatcgcgaactggtgtccgccgtgaacgatctgcgtcgtgaggttgcgggcttccgtgacggtatcggcggtgagatcagtcgcaatagcagtccttggcctagcaagcgtgatttcatccgtgatgtattggaggccaatcgtggcaggtgagcttgcgtatgtgagtggtttgaccggtgaacggttcgacgtgtcggattatgcgacggttgatttcgagggcgcgttggagttgcgtggccgtgaatgggattatacggtgcgtaacggtggattgactggtgtttcgaggaaacgtcgggagatttccgttgacgtgcattatggtgatgcggctgcgttcgactcgttcatgcggacggttgacgctgatctggctgttggcaagccgggacggttggaggctgtgaatggtgcgggggaggtttggacgcaatcgtgttatgcggtgaagtccgaggcttcctcgcatccgggttcgtccgacccggtgtgtgcgctttcgttcgtcttgttggatggtgtgtggcggcatgatgccgttaccgtgtcgtatcagcctgtgcccgggtctgctgtgtctggcttggatttgccgactgacatgggttatgatctggctgtttcgcgtccgtcatgcatggtgtctaatcgtatgcgtgttccgatgccgtttcgtctggccatatatggggctgtttcgaatccgtcgttgacgattggcgggaacgtgtaccggttgaatggtgatgttccggctggcgcttacgtggtggttgactcgttgaggaagtcgatcatgctgcatgatgcggatggttctctgcggaacgtgttttcgtggggtgtgcgaggttccggtttgaatcgtggacagtatgttttccaacctgttccggctggttcgagcgtggttgagttgggttccggtttcggttttgatctgacggttgtcgaggagaatggggacccgacttggttgatctgatttgcgctgacgagaatggcgtgccgttccatgcggtttcggattgcgtgtttgattgcgcgtgggggtctggtgagaatgatttcgagctgacgttgtatgacggtacggtgctgcctgaccgtggtcttgtctatgtggatgggaccgaggttggcggcatcgtcgatcatatgaaggatgaactgtcggacggtgtgagcgtcgtaacgtattccggtcggagttggcatggcatgttggccggtaaggtgttgcagccggattcggggcaggattatctgaaggtgtccggccctgtgaatcaggtgttgtcgaacctgttggcccgtattggcttggctgacgtgttcaaggttcgcgcggattccacgaaaacgattccaacgttccagttcgaccggtattgcactgcgtatgatggcatccgcaggatgttggccgcgaatgatctgaaactcatgtttcaggaggttgacggcactgtatggatgtatgccaagccgattgttgaccataatgatacggttgattccgatctggttgatttttccatcacgaaggattaccggcgtaccaaccatatgatcggcttgggcaagggtgatttgaggaatcgtctggtcgtccactattatgcggatggttccggcaaggtgtccaatacgcgcacgttcggtggtcgtgacgaaatcgccgcagtctatgattattcgtccgccgagaaggacgagttggacaagcagacgaagaagcagttgcaggatttgcagggcgctggcgctgtcgatgtgactgtgcatgacggcttgtcgcttgatgtgggcgatagggttgcgggctgcgatcatgtcactggtctgacggttactgccgtcgtgttgaagaagatcgtgaaactgtctggcggcttgttgtccgtatcgtatgaggttggcgacgcggcttcttcgaagacggaatattcgaattacacgagttcgtcttcctcttcgggttcgaccggtggtggcgtgtctttgacggctggccgtggcctgtcgatttcaggcggcacgatcaacgcggaggtcgcttccgaggatttggattccgtcaggcaggtcgccgacgcggcgaacaagacggcttccggtttcgcggcgcagatcggcaaggcgaatcagaccgccgagaatgcgaggaacgtcgccgatgcggccaagagcgtggccgacagtgccaagtcgggcatgatgaccgatggcgagcggtcgaagctcgcttcggtcgaacggggcgcgaacgcctacacgctgccaaaagcgtccacggacgtgttgggtggcgtgagggtggacggttccacgatcgtgagcgtggacggtgtcatcagcgctcatgtcggcggcggcgcttccgggagggtcgtgttcccaatcggatacgtggtccagaacacgaccggtgtcaacccttccgtggatttcggcggcacgtggaggcagttgccttcgcttggttgttttacgtttgaaaggataggctagtgaaatctgacggttactcgaagtacgtgtgtgacaagtgcggcaagaccgcttatgtcgccgctggtgacacggaggcgcgtgaatggttcaccgtgcgtcggtattcggctggcaaggcgacccgcatcgcggaggatgtgccgcccgacatctatgaattgtgttccaaatgcaatacgtctttcatgacgttcatacagaaggatgacgaatcgtttgaagcatggttgaaggaggttgaaaagtgaccatcgaacttgttgacggcaaggccggcacggctcatatttcaagtgaggacaaggcgattattcatcaggccaagttttctaagtctgatgtggtgttcgactggggtgacgtgttcaagtgcacgatgggcagtgcgaacaaggccaccatcggtacgggttgcgcgtcgatacaaggcttggactggcatatcacggcggcggaatcggtgacgatctccaacgggtcgcagggcatgaaacgcaatgacatcatttgcgcgcattacaatcgtgattcctcgaccggcgtggaaaaggtggagttggccgtgttgaaggggtcgccgaacgcgacgaccgccgccgacccgaccattccgtcagggaagatactgtccggcgcggttgacgcatacatgccgttgtggcgtatcccattggacggcatcacggtcggcacgccggtacgcctgttcacaccgaagggggctttgtgggattccgtaacccagcaatggaaaccgccgtatacgaacaacagcctcactctgtgtcgagtcggacgcatcgtcacgatcaacggcaacgtcaagttcaccgccagcggaacacagaactacacgacggcgagtgagaccatcccggatgcgttccgtccgcttgccgatcagagcatcatatcgttcccgtactgcggtttcagcctgcttgccatgcgtgatgggaaggtgcagatgctgggcgacccgagatccgcttactccacggcgcacggctgttggacggcactgcaatagctttccgtaacccagacgcttatcaccagccagtatggcacggtgactggcgttaagaccggcaatgtcgctcaaatcaacgtggcttggaagagcgcgaacactgcatcatgggatagcggtaattttggcataa

SEQ ID NO: 3121 - DNA, 79571 bp, Unknown
  R215_18m  MAG No. k141_25693
acatcaacggcatcgcgtcccctatccggttcccaggccgccacaaggccggcagaccccagcgtctgaccgtacaagagaagatttgcggcggccatggcccaggagagacgcccggtcccattccgaacccggaagctatggcctggcacggcgatggtactgcacccgacagggtgtgggagagtagcacgccgccgcaccacacgtacaggaagcccctcggagcacacgccccaaggggctttccctatatccgaccaacaagacataggctctcgcacctagggtgtggccgaatcgaaagcatatagaagagggaaccctcaaatgacggagagttccctctttgcgtatctggacctataaaggtctagaaattgaaattgtcaggatcagcaccgttgcgcttgccggtgttgatggcggagatggcggtcatatcatcgactgataggttgaagtcgaagacctcgaagttctgcttgatacgctcggcatgagtggatttcggcagcacgacgataccgcgctggatgtgccagcgaatcaccacttgggcaggtgacttgccgtacttggcactgatctcggccaatactgggttgctcagcaggttgccgccggtaccgccgagcggactccaagcctcggttgcgatgcccttggcacgcagctggccaatgagctcttgattggtgaattgtggggaagactcaatctggtctacggcaggtaccatatcgctgtgggtcagcagctcatcaatatgatgcttttggaagttactgacgccaatggccttggcacggccagaggcataaatctcctgcaagtcatcccaggcctgctgccagccgtctgccggccagtgaatcagatacagatccacataatccacgcccaagcggtcgaggctttcttggaatgcatccttgccgtggcgtgcgcgaatatcgtcattccacagcttggtggtcaagaagaaatcgctgcgcggcacaccagcacggcgaataccttcacctactgaggcttcgttgcggtaaatcattgcggtatcgatatggcggtagccattctccagagccgtctgcaccgcgttcactgtagtatcaccatccggtgtctggaatacgcccaagcccacctgcgggatgacagtgccgttgttcagcataattgtcgattgaattgccataatgcctcactattcgtagtgttcattcaatttcctattttagaaacaagacgatgcaatgagccgcgtttcgcgggcaaagaattgcgtaatgatggcgtgattctcgttcattaggtcattattgcattcattaggtcaatgggtccagggtcttcggcatcagaacccagtcattacgccattcctgaagagccgtcttacggcataccgacctaatgaacgtgaaatcgacctaatgaatgcaacgagtaagcggctacgataataaccagtagaatcacaacccagattgaaggggagagcacgtggcagaggaatatgtggctgcattcgatgcagggaccacggcgttgaagggtgccttggttgataggcaaggccgtatcgtagccagtgcgagtagtgagcttaaccttattatcaacggcgactatcgggaacagagccccgatcaatggtggcaagctttctgctcggcctccaggcacatgattgagcaggcgcggcaatccgagccagaattcaatgtgactcgcattcgtggcatcattttcagcggtcagatgcaggatgttattgctttgaacggcgagctcaatcccgtccgcaatgccattctgtattcggatggccgagccgaggaacaggccaagcaactcgccaagacatatcagggtggagtagaacgtttcctgaacaccgttggcaaccggctcgaaggctgcttgccgttgcccaagttgatgtggctgcgtgaacacgagccggaaacgtacgcgcgcattcgtcatgtattgatcagttccaaggactacttgatcgcccaattgaccggcgaatgcgtgggcgatgtggcggcttgttccacagccggtgccatgaatatccgtaatggccaatgggatgccgaattgtgcgaggccgcaggaatcgacatggccatgttgccacacctgcacaatccgcaagacaacattggcacagtgacggaatccgctgcacaacgcaccggtttctccgccggaactgcggtatacgcgggcattggcgatgcgggtgccaccacgctggccagcggtgtcagccgccctggtcaatacaacatcaatatcggcacctcaggttggatcgccaccgtttcgcccgaaccgttcaccggcaagcccggtgctgcgaatctggcatttggtgtggaagaagtcttcgtgaatgccgtgccattcctcaacgccggtgacgtgcataaatgggttaccggcgtattcgctgatggcgattacgcggaagcacatcagcttatcgaaacatccaaacccggctccaacggtgtgatgtgcctgccatatctggtgggggagcggttccccgtaatgaacccgaatattcgcggggcctatgtaggcctcgatccagacaccaccaaggcagacatgatgcgtgccgcgcttgagggcgtggccttctccattcgtcaaggtatggaaagttttgacgccaaacccagcgagatttccctgattggcggcggagccagagaaaatgcgtggtgccagattctggccgatgtgttggagcatcccatcgaagtgttcgccaatgccgatattctgccagcagtggcaatggcctcgttggtattcaatgtaccagacctgctgcaatcagtatgcgaatgcactgtataccagccgaatcctgacaccgcacgcacatatgccgacgcataccggcgattcctgagcctctacccgatactgcgaacgatggattaggaactgagcatcatgaggaaatcagcgaatttggtccgcaaacatatagcggtcaccggactggtgcaaggcgtgggattccgttattttacggtgactcaggcacgtcgacttggtgtacagggctgggtgcgcaattgccgcgatggctcggttgagctggaagcacaaggcagtagcgacgcagtgcaagccttggttgagcaattagccattggtccgcgatggtccgaagtgagtcacgtcgccgtacatgacatgccgattatcgatgagaccgctcgggcatttggcgtgcgtcaataacctgcatcacgaatccacatcacgcacgataatctcacgatacgggtgaacatgggcgttcctcgacgcttaggaccctcacattggtacgatggggctttatgagtgagaacatcatgcgaatcattgacctgcgtggtcagaaactgtcccgtgccgaactgctcgccgcgatgccgcgtgccgcaatgggtacttccgaagccaccgatctggtgcgtccgattctggacgatgtcaaggagcgcggcgccgctgccctgcgcgacttcgaggagaagttcgaccacgttcgtccgaagaacctgcgcgtgccggccgaagcgatccagaatgccctgaccacgctcgaccccgaagtgcgcgccgccatcgaggaatccgtgcgccgcgcccgcgccgtggcggccaaccaggtgccgaaggacttctacaccgatctggccgaaggcgctcgcgtcgccgaacgttggattccgatccagcgcgtcggcctgtatgtgcccggaggcaaggccgtctacccatcttccgtgattatgaacgccgtgccggcccaggccgccggcgtcgaatcgttggccatcgccaccccgcccgcccgcgacaatgaggaaggcctgccgaacaagaccatcctcgccacctgcgccatcctcggtgttgacgaggtatacgcggtcggcggcgcccaggccatcgccatgttcgcatacggcgccaagggcagcgagccgcaggacggcgacatcctgtgcgatccggttgacaagatcaccggcccgggcaacatcttcgtggccaccgccaagtcactggtctccgcattcgtgggcatcgacgcggtcgccggccccactgaaatcggcatcatcgccgatgaaaccgccaacccgagcctgttggccgccgacctcatcggccaggccgagcatgatgagctcgccggttccgtgctgttcaccgactcccccgagattgccgacaaggtgcaggagaacctcaagtaccgcgtgccgcgtaccgagcacgccgagcgcgtccacacgtcgctgtccggcacccagtctgccatcgtgctgaccgacggtcttgaccagtccatcgacgcggccaacgcctacgccgccgaacaccttgagattcagaccaaggatgccgatgctgtcgtcaagcgcatcaagaacgccggtgccatcttccgcggcccgtactccccggtgccgctgggcgactacatgtccggttccaaccacgtgctgcccaccggcggcaccgcccgcttcgccgcaggcctcggcgtgcacacgttcatgaagccggtcgaagtcatcgaatacgacgaggaaggcctcaaggctctcgccgcccgcatcaacgccttcgcggtgtccgaggacctgcccgcccacggcgagtgcgtgctctcccgcttcgtcaaggatccgtatgacaaggccaccctgcgcgagcaggagaagggagccggtctgcgatgagctcgattcccgcaaacctgccgttgcgcaacgacctgatcggtgaggagccgtacggcgctccccagctggacgtgccggtgtgcctgaacgtcaacgagaacccgtatgcgccggacccggccgtatgcgacaccatcgccaagcgtgtgcgtgaaatcgcccccaccctcaaccgatacccggaccgtgagcacatcgaattgcgtcaggcattctccgattacctggcccgcgaatccggtacccgtctggacgtggacgagttgtggggcgcgaacggctccaacgagatcatgctccagctgttccaggctttcggaggtccggggcgtaccgccttgggcgccgacccgacgtactccatgtacccggagtacgcccgcgacaccttcaccggttggaagctcgcccaccgcaacgccgacttcacgctgaacgtcgacaaggtgcttgaggccatcgccgaggtcaagccctcgatggtgctgctcaccagaccaaacaacccgactggcaccccgttgccgatggaggatatcgagtgtattctcgccgcctgcgaaaccgctgaagtggccggcgcgggcgagggcgtgcacccgattctcgtcatcgatgaagcgtacgtggaattccgcaagcccggcaccccgagcgccgtgagcctgattgaggaccacccgaacctggccgtaagccgcaccatgagcaaggcctttgccttcgccggcgcgcgagtcggctacctagccgcatccaagggcatcatcgactgcgtgcgcatcgtacgtatgccgtaccacctgtccgccgtgacccaggccgccgcactggccgccttcgaacacaccgatgaacagctgagccgtgtcgagcatctgcgcgaaacccgcgaggccaccgccgcatggctcaaggaacagacctacaaggaccagccgcttgaagtggccgaatccggctcgaacttcctgctgttcggcgggcacttcgacaagcgcgaagccatcttcgacgagctcctgaagcgcggcgtactcatccgcgtggtcggaccggacggttggctgcgcgtgtgcatgggtaccgacgaggagatggaaaccttccgtaacgcccttgttgaagcgcttcgtatagtggaagcagcataagggacgtttctttccgattgcggcgagacccgaagcgattcgagtcccgccgcaatccaatatgacgaatcacacaggagacatgatggcaagaaccgcgcacatcgtccgcgaaaccagcgaatcacacatcgacctcgaactgaacctcgacggcaccggcaaaaccgatatcgatacatccgtgccgttctacaaccatatgatgaccgcgctcggcaagcattcgctgatcgacctgaccatccacgcccacggcgacaccgacatcgacgtgcaccacaccgtggaagatacggccatcgtgttcggcgaagctctgaagcgggccctcggcgacaagaaaggcatccgccgcttcgccgacgccaccgtgccgctcgacgaggcgctggccaaggccgtggtcgacatttccggccgcccgtactgcgtgtgcagcggcgagcccgaaggctacgaattctgcatgatcggcggccacttcaccggctctctggtccgccacgtcatggaatccatcgccttccacgccggcatctgcctgcacatgcaggtgctcgccggccgtgatccgcatcacatcgccgaagccgaattcaaggcgctggcccgtgcgctgcgcttcgccgtggaaatcgacccgcgtgtagacggcgtgcccagcaccaagggagccctgtgatggccgacgacaagttcgatccggacgaatcgcacttctccgacgaggagcttgaggccgcgctcgccggattcgagaaagaattcgcggacgattcggcatccggcgatgccagtgataccagtgatgccgataaaacggcggacgctgcttcagcgaagtccgattccgacgcgaatgatgatacggctgataaggcttccgctgattccggccagcctatgaccgacgacgtcaccgggtcggtcgctgatgcggtgaatgaggccatggccgacgtggtcgacccctcgctcggcttcgacaacgaactcgctggactgttgggtaacaaggcgaaggtggcgctgatcgtcacccgtcttgcctccgccgaactgttggccgcgttctgccagctgtcggacatctccgccgcatgcgtcggtgccaatcagggggccgtcgcggtgctgaagaatctggacggcgacggcccggaagccgcagccaaggacctgaccaccgtggtatccggcatggccgtgattcttgcagtcaatcgtgccgacaagctcgaagtggccatgtacgtgcagggagaggccggacagagtttcgcgccgcccgtgctgttcacctccacaccgcgcttcgtcgaggacctgatgctcggcatcgtaaccctgaaccaactcaagacccaagggttcgaagtggtggattccgctggactcgaccatgaccaggcgatgcagattctcgccaaccataccaagcgtgggcgtggcggacgcggctcccgcatcgaatagacgccaaccaaccagtaggggataggagagaatatgaccacagcggttgttttcgattacggtttcggcaatgtacgttccatggtgcgtgcgctcgccaatcttggcgtcgacaccaccctcacctccgactaccggcagtcgttggaggccgacggtctggtcgtgccgggcgtgggcgcgttcgccgcatgcatggaaggactgaagaaggtcgacggcgaccgtgtgatctatgatcgcatccgcgccggccgcccggtgcttggcgtgtgcgtgggcgagcagatcatgttcgaacacggtctggagcacggggcccatgccgcgggcatcgggctgatcggcggaacggtgaacctgctggacgccgacgtggtgcctcacatgggatgggacacgatcgaggccgcccccgattcggtgctgctcaacggcgtggagaatgaacggttttacttcgtgcactcctacgccgcgatggaagtgaagccggcggatacgtcccgcttcgacattgatctgagcggtgcgcccgaacgcgtgagctggtgctcgtacggccggtcgcgtttcgtggccgcctacgaacacggcccgctgtccgccacgcaattccacccggaaaagtccggggacgctggctcccagctcctcaagaactggatcgccacgctgtaaaaagcatgaagctcccctctgacgagagagctcaaattatgtataagtaactgaagaaaggctcttcttatgtcgttgactctgctgcccgccgtcgatgtacgcgatggcaaggccgtgcgcctgtgccaaggcgaatccggttccgaaaccgattacggttcgccgtttgaggccgcccgtacctgggttgaggccggtgccgaatggattcacctggtcgaccttgatgccgctttcggtacgggcaacaatcgcgatcagctgcgtgagatcgttcatgagcttggcgaccgcgtgaacatcgaactgtccggcggcgtgcgcgatgacgcttcgttggacgcggcccttgaggccggtgccgcccgagtgaacatcggcaccgccgctttggagaacccggattggaccgcttcggtcatcaagaagtacggcgaccgtgtggctgttggtctggatgtgcgcggtcacacactggcggcgcgcggctggacgcgcgaaggcggcgacctgtttgagaccatgaagttccttgactccgtgggctgctcgcgttacgtggtcaccgacgtggccaaggacggcatgatgtccggcccgaacatccaactgctgcgtgaagtcgccgaacgcaccgacgccaaggtcacggcctccggtggtatctccaagctggacgatttgcgcgccatcaaggaactggccgagatcggcgtcgattccgccatcctcggcaagtcgttatacgcacgtgcgttcacgctccaggaagcgctcgcagtcgcgaagtaggcaaaggactcgccttagcgagactgttaagctacctttgctcagctatcgcttcactcaggcctcgcctacggacagcccactgggctgtccgcttaacggctcagcaaggaaggtcgccggatttgaggagctttttgaagacggtgtagtcttcatcattctgttcggcgtagctgacggcgaacgaggcaatggcctgatcgaattcgtcggtgccacccatgtaattggcgatcgcgatcgaatcgccggtgcgggcgtgggcatgcgccaacgaccatgcgcacatgcgcgacagatcgctcaatcccgaagcgttgagattgtcgatatcaatcgaacccttgccattccacaactggcgcacgtaatagtcgcgcggtcggccatcctcggccataaagctcgaccaacccaacagcacatcggccgtattctgaatcagcttctgcccctgaaccacgcgctcaccgtgcgtggcgtacggcgacgcgccgcagtaatgctcgagcacggaatacgtggcctccttcatctgaatcatcatcggatcgtcgatatcacgcgcgatccacaccgacgtccacgcgcgctggcccaccgagcccacgcccaccaccttgcgggccgcgtcctgatagcgcaaatgatcgaacacccaacggcgatcgtcgtacagggaatgccggtagctctcgaacagcgtgtctatacgtgcctgcaacgcatccaagtcggcgtaatcatccagctgatatcggcaccagctcgggcggattggcggatggggtgagatgatcttcgcttatagtcactaccatagtgccgtgccggcatgggcccgaaccatgcctgacatgcggaccggggcatgttgatgaaatctcgcgactcgcaggtgacaaacagtgagatgttaacgcccctcgtaacacggttatggaacgataggcgactatggataaacagcaggagtttgcgctgcgcacggtcgaagaacgcgacgtgcgctttattcgtctgtggttcacggacgtgttgggaacactgaagtccgtggcgattgctccggccgaactggaagccgcgtttgaggagggtctcggcttcgacggttccgccatcgagggcatgacccgcgtgtccgaagacgacatgatcgttcaacccgatcccgcgacgttccagatcctgccgtggcgcggtggcccgcaaggtaccgcccgcatgttctgcgacattctgaccccagacggcgagccttcgctcggcgatccgcgtcacgtgttgaagcgtacgctcgccaaggccaaggacaagggcttcacgttctacgtgcatccggaaatcgagttctacctgttcgaaagccaggacgactggtccaaggccccgaccccgatcgacgagggcggctacttcgaccatgtgccgcgcagcccaggcatggacttccgccgcgccaccgtgaacatgctcgagcaaatgggcatctcggtggaatactcgcaccatgaggcggggccaggccagaacgagatcgatctgcgatacgcggacgcgctcaccatggccgacaacatcatgacattccgtacggtggtcaaggagatttccttggagcgtggcattcacgccagcttcatgcccaagcccctggccgacgcgcctggttccggcatgcacacgcacctgagcctgttcgaaggcgattccaacgccttctacgaggccggtcaggagttcaacatgtccctgaccgcccgccagttcgccgccggcatcctgtaccatgcggccgaaatctgcgcggtcaccgaccagtacgtcaactcgtacaagcgcctgtggggcggcaatgaggcaccaagctacatctgctggggccacaacaaccgttccgcgctgctgcgcatcccgcagtacaagccgggcaagggcaactccgcgcgcatggagttccgtgcgctcgacccggtggccaacccataccttgcctactcggtgctgctggccgccggtctcgatggcatcgataagcagatgcagctgggcgaacccaccagtgatgacgtgtgggagctcaccgacggcgaacgtcaggctatgggcattcagccgctgccgcgctcgctggacgaggcgctgaagatcatggagaaatccgacttcgtggccgacgtgctcggcgaacacgccttcggctacttcctggacaacaagcaccaggaatgggaggagtacaaccagcaggtcacgccttacgagctgaagaagtatctgccgaagctgtaatcgcaagcgttgcacatgtgccgaaccccgtcgatgattggtcatcggcggggttttctatagcgtgtcgtggtggtgggtagcgggcagaggtgggaatagtgttgtcgctgagttgatacgaaaaacgattgacgtaaccgacgaatcagcttgtagtacgagcgagagcactcaagagagcacccatgacgaacacacctgcgaacaccgcgcgcaccgaccgcttcttcaatctgccggtcaccatcctgatcttcgccagcttcatgctgggcatgagcgaattcgtggtagtgggcatcctgccggacatcgcatccggacttaaggtctccgaagtgaccgtgggtaatctggtggccatcttcgcattcgtgtacgcgccctgcacgccgctcggatccgcattatccgcccgattcccgcgctttctcacctatctgacgttgatgggcgtgttcctcgtcggcaatatcctgtgcgccttcgcgccgaactatccggtgctgctcatcgcccgactgctcatcgcctcggtgtccggcacgctggtggccatctccatgaccttcgcgcccgacgtgaccaccgacaaataccgcaccaagttcattgcctgggtattctcgggtttctccatcgcctctgtgatcggcgtaccggccggcacttgggtggccaatactttcggctggcgtgtcacctttgccttggtttcggtgctcaccgccgtgctgatggcatcgatggcagtgtctctgccacgcaactcacatccggcgaagatcggtttcctgaggcaattccgtctgttcttcgaccgccgcatccagctcggcgtggcggatgtggtctttggcgcagccgcctcctacgtcttctacacgtatctctcgccgatcatgcgcgacgaaatcggtgtgcccgaacgctatatcagcgtcggcttggtggtctacggctgtgcctgcctgtggagcaacctgtacggaggcaagctggccgatcggggcaggggggtcgagccgctgacccacattcgaccgatctactgcgtgcaggccgtctgcctgtgcctgctggctttcgcctcgctggtgccggccggcggcgcactgctgctggtggcgcttggcatgctcatgtatctgcagaattccgcttcccaggtgctgtatatggatgtggcctaccaatcccatcccggttcggtgaatctggccgcctccctgaattccatgtcgttcaacatcggcatcgccatcggctccgcggtcggcggcctggtcaacgacctccttggcctgacctggctcggcccggtcggcgcgattttcgcgctgctggcagccggcaccacgacactgctgcgtccgtacgtcagcccggtcggggaatgacgggtggcgtgacgcgcgggaacgaagggtttttcccgcgtgtccccgcggcatgccttatccgccgattgccgtccattgataacctgctatccaaataaccgataaggccacagcatgtcatcctgctgcgaaaccttaatgttaggacaccggctgcagggggacccggctcacgggcgcccacctgcgcggattgatgattatcggcatgttcagcgtgaaaatggggatgacaatatgacggatgcgactgcgaaagccgcgccgaaggcggaaagacggcggcgcgttctccgttccggcgctcgctcatcgatagtggtcggcggcgccatcgtgctgttcttcgtgctgctggcgccgctggccgggccgttgtcggccatcaccggcaacgacccgtacgccgagcatcccgaggccttgggtgccgggtcggtgccggccggattcggcggcggcatcagtgcccggcactggttcggcgtcaccccgctgcgcggcgtcgacctgttctccatcgtggcgtacggctcacggatctcgctgggcatcggcgtcgtctcgtcggtcatctcgctggtcatcggcgtggcgctcgggctgctggccggctatttccccgggttggtcgatgcgctgatctcgcgcacgatggacgtcttcttcggcttcccgttcctgatcttcgcgatcgcgctgtcggcggtggtgccgcagggcttcccgaggccggtgctgctgacgctagtgctcggattcttcggatggcccggcatcgcgcgtcttgtccgggggcagacgctgacgctgagcaagcgcaatttcgccgtcgcgtccaaggtgatgggtgcctcgcctgcccatgtgctgtggcatcagatcctgccgaacctcatgccgctgctcatcgtcaacatcacactgtcgattcccgggcgcatcggcgccgaggcgggcctgtcgttcctcggcgtcggcatgaacccgccgacgccctcatggggccggtccatctccgacgccgtgcagtgggccctggtcgacccgatgtatctgatcttcccgggcgccgccctgttcctgctgaccttcggcttcaacctgcttggcgatggcctgagcgacgccatcgacccgcgcaagggggtgcgtgcatgagaatcctgcaatacatcggcaagcgcgtggcgagctcgatcgtcgtcatcctgctcatcacgctggcgctgttcctgatcttcttcctgctgccgaccaatccggcgcagctgtcgtgcggcaagccgtgcacgcccgagcagctgcagcgggtctccgccttcatgggcaccgataagccgtggtacgagcagatgggcaattacgtggcgggcatcttcgtcgggcgcaccttcggcagcggcggcggcgccgtggtctgctcggcaccatgcctcgggtattcgttccgtctcaacgaatcggtgagccagctgatcctcgaccgcttcccgatcaccgcgtcgatcgcggtcggcgcggccgtgctgtggctggtcatcggcgtggcgaccggcgtgtgggcggccctcaagcgcgatacgctgatcgaccgcacgctgctcgggctgtcgatcgtgggcgtttcggcaccgtcatacctgatcggcctgctgacggtgatcgccttttcgctggtgctgcagatattccccagcggcgggtacgtgaacttccacgacgaccctgtcggctggttcacgcatctgctgctgccgtggctggtgctggccgtgctcagcgccgccggctacaccagggtcacccgcacgcagatgatcggcgagctgagccaggactacatccgcaccgcccgctccaagggcgtgcccgaatcggtgatcatcttcaagcacgcgctgcgcaacgcgctgctgcccgtgatgaccatgttcggcctcgatctgggcgggctgctcggcggcgcggtgctcaccgagaaggtgttctcgatgcaggggctcggctcgctgctgctcgattccgtgtcgaacctcgacctgcaggtgctggtcggcgcgacgatgttcgccgccgtgctggtcatcgtcgccaacctgatcgtggacatctgctacagcctgctcgaccccagggtcgcgctcggcacgaagtagtgcggctgcggccgcaacacgcgatacttgccggtctgctccacggaccggcaccgatagagaggaaaaccatcatgaagaacaacgcatggcgcgtattcgcggcgggggcttgtgccgcggtactggcgctgtccggctgcggcgcgtccaacgacaacgccgccaccggctcggcgagcggcaccaccgtcaagggcggcacgctgaacgtgctgctgtccagcacggagatggatctggacccggccaagagccagggtctgccgaccaccacgaacggcaacatcttccgccgcctgaccgcgtggaagatcaccgacaagggcgagacgaaggtcgtgcccgatctggccaccgacaccggcaagtcgagcgacgacggcaagacgtggacgtacacgctcaagaacgggctcaagttctccgacggcacgcccatcacctccaaggacgtcaagtacgggctggagcgttccttcgccgactcgctgaccggcggcctgagctaccacaagacgctgctcgagggcgcgcaggactaccacggcccgttcgacggccaggagctcagctccatcgagacgccgaacgacaagaccatcatcttccacctcaacgcgccgttcggcgactggccgtgggtcgtctcgctcgccgcgttcacccccgtgcccgacggcaagggcccggcgtccggctacggcaagctgccggtggcctccggcccgtacaaggtcgagtcgaacgaggccggcaagcaggccgtcttcgtgcgcaacacctactgggacaagaagaccgatccggtgcgcaccgcgggccccgacaagatcgtgttcaagatgggacaggacacctcggtggccgcccagtcgatcatgcagggcaccggtgaaggcaagaactcgttcctgtccggattcgtgccggccgcgcagctcgcgcaggcgcaggccaacccgaactacaagaagctgctgaccaccagcggcgacggcgcgctggaatacctcgccatcaacacccaacacgtgaagaacgcgaagattcgccaagcgctgcagtacgcggtcgacaagaaggcctaccagacggcttccggcggcgagatcgccggcaacttcgccaccacgctcattacgcccggcatcgagggccgcgaggactacgacctgtacaaggccgatccgaccggcgacgtggacaaggccaagcagctgatcaaggagtcgggcgagcaggccccgaccctcaagctcatcgccacctccgctcaggccgaaaccgcctcctcgatccagacgagcctcaagcgggccggcgtcaaggtggacatccagacactcaacgacgatgtgtattccgatacgctgaccaacgacaagggcgactacgatctggccatcagctcgtggcagcccgacttcccgtcgccctacgccaacatctccccgctgttcgactcctcgcagatcggccacggcaactacaacctggcccgttacgcgaacccgaaggtcgacgagctgatcaagaaggccaccgagaccatcgatcagaccgaggccggcaagatctgggccgaggccgacaagacgatcatggccgacgcgccggtcgtgccgctgatctattcgaagaacacgttcatccacggatcgaacgtgaccaacttcgtcatcggcaacttcccggcgtacccggactacacgcaggtctcgctcgccagcgcgaactgagccggcatccgcatccggcgcgcgccggcggcatggtccgctggcgcgcgcgccggacgcattccaacgcttgtgcatccaaggagcttccaatgagtgaaccacgcgcgatcgtgaccgtggacggtctggccgtcagcttcgacgagcgggaggtgacccacggcgtcagcctcaggctgttcccggggcgcatcaccgctctggtcggcgaatccggctccggcaagtcggtgacggcgatggcgctgccccgtctcgatccgtcggtggccagcgtgaagggccacgcgtacctcgacgacgcccttgtggatgacgggccggactccggtccgggcggcgacggcaaggacgccgccggccgcggcatcgatctgctggccgccgacgcgccgctgcaacgcatccgcggcgaatacatcggcacggtgttccaggaaccgtccaccgcgttcaatccggtgttcacgctcggcgtacaggtcgcggaatcgctcaaataccaccagaagcagctcagcgccgccgagcgcaaggccaaggtgctcgaacagctgcgcgaggtcgggctcgacgacgccgaacgcgtgtggtcgtcgtacccgcatgagctgtcgggcggccagctgcagcgcgtgatgatcgccatggcgatcatcaaccgacccaaggtactcatcgccgacgagccgaccaccgcgctcgacgtgaccacgcagaaggcgattctcgccctgatctcctcgctggcggtcgacctcgatctggccgtgctgctcatcacccacgacatgggcgtggtgtggcaggccgcgcaggacgtgtacgtgatgcacaacggcgtgatcgtcgagcaggggagcgtcgcgcaggtcttccgccacccgtccgacgactacacgcggatgctgctcgacgccgtgccgcgcctgcgcatcgacgagcatgcggcagacggcgaacatgcggccggcggcgaacgcatcacggaaagtgacgcgctcggcggcggcaggcgcatcacgcaggtgaacgacgtggccgtgtcgtacaaggccggcagcttcgccgtcaaggacatctcgttcgatctggtggccggcaggacccgcgcgctggtgggcgaatcgggagccggcaagaccacgatcgccaaggtgatctccggccagctcgcgccaacctcgggcacggtgctcatcgagggggaggatctcgccaaggcgcatggcaggcgcaagcgcgagatcctgaagcatatgggctatgtgttccaggacagcggatcggcgctcaacccgcgcaagtccgtggcatggagcatcggcgagccgatgctcgtgcagggctggctcagcgagacggaccggcgcaagcgcgtccttgaattgcttgatcaggtggagctgcccgccgatgtggccggccggttcccgcaccagctgtcgggcggccaacgccagcgcgtcggcatcgcgcgcgccttggcgctcaacccgtcgctgctcatcgccgacgagccgacgtcgtcgctggacgtgaccgtgcagcgcaaggtgctcgacctgctgcgccggctgcagcgcgagcacggtttcgcatgcctgttcatcacccatgacctgggcatcgtgcaggagatgtccgacgtgatcacagtgctgcgccacgggcgcgtcgtggagagcggggagaccggccgcgtgctcaaccatcccaaggccgagtacacgcgtaccctgctcgacgcctccccgaagatcgacctgtgagccgtgccgctcgtcatccggccggttctccggccgtgcggcggggcggcgacggcgcggatgacacctagccttaccgtggtttcggttttttgccgtcccgcccctatcggcgcgcggcaccgaaccagttggtgtatatgagggcgaagttgcggttgccgtagctggagcatgagtcgccctcgccgaacccggccgccagcgaggcgtcgttcggctggtagggcgtgtagatgtagagcagcgcggtcgccttgttctcgatgtacacgttggtgccgccgcacccggcatccgggtggtactggatgtagttcagcgcgttggcgtgatagccgtaggcgctttcatgcgccacatagtattggtagcggtgcgccgccccgtacacctgtctgaagaagccggcataggccggatcgcagttcgcgttgtccgggcagctcagccccatggcggccttgtactggaagtccgtcggatcgacggccgtgaccaggtgctgctccttctgcatcacggtgagcagcaccttctggctgatgccgcacgcgcgcgccgacttgtcgacgatcgcggccgcggtctcctttctcgcgccctcgtacgccgcgcaatactcgttcgccgcctggtcctcagtgtcgaaggtcatggttttcaggcaccgggaaccgctgcacgccgcgccctgcttgtcgaggaacgactggacctcggcctcgctcatcgcattggcgttgaagaactggccgtccgagatgatgtcgccgggattgaagtcgtattgctgcgtcagctgcagctggcgggcctcggcctcctgcacgtcgcgacgccactggacgacccgcacagtgcccacgaccagcgcgaccacgcatgcggccgccaccacggtgaccagcacagccgcgacgcgctgcgccaacccggcccgcttccaccagcgcgccgggctgagcggatacctgcgattgcgcgggcgtttgcccgggcgacgtttgcgattgccgcctgacacgccccgccccgcgacaatcacgttcgccctgccgcgcggattggccggcttgcgccgttgcgtcgtcgccatcgctacgccagtgccttcttgatgcgctgcaggctcaccggcttggcggtgccgagttcctgcgcccacagggacacgtagaattcctcgagcatccagcgggcggcggtcgcctgcttcatcagcgtctcgtggcgggggccggccggctccgccttggccttggccatcgccttgtcgaccagcgtgcgggcctcgtcggcctcccacgcccatcgcacgtcgcggttcttgtcggtcttcgccttggccaggcgcatgagatcggcctgcaggtatcgggagatgttcgccagcgcgtccgggggagcggcgccgacgaatccggggaacaccagcgtggcgatgtgctcgcgcaccgactgcagcaccgaaagcatcggcagatcagccttgccgctagtggccttgtcgacttcggcataagccttgagcacggcgatcacgtcatgcgccacctgatagacggtgtcctcgtacacttcgcgcacatcgagcaccgcattggccaacgcctcatcgtccgagagcctgtcgacattcggcatcagccgtttgaccgtggccagctgcaggtcttcgaccagatccttggtgaacttgtacggagcagaagccagcatcaacgcctcggtacccagccagcgcgacgaaatgcgttcggccggcaaccgcagcgcatccaatgcgccacgccagagcatcgtggcccgggactcggtggtggcacccgccttatgcaacaggttcgcctgactgaccagcttgccctgttctccagcctgatcggcctgcttcttgaccatttgacgggccgacgcctccgcctgcgcggcgaacttgcgttgcagcgccttcagatccttggacacacccagcaccttgacggggccgcgcgcatgccggcgtccacgagggtgcttgccggccggcagttgctgctccaccgagaacgtgaccctgagatacggggaaagacgctcgaccagttccggccccaacacttcgggatgaatctgcgcacccttggtggcgatggccgccttggtgaacacatgtgccaaatcaggccagccaacggtcgtgccatcctcatccaccggcggcagattcggcttctgctgcgagcccgagcccggcagatccgggtaatgctcgtcgatccagtcacgaatcgcacgcgcggcatccggagccggcacgaactggacgcgcagctgcttgggcagcgccttgatcatcgacagaatcagctcatccaacaggcccggcacattccatgtgaactggtcgggcgtgatacgcgagagcgccttcaacggcacatgcacggtgacgccgtcggccgggtcggccggatcgtatacgtagctcaaacgcaggtcgatgggttggccgtccgatccggtcgtatgccaatggtcggggtaatcgtccagactcaccgaatcgctggatgccagacgctccaccttggccgggtcgaaatcaagcagattcggctgacggtcatgctcggacttccaccatttcgccagatcggccacgctggtcacatcgttgggaatgaccgcgttgtagaagtcgaacagatcctcgtcggacacggtgtccgccagctggcgggtgcggctcgcgtcatcggcggcatcctcgagaatgtcacggtttttgcccacaaagtcgtcgtaactgaagcgctgctgaatatcgccctcgaccagaccctggcgaatcaggaagtcgcgcgcctcaagcggattgatgcgtccccactgcacggcacggtcctgtacgatcggcagaccatacagcagcacgcgcgcggtggccacagccgagccacgcgaacccgaccagtgcggctccgcatacgtggtgcgggtcaattggccggccaacggttcggcccacgccgggtcgatggccgccgaatagcgggcccacaggcgagaggtctccaccagttcggtgctcatcacccatgacggggtcttcttggccacggcggaggcggggaacagggcgaaacgggtgccgcgcgcgccctgataatcgttcttcgactgcttctgggcgcgtttcatcgcacgggcgcgcgccgcaccggtcagccccgcgaaatcggaggccttgggctcacgcaccacctgcatgcccatcatcgacagcaatccggcgagcatcgacttgtggatgccatccgcatcccacgagcagcacagcgaatgcgcggcctgctgattcaacggcagctggcgaatctccaagcctgggcgggaggcgggcaacgggtcgccgaccttgaacttcagctccttgcacatctggcgtagctgggagacgagatctttccactggcgtatcctcagccagctgagatactcggttttgcagatacggcgcagcgcgttgttgctcgggtcgccgtccgcttggaacacgcgatcccagatgttcagggctgtcaggaagtcggaggtctcatccgcatatcggttgtggattcggtcggcatcctcacgcttgtcgtccgggcgttcacgtgggtcctgcaagctcaggaacgccacgaccacgagcacctgggccagaagattcggcgaaccggttttcgcggcctcgataaccatacgtcccagacgcacgtcgatggggatgcgcgccagctgacggccggtatgggtgagcgtcacctcgccgcgctttcggccgatggccttgagctcggtgagctcattgaaaccgtccgacacggccttcatatccggcggatcgatgaacccgaagttcgtgacgtcctcggccgtgcgggccacgcccaccgacagcatgtgaagcaccacggcacccagcgaggtacgcaggatttccggctcggtgaagcgcggtcgggtctcgtaatcctcacgcgaatacaggcggatcgcgatgccgtcggccacgcggccgcatcggccggacctctggtcggcactggcctggctgatcggctcgatcggcagacgctggacctttgcggtcttcgaataccgggagatacgggcggaaccggggtccaccacgtagcggataccgggcacggtcagcgaggtctcagccacattggtggcgatgacgatgcgctgatgcaaatgcgattcgaacaccttgtgctggtcggcggcggacaatcgcgcgaacagcggcatgatctcgatggcgtccggtcggcgcatgtcgtcggcgcgcggaccgtaatgatgccgcagtgcggcctcgaactcgtggatgtcgcgctcgccggaagcgaagaccagaatatcgcggggaccgcgctcatgggaggagtggatcaccagttcggcgcaggctcgagccacggccgtgggcatatcggtgatgccgtcatcggcataggagtcgccggaccggccgcggggccggtcggaatcggattccgcgatggcgctggccagctcgtcgtaatcggcgtcgccggggcgggcgcccaccgcgaatcccggcacttcgcgcatcaacgcgggcgcggtgccaagcggctcatagaccacctgcacggggaaggtgcggccggaaacctcgattaccggcaccttctcatgcaaggcgtgctcgaaatgctcctggaacttgaccgaatcgatggtcgcggaggtgatgatgagcttcagatcgcggcgctgaggcagcagtgccgtcagatagccgagcagaaagtcgatgttaagactgcgctcatgcgcctcgtcgatgatgatcgtatcgtattgggtgagtttcggatcgcgctggatctgggcgagcagaataccgtcggtcacgactctcaatcgcgtgctgggcgagctttcgtcggtgaaacgcacctgatagccgacctcgtcaccgagcttcacgcccatctccgaggcgatacgttcggccaccgtgcgcgcggcgatacggcgaggctgggtgtgcacgatctgcttgccgtgcgcgccacggccaagctcaagcaggatcttcggcagctgtgtggttttgcccgaaccggtctggccggacacaataacgacttgggaacgtttgaccgcgctggctatctcatcacgcgcggcagatacgggaagttctgcaggatactcatatttcatgacgaacttcaatgatacggaagcccttggagctcgcgtatttgctcgcagtgaacccctcgccgagcgcatcgtccagccaggggatcagcgaatcggagccgagattcttctgcactacgagataggcggcgccgcccaccttgagcttcggcagccaagccataagcaatgtatgcagcgcttccttgccgactcgaatcggtggattcgaccaaatcgcatcaaacgtgaggtcgcccggcaccgtctcgcagaacgccggctggttctcggcgggcaggggagtgctggactcgtccacctgagccgcatgaatgttcgtgcggccgttcgcctgtgcgttggcatgggtcaggtccagcgcgcgctcgttgacatccaccgcccacacgttcgcttcgggcgactcaaacgccaatgtcagggcgatagggccccagccgcagcccaaatccaggaaatcgccggtaagcggcggctcgggcgcatgcttcagcaataccgatgtaccgaggtccacgcgcgagccggagaacacgccgttcgacacctgagcggtcgcctcatgaccgcgcaacgttacgttcaatgtgcggcgcacatctttcgacgcgggttccgcagagaaatactgttctgccatggtcgctccatttctgcgggattcgccgctctcgtatgccgacctgtatcagccggcctatgccggtacgtgccgatctatgccagcatgtcacctcatgtgatgataataagggaccatagaagaatcgtgaaccattccaaccaaacgaggcgcacttgaccgacaacacccagtacaccgacatcgaccgcggcaacaacgacgttacccctgaaggtgtgctggccgggcagtccgaagtgctgctcgacgacagccagcgcgcgaccggctggcacgaggacgccaaccaggaatgggaggagcgcgaggcccgcaacgagctcaagcatgtcgccggtctcggcgagctgcaggacgtcaccgaagtcgaataccgcaaggtgcgactggaacgtgtggtgctcgtcggcgtctggtcgtccgccgtcaccacgcaagccaaggccgaggaatcgttgagggagttggcggcgctcgccgaaaccgccggtgcggtggtgtgcgatggtttgctgcagcatcgctccaagccggatgcagccacgtacgttggttccggcaaagccaaggagattgccgacatcgtggcgcgtgaggaagccgatacgattatcgtggacgacgacctgccgccgtcacagcgccgtgcattggaggacgcagccaaagtcaaggtggtggatcgcaccgcggtgattctggacatcttcgcccagcacgccacctcgcgtgaaggtaaggtgcaggtggagttggcgcagctcgaatacatgctgccccgactgcgtggttggggtggttcgctgtcccgtcaggccggcggtcgcgcggcaggcgcggatgcgggcatcggatcgcgaggtccgggcgagaccaaaatcgaaatggaccgtcgtgtaattcgcacgcgtatcgccagactgcgccgtcagattcgtgagatggctccggcacgtgaggtcaagcgcggttcacgccgtcgcttcggcctgcccacagtggccgtggtcggctacacgaacgccggcaaatcctcgttgaccaaccgtctgaccggttcggccgaactggtggaaaacgcgctgttcgccacattggacacggccgtgcgccgcgccaaaacccgcgacggacgcgcttacgcctacgtggacacagtcggcttcgtgcgccgcctgcccacccagctgatcgaggcgttcaaatccaccctggaagaggtggccgaggccgacgtgatcctgcacgtggtcgatggctcccaccctgacccgttctctcaggtcgacgcggtcaatgacgtgttggcggacatcgaaggcacggcctcgattccgcgtattctcgtattcaacaaggccgatcaggcggacgaggcgacacgtgaacgactcgccgcactgcagccggatgcgttcatcgtctccgcctataccggtgagggattggacgagctgcgtaccgcggtcgaaagtctgctgccggtcccgcatgtgcatgtcaacgctctgctgccgtataccgctggctccctgatctctcgtgtacgcgaatacggcaaggtggacaaggtggagtaccgcgatgatggcatacagcttgaagcggacgtcgacgcccatcttgccgctcaggtggtcgaacagtccattgactaacgtgataaacatcacagtttgtttgtgagcgctaacaaccgttggaaacattaccataccgtcatcagacagggtggtgtgctggtagcaaaacgtcttagcgggtttatagagtgaaaaccgttagttacaaggcctgccattcatcagcagaccgcctttgaagagaggttcatccatcatggcggaaactaccgttaagcccacgaagcttgctgttattggtgccggtgccgttggctccaccctcgccttcgccgctgcccagcgtggcgtcgctcgcgagatcgtgcttgaagacatcgccaaggagcgcgtggaagccgaagtgctcgacatgcagcacggctccagcttctacccgaccgtgtccatcgacggttccgacgatcctgagatctgccgcgacgccgacatggtcgtcatcaccgctggtccgcgtcagaagccgggtcagtctcgtcttgagctcgttggcgctaccgtcaacatcctcaaggccatcatgccgaacttggtcaaggtggctccgaacgccatctacatgctcatcaccaacccggtcgacatcgctacccacgtggctcagaagctcaccggtctgcccgagaaccaggtcttcggttccggcaccaacctggactccgctcgtctgcgcttcctgattgcccagcagaccggcgtcaacgtcaagaacgtgcacgcctacatcgccggcgagcacggcgactccgaagtcccgctgtgggagtccgccaccatcggtggtgtccccatgtgcgactggaccccgctgcccggccacgatccgctcgacgccgccaagcgcgaggagattcaccaggaagtcaagaacgccgcttacaagatcatcaacggtaagggtgccaccaactacgccatcggcatgtccggcgtcgacatcatcgaagccgtcctgcacgacaccaaccgcatcctgcccgtgagctccatgctcaaggacttccacggcatctccgacatctgcatgtccgtgccgaccctcctcaaccgtcagggcgtcaacaacaccatcaacaccccggtctccgacaaggagctcgccgctctgaagcgctccgccgagacgctgaaggaaaccgccgcccagttcggcttctgataaaaaatcgctgtacggagcgcctttcacaccgcacaaggttcgaactacctttgtaggccttcaccttgtgcggcacgaaaaatcgcacacgtacagcgattttttataccctgctgaatgcttccagagggagcattttttattcgtggaattcgttggaggagggggagctatagccctcgggctcaagctggaaggtggtgtgggggaccgagaccgggaagtgctcgcgcagacaatcctgcagttgggtgaggattgtggcggcatcttccatggtgaggtctttgtcgactaccacgtgggccataagaatcggcatgtcggtggacaccgtgctggcatggaggtcatgcacggcaagcacatgcggcacgtcttccagatgctcgcgtaccttatcgagatcaagaccatccggtgtttcctccagcagcaccttggccgcgttgtgcagcagcttgatggcgcgcggaatcatcatcagtgcgatgacggcaccggccacggcgtcgaagccattccatccggtggagatcattaccagggcagaggccaccacagacaccgagccaagtgcgtcgttcatcacctcgaggaacgcggccttcatgttcatgttgtcttcgcgctgcgaggcaaggatgaagatcgagatgatatttgcgacaagacccagaatgcctacgaacagcagcaagccgatatcgtcgatttccgctttggagccgccgaacagacgcatgccggcctctaccaacgcatagatgccgacgataagcaatactacggcgcccgcggcagcggtgagcacctcaagcctggcccagccccaagtacgagtgttgttgggcttgcggcgcatcagtatggcggtgattgtggatgccaccagcacggacatgtcggtgagcatatgaccggcatccaccagcagggccagtgagccggttaagacggccgacaccacttcgatgaggaagaccgaaccagtgacggtcaacgtggcaatcagcctgcgctggtgcgcggcagggtttacggatgtggatggtgcgggtgtatgggtatgggccatgtgtactccttcgctctatcgagttgaaaccgcttctcaataccatttgcgatatggtctgaatacgacgaaaccccggcgcgaggccggggtttcgtaagcagtgtgcgactatagcacgaccagcgcgattcagcgcacgctgatcagctggtggcgaacaggctataatttgcgcagtacggtgaccaccttgcccataatcgtggcatgtgtgccgtcgatgggcgagtatgcggggttgtgcggcatcagccagacatggccgttttccttgcggaaggtcttcaccgtggcctcgtcatccaacagagcggcgacgatatctccgttgacggcggaattctgttcgcgcaccaccacatagtcgccatcgcagatagcggcatccaccatggaatcaccgtggacttccagcatgaacagggtgccggagccggtcagccgttcaggcagacgcatgacgtcgtccacatgctgttcggcggtaatcggcacgccggcggcaatacggccaacgagcggtacgtcatgtgattcggcaatggcttcggcggggaattggtatatctccgccacattgctggcgctggttgcctcttcgctggcttgtgatggcttttcggcattcggggcggatcctgccatcacctcgatggcgcgacccttgttcgcgttcatgcgaatgaagcccttgtcttccaaaacttgtagctgatgcttgaccgaagacggacttttgagcccggcggcatttccgatctcccggaaagagggagcaaagccatgttcgtcgatatgcgtgcgaatggcgtccaacactttgcgctggcggtcggtcagggtggactcgtccggcttctgcttgggggagaggggaatggtgctcacgtcagggctcctttcgttatgtcaccagcataacgtgttgttcgtgtgaaatcaaacatctgttcgagcttcgacttgaccgtgtcgaacatttgtgccattataagaacagttgttcgatagaacatctgttcgagagaggtggtcgtgatgactggttcaatggtgatggccccggcccgtagcgcacgtgtagctatgcagcatgctggaacgtcccgccggaatgtgcgtgggcggattatcgcagtgatgatcgccttggcgctggcctggtgtggtttcggcgcgcttaccgctcagcgggcccaatcagatacgggtgccacgcaggtgaccagctatatcgtgcggccgggggatacgctctggtcatatgcttcggctattacacctgctggccatgatgtatcggaaacagtggatgagctgattacgctgaacaatctcgagtccggaacattgcaggccgggcagcgcattattgttccggttgagtaaatgaaacccgagcggcatggtttttccgcccgtacacgttattctggagagcatgcattgccctttttgccagaaccccgacaccaaagttattgatacgcgcattagcgatgacggtcattccatccgtcggcgtcgcgtatgcccgaaatgcaacaagcgttttaccacggtggaaaccagtatgctgctggtcactaaacgttcgggtggcgtggagccattcagcagagacaaagtgatttccggcgtacgtaaagcctgccaggggcggccggtcagagaagaggatctgaagctgctgggacagaaagtcgaagaggatcttcgctcccgaggccttgccgaagtcacctcagatgaagtgggcaaagccatcctgaaaccgttgcgtgacttggatgtggtggcgtaccttcgattcgcgagtgtgtaccagaactttgcaggtctggaggatttccaaagcgccattgatggtttgcgtgaataatatgcgaatgccatgcaccgtgatatgcgagtgattcgcaaaccatggtgcgaaccaatcatgaagccctgcacttatgaaagagacccgtcagcgacgggtctctttcatatcaatcgaggatgagctgcgtcagctgatgacacgcatgcgaacggtgccctcgatgttgcgtagtgcttcaagcgtggcggcgctgggcttctgagccacgtcggtgaccacatagccaagttcgccttcggtggccaacgactggaaggaaacgttgatgttctcttcgccgagcacgcgattgacatgagccagcacaccaggaagattgtcgtgcagatgggcgatacggcacacgcccttgcgttcacctaggttgatctgcggtaggttcacggacaatgaggtagaacccttgaaccagtaatcctcaagacgctgagagacgaaatggccgatggattcctgagcctccaaggtggagccgccaatatgaggagtcagaatcatattgtcttcgttggccagtgaggtctcgaacggatctccgctcttcttcggctcaacggggaacacgtcgaccgccgcgccagacagatggccggaatcgaggtgctgcttcagagctcccagatcggcgacgaaaccgcgcgaaaggttaatgaaaatcgcgtcctgcttcatgcgggcgaattggtcttcgccgaagaagccggtgttcgacttgcggccatccacgtgcagggtcacggcatcggactgttccagcagttcgttgagggtatcgcaacggtgggcgttgcccagtgccagtttctcctcgatgtcgtagaacaccacgcgcatgccgagggcctcggccagtaccgacagctgggagccgatgttgccgtagccgatgatgccaagggtcttgccgcgcacttcatgcgagccggaagcggacttgtcccacaggccatgcttgatgtgatgcgtgtgtgcgggaatgcggcgcatcaagcagatgatgtcgcaaatcaccaattccaccacggaacgggtgttggagtagggggcgttgaacacggcgatgccacgcttgccggcatgtgccagatcgacctgattggtgccgatgcagaagcagccgatggcgcttagcgtaggacgcgcatccagcacgcgggctgtgacgttggtcttggagcgtacgcccaccaagtccacgccatccagcgcgtcgatgagttcgtcctcgctcagggctcccttcatggtctcgacttcgaaaccgtgatcacgcagcgatttggccgcgtcggggtgaatgttttccaataacagtgctttgggcatgcttcataccttagatgttcagggacttttcgtccgttcttgtccgaactataaccagtttctgggtcggcctggtcattgccacgtacaggtccgaggcggcgaccaggcggctcggcgcgtcatcctcgatgagaccgggctcgaccaccacgacggcatcgaactccagacccttgaccgtttcggtgccgcagacgctgatttgctcatcccattcgggctgctcgatgagccttgcgtattcggccgggtcaagaacggcggccagtttgcggcgcacggcgtcgcgcaccggggcgatgagatcatccggacagatgacggcgatgcggccggtgccgtctgccgaaacgaattgttcggcaagctgcgccgcctgctcggccgtcgtttccagcaaggacgacatgtcgggcaccacattgcgggacaccgaatcggggatggtgcgcaccgcattgaccgtggagatgtagaggccttccttctcggcaaatcgtgaggcgagttcggaaacttcctgcggattacggtagttgatggtcaactcgttcagatcccagtggctttcgccgaacaggcggttcatcgatttgctccagcgtcgggtgccacccagcgccgaggtctgcgccacatcgcccacgatggtgaacgagcgggaggggcaacggcggatcaacatacgccagtccatggcggtcagttcctgcgcttcgtcgaccacgatgtgcccgtaggtccattcacggtcggccgcggcccgctgcgcggtcagctcggcgtcgtccccgttcatctggtcgagcagcatctgactggagacgatgcctccacccagaccggtcgcggccagcgtgtctttggcatactgctcttcggcggcacgacgtgcgtcggcggcggactggcgggccaccgtcttgggatcggggcccagcatatccatcgcttcgtcgagcagcggaatatcggagcgggtcagaggggagcccttggggcgggcaagtgccgcgatgtcgttgtcggtcagccaaccagccagagacttcagacgttcgggatgggcgaacagctgatcgatgagccatggggcggtcatcggcagccagcacaggttcagggtcttgcgcacctgctcgttcatacgcagcaacgacatcgcgcggttcagctccgcctgatccggcgtgtaatcaagctgttcggcataacggttctgcatgctggtcagcatcgaacggataaaggtctcgcgggccttgttatgaggttgccgggtgcgcttcgcgtccgcctgcgcctgctcgatatcagtggccagcattggtacctgaatgccgctaatggttactgtcggcagaacagcgggaacacgcacgcgcgcggcgatggcattggccactacggaggtcatgcgtcgatcgcccttgagcttggctgcataaggggagtcgaccgccgtggcggtgatgccgggaatcagatcgctgatggtgcgtgagaccacgccggtctcgcccaaggagggcagcacctgatcgatgtagtgcaggaacgccgagctggggccaacaaccagcacgccggaacgttccagcgtgcgccggtgcgtgtacagcaggtaggcggcgcgatggagcgccacggccgtcttgccggtgccaggaccgccctgcaccaccacggcacgattcatgtcggagcggatgatgcggtcctgctcggcctgaatggtggccacgatatcggtcatcttgccggtgcggcgtgagctcagcgaagccagcagcgcaccctcgccggtcaacgtgccggcggaagacgcctggccgacttggtcggaatgcacgtcgagcacctcatcctcaacgcccacgacttcgcggaaactcaaggtgatatgcctgcgcatcacgatgtcgccgtgattggagggggtcgcctcatagaaaggacgtgcggcttcggcacgccagtcggtcagaatcggctcatggtccgggctcgacaggccgatgcggccgatgtaatgacggtcgccgttcttggcgtcgagacgaccaaacaccagccgatcctcaacgctgcgcaattgcgtgaggcggttttcgtacattgtggcaaaggagtctcgttcgctgcgttgcgtgggggatccgtgggagccggcggcgcgtacggtgtccaggcgttgccacatttcggctcgcagatcatccaatcgtccataggcgcgatcgacggcctgctgctcctcatgcagctgggaggcgtaactcgacatgctgttctcttcgttccatttccgtggggcagaaaaaacttaaggcattcaaatttaccgcacaccccctacgtcagtgatgcggacaacccggaataggtgaattcagcgtgaattcgccatgctgctcggtcggtggagtgcgcaacgtggattggatgtgcggagcgcccattcgtgcgacagtcgtggccgacacgcgcaatccatcggtaattgccctaaaagggtgagcaaatcgtgcatgagtggggagaaatggggaatcgtggggtagagtggtgaaccagttggccgaagtgtatcccacgtaacgatgaaggaggtggagccatggttgccgatcagacgattcgcgacgctgatgccaacgcacaaggctccaccactatggctgatctcatggctggtctgccgccgctgcttctcggcacatatacgccgaagatcgacgccaaaggccgtatggcgctcccggccaaattccgctcccagctggggcagggcctggtcatggcccgaggccaggaacggtgcgtgtacctgctgccgttcgatgaatttcgccgtatcgcctcgcagattcagcgtgtgtcggtgggaaacaaagccgcccgcgaatacctgcgtgtgttcctttccggcgccgtcgatcagcagccggacaagcagggccgcgtgctggtgccgcagatgctgcgcgattacgccaatctgggttccgacgtcgtggtgatcggcgttggcacccgtgccgaactgtggaataaggacacgtgggagtcctacctcgccgagaaggaagagggatattccgatattgctgacgatgtgttgccggaggtggaattctgatggttgatgtggcgaatattcatctgccggtattgctggacgattgcgtgaacctgatggcgcctgccctggaacatgagaacgccatcgcagcggattgcaccctgggccttgccggccattccatcgccttcctcaaagccgcgccgcaggctcggctcatcggcattgaccgtgacagtgaagcgctggggctggccaccgaacgcatggaacgggaggggctcgccgatcgattcatcccggtgcatgccgccttcgatcagctcgatcaggtgttgacggaccgaggcatagaacgtgtggacgccgtattcatggatctgggattatccagcctgcagatcgacgaaaccgatcgtggcttctcctattcgcatgatgcgccgctggatatgcgcatggacgtcagccagccgttgacggccgaacggattcttgccacctatgatgcggcggaactggtccgtatattcaaggaatacggtgaagagcgtttctcgcgtcagatcgcccgcgccatcgtggcacgtcgagacaaggagccgtttaccaccaccgcacagctcaaccgtctggtcgatgaagtggtgccgcaagcccaccgcccggcgggcaatcccgccaaacgcgtcttccaggcgttgcgcattgaagtcaacggcgaattggacaagctcgcctccacattgccgcaagccgcgaaccgactgcatgtcgggggacgactggtggtggagtcctatcattcgctcgaagacaaaaccgtcaaatcgttcatggcacaagggctgcgagtggatgttccggctggtctgcctgtcataccgccggatgcccaaccgtttttcacggatctcacgcgaggtgccatcaaggccggcgaacatgaaatcgcagccaacccgagatcggcttcggtgcggttgcgggcggtggaagtcagccgtgagattccgtcacgatggaggaaacgctttacgcaaaccgcgcagggcctgaatgacgtcaagatacaaggctccgcgtctccgggcagagccaaaaacacagcgcgaattcgtacaaggaggggataacggcatatggcaaccgcacgtaacattcgatcgaacgcggctccggcctcgaaccgaccgcacaccaagcatcagtcctcctcccgacctgagctgcgggtggtctccaacccgcgtggagacgagcggggcaatgtcgtcggacgggtcatcgaatggaccagaacaagaagcgcaccgctggtgcacgtggccatcgcagtgatcttcctcgtcggcaccttgttcggtgcgctgatgttgcgtacccagatggtgcagaactcgtttgaggcggcacagatcgaaaccaatatcaacagacttacccaagatgtcgaagacgatcaggccaaactcgatcaattagtcgcgaacctgcccgacaaggccagcgacatgggcatggtcccgcagcagggatcagtgtccatcgacttaagcggataccagtccaacaaaggcggaacccagtgaacaccattcgtcgcatcgtagagttcgccaaggtcaagaccttcgcgttcaaatgcattgccatcggcgccgcattggcgttggtggcgtcggcatgcgtgattcagctggcctccacccagctcatcggcggccgtcaaaccgcacaagcggccacggctaaccgcaccctgaccgtgacgttgagcgccaagcgtgggcgtatcctcgacgccaacggctccgtgctcgctcaaagcgtggagcgttatactatcgtcgccaatccggaggctgcacaggagttcgagccgattacttgcaatgacagcacccgtgattactgccacgaaattgacggcaaacccgtgggtgctaccggagcggcggccgtgggccgactgctggccaaagtcctggatatgaacgccatggaactgggagctgatctgtccggtaccgggcagtatgtgattctgaagaaagacgtgaccccacaggtcaagcgcagcatcgaggcgttgcacctgggcggtattgtctggggtgagctgagcagtgaaagactgtatgcggatggcgatctcatgggcgcgctgcttggcggcgtgaacgacaacggcgatggcgtcgccggcatcgagcaggtcgagaacaagacgcttaccggaaccgatggccatgaaacctaccagcgtggtaatggcggcgaagagattcccggcaccatgaccgaatcggtggcggccaaaaatggcgacgatgtcaccctgaccattgaccgtgatgtgcaatggtatgtcaaaaaggccttgaaggaggccgaatccaagtatggtgcagcgtgggcgatcgctgtggtgcaggatgtccagagcggggagattctcgcactggccgatagcgatgaagtacaggctggtaccgatgcggcgaagatgagcccgtctcgggccgtgtccgaaaccttcgagcctggttcggtgggcaaggtcatctccatgtccggctatctgcagacgggactgcataagatgagcgatcaattgtcggtcccggaccacatcacacagaagggccagacctacaaggactcattcgaccatggcactgagcgctggacgctcgccggtattctgcagaactcatcgaacgtcggcatgattatggccggggagaactatccggatgagcaacgctacgagtacctgaccaaattcggcatcggacaaccgaccggactgaacctgcccggtgaatcgagcggtctgctcaccagcccttcggcatgggatctgcgtacgcgcaacaccatcctgtttggtcagggctacaccgtcaacgccctgcagctcaacaacgtggtggccaccatcgcgaacaagggcgtcaagcagcagcagtcgatcatcagatcaaccaccgatgccaatggcaagaccactgagaccaagaagggcgaagccacccgcgtgttggatgaaaaggtcgcatcggacatgatgaatgcgatggaatcagtggcggagagctacaacaagttcgtcaaggtcgatggttaccgcatggccgccaagtccggtaccgcagaggtgcagggttcggatggcgcgctctcgtccattatctccgattattccgtggtgattcccgcggacaacccgcgctatgcggtcaccgtggtgatgaaggatccgaatggtgtgttcggcggtctgacggccggccctgtttccgcacagatttgtgagttccttatgcagaaatacgaggtgcctgtctccagtccacgcaaaaatgctattccagtcacgtggtaaggatcaggggagaaaggcgctagcccatgagtgcagtgagcgaatccatcgcccagcgggtgaccttgggaatgctggtcgaacggtacggttttgaagtcgatccacccttcgccaccaatgtcaccattacctcactcagcgatgccgtggataccgtgattcccggctcgctgttcatctgcacgcatgagcaggaacccgatgtgctgcatgccgcacaggccggtgcctatgcggcgttgctgccacgcgcgtccaaaggacagatcgccaatgccgatataccgttgctctacggcgattgcgacgatcgcgtactcggcgatctggccagcggcctggccggcggaccatccaacgccatggcggtgttcgcggtgaccggtgcggatgagcaggccgttgacgcaggcgtgtcccagctctccgaattcctgcacatgctgggcaatccggtggcggtaatcaccgcatccgggtccacgtcgatgacacgtaccatgaacctgaactatcctctgggcatcctcgatatgcagcgcgcgctgtccgtgtgcgccgaagacggtgtggcggccgtgatcatcgccatggatgaccgcacattggccgagcatgcgttggaatcggtgaacgtggatgtgctgggcacggaagatgtcaacgcaagcgcaagcttggacgaattgaagacacgctacgcattcgttgcggaacatgacatgtccatgacctcgtcgacacccgaatcggatgaaatggctgcggattcaccggcaatgtacgaccgcgtccgactcgggcacatgtccttggccatcgccatggtactggccgccggcgtgaggaaaaacaacatacgcagtgccctgcatgtggccaacaatctcaattaagtccgtgcatgcgggacgaagcgtaatcgtaaaggagtttgaaacaccatggttccgatgagtgtggaggagatcgccaaggccgtcgatggtcgattgatcggagacgccgattccgagtctcgagccaccaatacggtcagcgactcgcggcaggccggccccggatcggtgtttgtggccatccgaggcgagcgtgtcgatgggcatgactttgtggcgaaaaccgctgaacagggagccacggtggccatcgtcgaccatgaggtggagtccgatggcctgccgcagatcgtagtgaaagacacggtcgacgcccttggcgagctcgcccgacacaacatcgttcgccgccgcgagctggacggcgacttcgacatcatcggattgaccggttcggtgggcaagaccaccaccaaggatctgctctcctccctgcttgccaccgtaggcccgaccgtggctccggtgggatcgttcaacaatgagatcggcctgccgctcactgcgttgcgggtcgatgagcacacccggttcttcgtggctgagatgggtgccagccatatcggcgaaatcgcgcgactgacccgtatcgcaccgccgaacacggcaatcgtattgaaggtcggcgtcgctcaccttggagaattcggctcccgcgaacgcatcgcacaggcgaaaagcgaaatcgtgcagggactgcttcccggaggcaccgcggtactgaacgccgatgacgaacacgtggttcccatggccggcctggccagcggcgatgtgctgtggttcggcttgggatcgtcgcaggagcccgaggtgcgggccattgatgtcactgccgaccggtccgatcatgctgaattcacgttggtcgatgcggacggcaaccatacgccggtgcatctgggcattcctggacgtcacaacgtgatgaacgcgttggccgccgcaaccgtggcgatgcgttacggtatggcacccgaaacggtggcgcggattctggcctcgcagcacaccatcagccctcatcgcatggcattgtccacggtgaatcgcgaggggacttccttcacactgatcgatgattccttcaatgccaatcccgactccatgaaagccggcctgaacgggttgaaggcttggaactcaaatgacggcaaggatccgttccgcgtggcgctgctgggtgccatgctggaactcggcgccgatgagacggcattgcacacctctatcggcacgtatgcggccgaattgggcatcgacgcgatcatcgcggtcggttccgcccaagaccaacatctcgatgcactggcacaggctctggcggacggtgcccgtcagagccaatccgcgtcggtggattgcgtacacgacatcgatgcggccgaacagctggtcatcgacttggcgcgcaaccattccgacgctgtggtactgctcaagggatcgcacgcgtcaggcctgagcgctttggctgaacgctgggcaaagaactgacccgataaccaccccaagaaaccgacaagaaagagaagctgcacgtgattgctctgatcattggaatgctggtgtcgctcatcgtcaccttagtcggcaccccgctgctgattcggctggtccacaagctgcactatggccagtacatccgccaggatgggccgcagtcgcatctggtcaagcgcggcacccccacgttgggcggcgtggtcatcaacttcgcgattctgctcggttgggcatcctccgcactgtaccgatacctgcgttcgggcgacgtgccctcctggtccgcggtgctcgtactgttcgccatgctgtcgatgggtctgctgggctttatcgacgacttcgccaaggtgcgtaagaagcagaacgaaggcctatcggtgggcggcaagttcatcggccagttcatcttcgccaccatctacgcggtacttgcgctgctgattcccaccaaatcgggattccccagtgcgcaggcgggcatcagcttcatcgaacggccgttcttcaacttcgacttcgccggccgtgccgtaaccatcatcctgttcgtcatctgggtgaacttcctgatgaccgcatggaccaacgcagtgaatctgacggatgggcttgacggtctggcggcaggttcgtcgatgatcgccttcaccggttttggcatcatcgcattctgggaaagctaccacatcaagggcggcagccatggcggctattcctatgctgtgtccgatcctctcgatctgaccgtcatcgccgtatgtgcggccgtcgcctgcttcggcttcctgtggtacaactcgaaccccgcatcgattttcatgggtgataccgggtccctggccttgggcggcctgttcgcagccctgtccatcgccacgcacaccgaattcctggcggtggttctgggtggactgtacgtcatggaagccatgagcgacgtcatccaggtcgggtacttcaagatgacccacaaacgtgtattcaagatggcaccgatccaccatcatttcgaactgaagggttggaccgaaaccaaggtggtggtgcggttctggatgatcgaactcatcttcgtgctgctcgccctgacgattttctacggcgactgggtcacccgctccggcctgctgttcagctagcggaaatctgggtgggattatgctcacccacggaattcctatatcaggaggaacaatgcaagtagcggataagacagtggtgatcgctggactgggtgtgtccggcacctcgttggcggaggtattgagggaatgcggcgcccacgtgattggcgtcgacgagaggaagcccgaggccggtctccgctcctttgatgacgtggactgggaccatgtggactacgtcatgtcgtccccggtgttcaacccccgcaccccgttcgtgctggaagcccaacgccgtggcatccccgtgatgagcgaggtggaattcgcatggcaactgcgtgtgaataacgagcgcaccggtactccggctccatggatcggcatcaccggcaccaacggcaaaacctccaccaccgagatgacctcggaaatgctcaccgcctgcggactcgacgcgccgaccgccggtaatatcgcctccggagacatgagcatgagcctgtctcgttgcgccaccaatcctcagcacgacgtactgtgcgtggaactgagctccttccaattgcacttcaccgattcgctggcacttgactgcgcggcgatcaccaatatcgccgacgatcacctcgactggcatggcgggcgcgagaattacgccgccgacaaatccaaggtgttccacaacgccaaacgcgccatcgtctacaatgcgcaggacgccaaagtcagcgaactggcggccgaggcccaaaccgccgaaggatgccgcaaggtgggattcacgctcgaggccccccaggccggtcagatcggcattgaagatggctggatcgtggacaggagcggagtggccggcggcgcagtgggggagccggtcagactggccgccatcaccgatttcacgcatctggcagagccggacggctcactgtacccgcatctggtggccgatgcattgacggcattggcgttggtgctgggacttggcgctgatcgagataccgcgttgaaggcgcttacctcgttcaagccgggcggccatcgcatcgaaaccgtggctgaggccgcagtcgagggcggctccgttcgtttcgtggacgattccaaagccaccaacggtcatgcggcacgcgcctcgctgtccagcttcccggccaagtctgtgatctggattgccggaggtctggccaagggcagtcgattcgaggacctggtcaaggaccaggcacataccatcaaagcggccgtcatcatcggcaaagaccagcagccgatggtcgaagcgtttgccagccaagctccggacatcccggtgaccatcatcgatcccgaagacaacgataccgtcatggatcgtgccgtcgaagcctgcggcacgtatgccgccgccggcgacatcgtgcttatggctccggcctgcgcctccatggaccagttcaagtcctatgcggatcgaggcaatcgattcgccgccgcagccaagacgtggagcgaggtgcatggcctccactgatacccataagcgtaaggcatacagagcccctgacaggcccgcactcgagatcaccgactacacgggttggcgaagcttgctcaacccgctatggtgctaccacggattccgcatggccgtggtggggctgacatgcttcggcctgatcatggtgttctccagctccacggtcaccatggccgcactgggcaagtcgccgttccttcagcttctgaaccagggcgcgttttgcctgatcggcttggtgctgggcttcgtggcattgacgatgccggtgacgttctggaaacggaccggcgtgttctttgtggtgggtgcctgcctgttgcaggcgctgacctttactccgctgggtatcgacgtctacggcaacaaaggttggctgaacctcggcttcaccactatccagccggccgaattcatgaagttcgcgatgtgcatatggctgccctcgtcgttgcatgcctgcagcaagatgtaccacaagaagggaatcaaagcatatgccgcgccgttggtgttgtatgcgataggcgtggcgctggtgatgggcggcagggacctcggcacggccatgattctggtctccatcggaggcgtggccttcctgatcgtcggattccccggcaaatggatgggaatcggcgtattgggcgcggtggttatggtcggtgcattggcggtttccagcccgaaccgcatgcgtcgtattctggccacatatggtgattgctcggccactgacgcgcagagcgtatgctaccagtccattcacgccaagtacgccatcgcctccggaggctttctgggattgggcatcggcaattcgcgtgagaaatggaattacctgccggccgcccataacgatttcattttcgcgatcatcggcgaggagaccggattcgtcggttgcgccatcgtattgctgttcttcgcgattctcgcctggtgcatgatcgtcatcgcattgcaggtcaccgatcgttatgttgccatggtgctgatgtgcgtcaccatttggatcgtgggccaggccatggtcaacatcggcgtggtcgtgggtgtgttcccggtattgggcgtgcctatgccgttcgtctccgcaggtggctcatcaatgatcatgtgcttgacggcggccggactggttgtgggacttatgcgttctcaaccgcagataaaacagtcgcgtcagagcgcgtaagtagactcggtaatcatgaatcaaggcacaccacatatcgttcttgctggcggcggtaccgccggacatgtcaatccgctgctcgcggtcgccggagcgattcgcgacatcgaacccacggcacaggtcaccgtcatcggcactgcggtgggtttggagaaggatttggtgcctgaggccggctacgagctcgacaccatcgaaaaagtgccgttcccgcgtcgccctgacctgtacatgcttcgcttcccggcaaaatggaagcgagaaaccgccaaggtgcgctccattcttgaaacgcggcatgcggatgtcgtggccggattcggcgggtatgcttccgcccccgtctatgccaccgcacacaagatgggcattccgattgccatccatgagcagaatgcgcgtgccggcatggccaataaactgggcgctcgttgggccgatttcatcggtaccgtgtacgaaggcaccggtctcaaaccgcgtgccggagccgacgtcgagcgtgtcggtctgccgttgcgcccgaccatcgcctccctgaccaaacgcatcggtgacgatcgtgccgccgtacgccgtgaatcggccgcgcagcttggcgtcgatccgaaccgtccgctggtgctggtcactggcggatcgctgggagcgcaaagcctgaaccgcgccatcgcctcctccgccgcagacctgttggcccacgcacaaatcatccacttgaccgggcgaggcaaaatcagcgaagtacgcgaactggtcacggcctcggccggcgcggacgtgcttaccggcatcggccccgaatcggccggacaaggtgactaccataccgccgaatatctggaacgaatcgatctggccttcgcctgtgccgacttggtgatttgccgcgccggagccggatcggtatccgagctggctgcactgggtctgccggccatttacgtgccgctgccaatcggcaacggcgagcagcgtttcaatgccgagccagtggtgaacgccggcggcggccttctggtcgcagacaaggacctgaccccgcagtgggtgcatgagcatgtgcccgatctgctcgccgatcacgaacgacttgccgaattcggccgcaaggcatgggaatacggcatcagaaacgctgccgaaatcatggcccggcacgttctgcaattagccgaaccatccaaatagtattcagatatcatcccgtgcgcgatacagaccaatcccgtcccgcaacacgagatacggtcataatatagggtgctggaatccccaaaggagttttgaattgtctcaagatcagcccatcgtgcttgaccccacgtatgcctcgttcgatgctgcggcccgccccgcggatctcggcgccacccatttcatcggtatcggcggcgccggtatgagcgttctggccgaaatgctgcacgccgaaggagtcgcggtggacggctccgatcgcgcacacagcgccaaaaccgaccgacttgaaacgctgggcatcaccgttgaattcgggcagcgagccgaaaatgtcgcccaggctgagaccgtggtctactccagcgccatcaaaccggacaatccggaaatcgtcgcagcgcacgcggcaggcaagcgcattgtgcatcgcagtgacatcctcgctctgctcatgaacggcaaacgagccgtcaccgtggccggagcgcatggcaaaaccaccaccagctccatgctgtcccacattctggtgaacgccggtgctgatccaagctacgccatcggcggctttatccaaggcccggacggcaccacgctggacggtggacacgcgggcaaaggcgatattctggtggccgaagccgacgaatcggacggcagcttcgccaaataccatccgaccatcgccattatcaccaactgtgaagccgatcatctcgaccattacggcgacgaagcccactaccgtgccgcgttcgttgcccacgccggccgggccaccggtcacgtgatcatcagtatcgacgaccccgacggacttgccgtgctggaggccatgcccgccgacgtgaaatcccataccgttgcctacggcactaccgcgcgtgaatccctgcccgatttgggcggtgccgcgtatgtctggatcgcttcggaaagcgagaccgcaggcagcggcgtcgaacagctcaccctgcatctgccggccgcggtgacggcgggggagccggtgtctcagagcgttgccctgaaggttcctggcgtgcacaatgcgcgcaatgcggccgccgccatcagcgctgccgtgctgctgggcgtgagccccgcagacgcggccaaggcggccggcacattcctcggtgcggcacgccgcttccaggtgcgcggcacggtcaagcaggtcactgtagtggacgattacgcccaccatcccaccgaaatcgcggccctgctggatgcggcccgacgccggtaccccgattcgaccattcgtgtgatcttccagccacacctgttctcccgcaccaagttcttcgcgcaccagttcgccgaatccttggccaaagccgatgacgtcattatcaccggcatcttcccggcccgtgaaaagcaggccgatttcccggacatcagcccctccaccatcgtggacgcggctgagggactcaaggacgcttccgcaggcacgtggattcagccggtcgaggatatgtgcctggccgccaagatgatggccatgcgtgcccaccacggcgacgtgatcttcaccgtgggcgcgggcgacatcaccgacatggatcaggtgctgctcaccgcacttgaggcccatcgggaaagctgcgagtgatgtccgggcgcacggtcagatccgggggcaatgacaacggctcacgtcgttcgtccggaagtccccgcaagccgcgcaccatcggttcacgcggaaacacgggtcactcgtcgaagtctcgcgttccccggtccgtgtcttccgggcatgagatcaacgagccggagatcatcgacgatgtgacggtagccaagggccaggccggtgccttcgtcgatgcacgacggctgcacagcgaggattacgttgccgaaacgctgcaccagaccaccggctccctaggagtcgtatcacgcccgaaagtggtgaatttcaccgaacgcgccaaagaacgcaagcgtgcgaacgtacgtgtcgttgcgttacgcgtgttgattgctgtcgtcagcgtggctgtagtgacggggctaacgtggctgctgctcttctcgtcggtgttccgtctggaaaccagcgagatcggcgtatccggtgccaacgaatgggtgagcgcgcagaccatccatgccatcgccgataagcaggctggaaagtcgttgttcctggtctccacccatgaggtcacagagcaactcaagtccattcccggcgtcagcgaggccaaggtctccaaacagttccccaagtcgatgagcgtggaagtcaaggcgcaacggcctgcggccatgctgaaaagaggcgataccctgaccgcggtggattcccaggcgcgtgtgttgaactcggtgaagaacgccaacgtggatggcatcccggtgatcgaggtcaaggatatagacgccagtctcaagaaccgttcggtgaaggaggcgctggcgattctgggcgcattgccggaatcgatgcgtaagtccattaccaaggtcaccgctgagacgcaggattcggtgaccaccacgcttaacgacggtgaccgcgtaatcatttggggagactcctcgcaactgaagctgaagctggcggaagtcgaggaaatcgacaagaacatcaccgctggcacggctggctttgccggcaaacatcagattgatgtttccgcatcccagaagcccatcatcaagtgacggcgattcagttggttccgttggttccggggcggcgttcgctccgttggtcctgctgacaacgttggtcccgtcaatgccggggcgatgttcgctgccggcgatttgcgcgagtagcgccatagggtgtatgctgaaaagtccggccgaaaagccggaagcttgataactcaagattgggggcgatcggtttcgacggtgacctgttcgctgcagggaagcgtgccgagaacgccgggtccgctcgtggatgaccccggcaaaagaataagtgctaaatctaaccgcactgagttcgctctcgctgcctgatttttagtcaggattaaccagtgagcagccgctccgttcactcctccttgtctttgggaggatgctgagcgtcgtttagaagacttgctgatgcagttgagcctcagggctgcatcgggactttaactgcggatatgctcgccatcagttgtctgcgacatcgatgggggcagaaaaatcgccaacttggccagcagactacgcacgtagaagactgtgggctcggtcatcggaccggggttcaattccccgcgcctccaccaatccgcctcggcggaaacaagccgcttggctttacgaaagtaaggctgagcggcttttcttattcccgtcgattccctcgtattctctcggtttcacgggataatgtgggcaaaatgtgggcaaaaatcgagcccgcgaagccctctgccacaacgcgagaacggccacgaccggcaagtaggccgactcgggttgagtcgtctgcgatgccggacggggccgaactgtgcgtggtggtcatgcggcgaggtcgaggcgctgtttgatggcgctgacgccgatgagcgcgccggcgaggatgccgagcgcgttgagcgtggtcactatcgcgtccacgtgagtccagccccatgcggggccgaccgtactgacgaacagggcgagtgcgggcaggacgatgaggcccaaccatttgaggatgtcgtagacgcggctggggattgcgcggttggcttcgatccgacgacctgcggttttggagaccgccgctctaccagctgagctacgcgcataggcggtcatgccggttgattgccatggcacatgaccattgggtggatatgagtaaagcccctgagatgtatgtcccagaggctttcacactaatcctgatacggagtatgccacggggtggattcaccctactcccgcttgtgttttgttttttcaggcggcttggatggtgaggcgtccgccgagggcgtggattaccttggcgatggtttggaagctggggttgccgtccttgctgaggctcttgtagaggctttcgcgccccacgcccgcgtccttggcgatctgggtcatgccccgggccttggcgacgttgccgagcgcggcctgcatgagtgcggggtcgtcgtattcggctatggcgttgaggtaggcgatgatgtcctgttcgttttcgaggtattcgctggtgtcgtagtcggtgaattcggtgctcattgtcgttgttccttgtagtcgttgaggatgtcgtgggcttgtctgatgtcggtctgctgggtgtttttgtcgccgcctgcgagcagcagcatgagcacgttgccctgcatggcgaagtagacgcggtatccggccccggtgtggaaccgcatctcgctgaccgggcctcccacgggtttgatgtcgccgaatggcctgcctgcgagcttgcagacatcgagccgggcttggatggcggccttcgctttgtggtccctgagtttcttgaaccacttgcggtattcggcggattgcttgatttccatacctctattgtatcctacagactacatcatgtcaagccgaacggccgctggagcccatagccaacgcaagaatctcccgtatattgaactcccagtagccgtcatcgacgggtctcgagctggggagtttgccccggttgggccagttgctgatccgcttgcggctgacctcgtacccgtagtttcccttgagccattggctcatgcctgccggggttttggtcaggtggattgattcggcctcggcttggctttgctcgcgcagctcggccacgttgacggggtcgccgcatttgcacaggcgcagcgcctcgcccttcgcggccatcacttcgcgtccgcattcggggcagacgccgattatcctgcgggtgtgcggcctgcggtcaaccttggcagagcgtccatggtgcctcgacctgctggctgccgcagtattggcatggttcggtggtgatgactgcacacgttgtactgtagggaaccatgaaagtcgtattgcaacgagtatccgaagcgtccgtggacgtggtcaatgaattgggcacgctggatcccacgttcgagccgcagcagattggcccgggattcatgattctggtgggcgtcaccgatgaggacggcgacaagcagatcgcctggctggcccataagattctgaatctcagggtgttcgaggatgcgcagggcaagatgaaccgttcgatccaggacatcggcggcgagattctctccatctcgcagttcacgctgttcgccgacgtgcacaagggcaatcgcccgagcttcatcaaggccggcaagcccgagcatgccgatttcatgtggatcaagttcgacgaggcgttgcgctccgggggagtgccggtgaaggaaggtcgtttcggtgcgcatatgcgggtcggactggtcaatgacgggccggtgaccatcgtcatcgacaccgagcatgacatgcctgacggaacacgctgaattgcgatagtaatttgacatcatatcccgttccctccaatatgttactaaagcgctttagtcttctgcgggcgagggcgcatgtcgatatgtttcccatgaacgggcagcacaatgatgtggccgcacaagcggcagagataaggggagtgaacagcagatgttcctgaaacctgaacagcaactggagcggtgcaagcgcatagtgcgccagcgcgtggaccctcatatccacccatcgatcgcacagcttgcggtggagtcctttgacattcccggagagccgatgcccactgacgagttcttcgagaagctcaatcgaggtgacatcgacttcaagccgtttacgctcggcggtgaatggggcaccacatggggcacagtctggttccgcctgaccggtaccgtgccggccggctacccgaaaggcaagccgctggagctcatcctcgacctcggctggtacccgcactcctgcggcggccatatcgagggcctcgtctaccgtgccgacggcaccgccatcaaagccgtacacccgctcaactattgggtgccgttcatggatgctgagggcaacgcgcaagtgccggtcgccgaagacggcagcttcaccctgtacctcgaagccgccagcaacccgctgctgctcggcgtgcctccgttcattgagaccgaactgggcgaccatgccaccggcaagccggacgagccgtacgtattcaagtccgccgatctggccgaattcgatgaacgctacgagaactactccgtcgatctcgacgtggtgagctccctgatggaattcgccgacaaacagtcgccgcgctactggcaactcgccaaagcattgcagcgttcgctgaacgcctacgacgagcgcaaccccgaatctgtggaagccgcgcgcgcagcactcgccggcgtactggccaagccggccaatgcctcggccatgaacgtcagcgccatcggccacgcgcatatcgactccgcatggctgtggccggtgcgcgagacccgccgcaaggtggctcgcaccgtatccaacgcattggcgctgatggacgccgaccccgacttcaaatacgcgatgagctccgcccagcagtacgcctggctggaagaggatcatccggacatcttcaagcgcatgaagcggcgcattgaagaaggccggttcatcccggtcggcggcatgtgggtggaagccgatggcatgttgcccgccggtgagtcactgatccgccagattgcatatggccgcaaatacttcaaggaacatctcggtgtggagcccaagggcgtatggctgccggacagcttcggctacaccggcgcatggccacagatcgcccgccgtgccgggtacgaatggttcctcacgcagaagatctcgtggaacgataccaccaagttcccgcaccactcgttcatgtgggaaggcatcgacggctcgcgcatcttcacccacttcccgccggcggatacttatgctgcttggtgcaaggttcaggaactcgactacgccgagaagaacttccaggacaaggatctctccgaccgctcgcttctgctcttcggtttcggtgatggcggtggcggccccacgcgcaacatgatggagcacctgcaccgctacgagaacctcgaaggcgtctccaaggtgagcatcgaagagccgaatgacttcttcgacaaggcgcatcagcagcttgcagagaacgccggcccagaaatgcccgtctggaagggcgagctgtacctcgaactgcaccgtggcaccttgacctcgcaacaggacatgaaacgcggctgccgccaagaggaatcgctgctgcgcacggtcgaatacctgggcgcagccgccgtgttgtccgatccggagtacgtctacccgcgcgaggagctggaccgcatatggaagacgctgctgctgaaccagttccacgacatcctgcccggctcggccatcgcatgggtgcaccgcgaagcccgcgaggactatcgccgcgacctgaagcgtctcgccgaaatcgcccaagacatgtgcgccgtgctgcgcaaggccaacccgcaggccgacctgctcgccgaagcccgcatcagccagttccgtaatgacggcgtgtcttggcgtgccagccgcatcaacgaaccgaccaacgcgctttccgtactgacccagacattggacaacggccgtgtactgctggccaacggcgtactgtccgtcaccatcgaggccgacggtacaatctcgtcgctgcttgacgaggagcatggccgtgaactggttccggccggcacccgattgggccaatacgaactgttgagggacgaacccgccgtttgggatgcctgggagatcgaacgcgaatccctgctcatggcgaatgccatgaccggatcaatcgaatcggtcgataccgaaaacggtgcggcacgagtccgtgtgcgtaccgccgacgatgacaccgtcatcaccaccaccatcacgctgcgccccggttcacacacgctcgatttccacgccgacattgactggcacgagcgtgaacgcttcctcaaagtcgccttgccgctgggtatcgtggccgaccaagcaacatacgactgccagtatggtctggtccgccgcccaatcgtcaaaaacaccgcatccgacgaagccaagtatgagagcagcacgaaccgcttcgcccttatcggcgacgccggttacgcggcggccgtcatcaacggatcggtgtacgggtccgatgccgcgccgatctccgggaacgccgccgaaggtcgtgactcgggcaccatgttccgactgtcgctgctctccgcgccgaccttccccgacccgcgcaccgatatcggtgcgcatgagttcgactggtccgtggtggccaacgccacggtgggccgtgcgcttgacgccgcttgcgcactcaacgcaccgacgcttcatgacatgcccgacttagcgccgctcgcctcgatcgagtcagcaaacggcaccgtggtgttggactggataaagctggccgacgatggctccggagacctgattgtgcgcgcctatgaggcggccggcggcagggccgatgccacgctgcacgtctgcccggcgctcgcaggcgcttcggtgcatgagaccaatgtgctggaaggcgacaatctggccaccgaccttccagtcgcgctgcaagacggtaggcagaacgccgaaggcgccacactgcacttcggcccgttccagctcgccaccctgcgcatcacgcgctgaattcccgtctgatgcttctgcctcctcgaaccatgaggaggcagaagtatgtcgtattacggttttcccaattgtcaccacacccatcatttccatcagacacagcaaaggagaactctccatgtttcttctgcccaatcagcagttggagcgctgcgaccgcgtcatgcagcagcgcgtcaaaccgcatatccacaccacactcgccgcatgcaccttgcgttcgttccacaatcccggcgaaccggtgccctccagcgaatttctagccaaagtgcgcaacggacaagtgcccttcgaacctttccgcgttcccggcgtctggggcaccacatggggcaccacatggttcgaggtgaacggccatatcgacatggcggcggtcaagggccgaaaagtcgaactcatggtagacctcggctggctcgatcaccgcggccccggattccaatccgagggacttgtctatcgtgccgacggcaccgccatcaaatccgcgaacccacgcaaccactggattccactcgtctacgcggacggcagcagcactgtcgaactcgatgagcatggcgacttcaccgtctatatcgaagccgccgccaacccattcgtcgaaggccccaccccgttctcacccactgaactcggcgaagaggccaccggcacctgtgacttcccatacacactgagtcgtatggacgtcaccatcttcaacgaagacgtgttcgcctactacatggatctggaaaccgtctcctcgctgattcgtgagctcaaggacgacgacccgcgctactggcagctcgccaaagcactgcaacgctccctgaacatctacgatgaacgcgacttggaaaccgtgtcggcagcccgtgcggcgctcgccggcgtactcgccgaaccggccgcctccagcgcaatcaaacacatcgccatcggccacgcgcatatcgactccgcatggctgtggccggtgcgcgagacccgccgcaaggtggcccgtaccgtatccaacgtgctggctttgatggacgaagacccggacttcacgtatgcgatgagttccgcccaacagtacgcatggctggaagaggagcatcccgacctgttcgcacgaatgaagcggcgcatcgaagagggccgcttcatcccggtcggcggcatgtgggtggaatccgacaacatgattccttccggcgaatcattggtgcggcagatcacgttcggccgccgatatttcaaggagcatctcggcgtcgcgccgcgcggcatctggctaccggacagtttcggctacaccggctcttggccgcagatcgcccgccgtgcaggattcgactggttcctcacgcagaagatctcgtggaacgacaccaccaagttcccgcaccactcgttcatgtgggagggcatcgatggcacgcgtattctcacgcacttcccgccctccgacacctactgctcgtggatgagcatgcacgagctgatgtattcgcagcgcaacttcctggacaaggacctctcccgtaacgcgattctgctgtacggcttcggcgatggcggtggcggccccacccgtgagatgaccgcgcgcatccgccgcggccatgatctcgccggcgcgccgaagatcgaattcggtactcccgaccaactgttcgaccgtgtgcgtaaggatatcgtcgacgatgcgcaaggggagaccccggtgttcaagggcgaactgtaccttgaactgcaccgcgctaccctcaccgcccagcaggacatgaagcgcggctgccgccaggaggagtcgatgctgcgcgtcaccgaatacctgtgcgccgcggcccgcatcaagaacccggactatgtctatccgcgcgaagagctggaccgtatttggaaaacgctgctcctgaaccagttccacgacattctgcccggttcggccatcgcatgggtgcaccgtcaggcgcggaccgaatacgcgcgtgacatcgctcggctgaacgagatcgcccttgaagccgggcgcgcgatcgcagtcgtggaacccgatgacgcaaccataaccgacgccgtaatcgccccatattcccgccaagcctgtgagacgtgggtggtacgcccggcttcgagccgagccgaagcgggaaccgcatccatggctcgggtcgccgttacccatgacggcgatacgattgtgctcgacaacggccgactgcacgtgcgcattgaagccgacggcaccgtttcgtcaatcgtcgatcagcgaaccaatcgtgaactggtgcccgccggcacccgactgggccgctacgaaatgctcaaagacgaacccttccactgggacgcttgggatattcaacgcgatgcattcctcaccgccaacgcgctcagcgaggcatcgattgcaagcgtggacgaaaccgccaacggtggggccgtcgtgcatgctgtcactcgcgcgaagggcgttgaaattcgtacgggcattgtcttaaggccgggctccgccacactggacttcaccgccgatgtggactggcatgccgtcgaacagttcctcaaagtggatatgccggtcaccgtgcaagcggtgaacgcgcaatacgaatgccaatacggtctggtcgaacgccccatcaacaagaacacgcgcagcgatgatgccaaattcgaaagctgcacgcaccgcttcgtgcgtatcgccgacgccgactatgccgccgctgtggtcaacgcctccacctacggctccgacgtcagccccatccacgccgatgcggcacatggcaccggccgcggcaccatggtgcggctctcgctgctgtccgcaccgctgtaccccgacccacgcaccgaccaaggcgcacactccttcgcgtggtctctggtcgctgacgccgatatgaatgcggtgctggacgaagcggcgcgacttaacagccccgtaataggggagttgcctgatatggcgccgctggtctcgctcgccgacgccaccggcgtcatcgtattggactggatcaagctcgccgatgacggttccagcgatctgatcgtgcgcctgtacgaggccgccggcggcaatgccacggccacactgcgccttgacgccgctctctccgatgccaaggccagcgtgcaggaggtgaatctcatggaggagccggagctggatgccgaactgccgcgcgcgctcgccggtgacgaaccaatgcctgccgacggtgcgatcgtttcgttggcgccattccagctcgccacgctgcgtattcgccgataagggatattgggcctaggctcgatattttgggtcgcgcccaaccgtaacggaaccggaacagaccggctctgccatacggttgggcgcggcccattattgtatgagaagagggagagcgatcccgttgggcaaatatcaatgcgacacgcgacgatgaattcgttgcgtgcatgtttcgattgtgttatgtttttactaaaccgatttagttaacaggttcgcgactggccggaagctaaaacggtttagtctcagcgatgagaactgaataaaggttgtgataccacgtcaatcaccgcgacgggtgactgtgctggagcacaacgactagtttttctccgtccacagcagggcggggtgaaaaaggaaccaaaaggaaaggaaaacatcatgttttctatgaagaagatcctcgccatcgccggtgccggtgcgatgctcgtatcggtggctgcctgtggtagcggaactgcgggggatgacggcggcaagaaggagatctccttccagacctggaacctcaagaacgacaagtacaccccgtatttcgaggcgctgatcaaggcctatgagaaggaccacccggatgtcaccgtcaagtggcttgacgccccgtccgatggttacgaagacaagctgtccagccaggctgcggccggcgaactgccggacatcgtcgacggcggcaactccatcctgtacggtcttgccaaggccggcgcgctgctcgatgtctccaagcaggctccggatgcggaaaaggactactacgaaggcgcatggaagtccgtgaccatgcagggcaatggcatcgagaagggtgcctacggcctgccgtggtatgtcaacgatggcccgacctactggaacaccgagctcatgcagaagtgcggccttgatccgaacaagattccgaccacatgggatgagtacttcgccgccggcgacaccatcgtgcagaactgcaaggatgtctacctgggcaccacgatgggttacaacaccgaagatctgatgaccgcaggcgtcaagtccttcatgaacgatgaccacagcaagtacaccttcaatgatgaggccggtgtcaagcagatcagccgcttcgttgagctgtacaagaagggcggcatcccgccggaggccctcgactcctcctggagccaggccgccgatctcttccagcgtggcaacctggtctccatggccggctccgcctactccgctgacggcttcaagcagaacgctccggacctttacaagaacctcgcagtcggcccgcgtatcagcaacgacggcaagtccgcttccgtggcctacgagatgctcggcatcagcgccaactcgaagcaccccgacgttgccattgacttcgcccgattcgtgaccaacgagaagaaccagatcgagttcgacaagaaggcctccgtgttcccgtccgccaaggggggtctggatgacgactactacaagagcatcgacgaaagcacccttgagggcaaggctctgaagatcacgctcgaccaggtcaaggacggctacggctctcgtccgtccgagttcaccgacaacaacggctccaagaacttccagcagcagatcgccctcgctatgcagggcaagcagaccgccaaggaagcccttgacaagtccgtcgagttcgcaaacgagaagctcgcacagtgagcaacgcggcactcgccgctgacaggtcggaggcccgcacggcctccgaccggcctgaaccgatgaacctcaaccacggcaagaagcagaatcgtagcttcggcaccatcattgccccctacctgtttgttctgccagcgttcgcgattgtgtttgtattcatcgtccttgcggcactcaacactttcaggcttgctttcaccaactccacactgctccgtccgggaaccttcgtcggactcgaaaacttcatcaaactgttccatgacgagtacttcctcacggcactgctgaactccacactctacgtgatctgcgtagtgccgttcatggtgatcctcccgttgatcctggcctatctggtcaagggcaactcccgcatcatgggcttcttccgcaccgccttctacatgccggtggttatgtccgccgttgtggtgggtatgatctggaccaacctgctggattccgccggtctggtcaactccgtgctcaaggcattgaagatcatctccaagccggttccattcctcaccgatcgatggggcgtgctcttcagctcgatgttcgtgacaatctggctgggcctcggctactacatggtcatctacctgaccgccctcgccaacatcgatgaatccctttacgaagccgcctccctcgacggcgctggccctgtccgccagttcatctacgtgacaatgcccggcgtgcgctccacgatgatgctcatcatgatgctgtccaccatcgccgcattccgagtcttcaacgaaatctacgtgttgaccaacggctccgcaggccccggcggcatggatatgacgatgtcgatgcttatcaagcgcgaaggcaccggtatccaggcccgcactggttacgcgagcgccatctccatcgtcgtgctcgtcatcgtcggcgtcatgctcatcgtgcagcagatcgtacaaaagcgaggtgaggactgatgaataccaacacgcataaggtcaccgtcggcaaagtcgtccagtatctgattctgattctgatgttcctgctgctcgtcggcccgttcgtctgggaactgtccctgtcgttcaagggcaagggcgacaacgtctacgccgtgcctccctacctgatgccgaagaccccgacgctggacaactacatttccgtgttcaagcaggtcccggtattccactacatgctcaacacgctggtggtctgcctgatctccatcttcggcaacgtggtcttctccacgatggccggctacgcactgggacgcctgaagtggcgtggccgcggactggtgttcaccatgttcatgggcaccatggtcatcccgatcgaaggcgtgatgatctcccagttcctgatcattcgctccatccacctgcagaacacactgctggcagtcgcactgcctggcctgtgcggcgccatcaacatcctgctcatgaccaacgccttcaaatccattccaatggaactcgaagaggcggccatggtggacggtgccaacctatggcagcggttcttccacatctgtgtaccgcaggtcaaaggcacgatgaccgttgtcggcatcttcgcattcgtcggtgcctggaacgacttcctgtggccgttgatcgcgatctccgatgaaagcaagtacaccttgaccctcggcatgaaccgactcaagggcatgttcatccaagatccgcgactgatcgccgccggtgcgctcgtctcgcttatcccgatcatcgtcttcttctgctgcttccagcgctacttcttccgtggcctggaacagggtggactcaagggctgagcggactggaaaaaggaggtactccaatgaaattcggagtcaactacacgccgtcgcatggctggttccacgcatggctcgacccggactgggacggcatcgacaatgatctcaagcagatcagcgaactgggtatggaccatgtgcgcatcttcccgatctggccgtatctgcaacctaatcgcacctggatcaacaagaagggcgtggcggatgtgcgccgcatggtgcacatcgccggcgagcacggtttggatgcctatgtggacgtgttccaagggcatctgtccagcttcgacttcctgccttcatggctggtcacctggcatgcgggcaacatgttcaccgatgcggacgccgttgcggccgagcgtgaactggtcaagaccatgaccgatgagctgtccaaggaacccgcgttcaagggtctgaccttgggcaacgaggtcaatcagctgtctgacaggccgcatcccacgaagatgagcgccacggaccggcagatcgacgcatggctggacgcgctgcttccgaccgccgccggtgaagggcacaacgcgctgtacagcgtcaacgatggcacctggttcatcgatgggcacccgttcactccggtgcagtccgccaccaagggtgatatgacagtgattcactcctgggtgttcaacggcatcgcgcaaggatacggcgccaccagtgaggagtgctcgtcgtacgcactgtacctggccgagctggccaaggcgttcggcaaggattccgagcgcccggtgtggctccaggaagtcggtgcgccggagaatgtgctggaaaccgactacacgccggaattctgccgcaagaccgttgaacgtgccatggattgccggaacctgtggggtgtgacgtggtggtgctcgcacgatgtgcccgccagcatggaagacttcccgttcttcgagcactctctgggcttgttcgacgagcaaggccagctgaagccgatcggccgtacgttcggggaactcgccgcacagtaccgttccgcattgccggctcagccgaagaccgtcgccgtggtgattgatgtggatgaggccggaaacccggtgaaccgcagtgcgctcggcccgggaggctcggtgtgcgacctgtggatgaagttgcaggtggcgggccagcgcccgaccatcatcacctcgcaggtggcggccaatcaagaggcgctcgcgcagcgtggcattctggaattgcacgctgacgaacacccctatgccgcccgttactacactgcggtttcggacccatcgttcgaaacggctgattaaaccgatatccggttgtggaatcatctactccttgttccacaaccggatattttcaattgcagtgcgcacaattgcagtgcgcagggcaaaacataagatccggtactcgccgaagagcgagaagaacgagaagacaatatatgagaagggggagcgctcaatgagcatcaactgcgccgcagtggaccgactcattgattcgatgagcttcacgcagaaagttggccagttgaaccagcgtctgctcggttggaagtccgtggaacgcaatgctgcgggacggctggtggcctcggacgagctcaagcaggagattgaccgatggggtggactcggcaccctgtacggtctattgcgagccgacccatggtctggtcaacattggggtaacggcatacgccctgaggagcggactgaggcgattgccgtggtgcagcaaactgtgctggaacgtggcgcgcacggcatcggcgtattacttagcgaagaggcgcctcacgggcatcaggcgctgggcggcacggtgctgcccaccaatctgggtttgggcgctacgtttgacccgcagggggtgcaggaagcggaagccgcggttgccgcagaactggccgccagcggcattcatatcgcattggtatccggtttggacatcgcccgtgacccacgctggggccgttgcgaggaatgcttcggtgaggatccgctgatggctgcccgcatgtgcgaggccatcgttaccggcatgcagggtgagcatcgcagcaaggttggccacgggggagtggccgtggtgctcaagcatctggcggcgcaaggcgaggccgtgggcggccgcaacggacagtccgccgtactgggcccgcacgatcttcatgaaattcatctgccgccggtggccgccggtgtgcgcgccggtgccttgggctttatggcagcctacaacgatatcgattctgtaccttgctgcgccaacccgtggctgctcaaggattatctgcgcgaccagctcggtttcgacggcatcgtgatggccgatggcctggccgtggatcggctcgaagacatggccggctccattcccgcggcagggcgtgccgcactgctcgccggcgtggacgtctccctgtgggatgaaggattcacccgcctcgaagaatatgcggatgacgaacaggtagtggccgctgtcgacacggccttgcgccgggtgctggaactcaaagccatgttcggtctcttgcccgaagacggtgccgatcccgccgcaattgccatgccgagcgccgacgccatcgcgcaggccactgcggatgggcgtgagcaggccaagcgcatggcccgcgaggcgataacgctgatcaatgatggccagtctgccgccacgctcgacgatatccgcagcgtcatagctgatgctcaagccggccctgtgattgtcgccggcccgttcgccgacgatttcggctgcttcctgggcgattacaccgcccctctgcccgccgatgaacagtcaagcgtctaccggcaattggtggcacgtctcggggaggaccgggttctcttggccgccaagccgagcgatgcgccggccgatcaatgggcgcgtgcgtcgaccgtggtattcgtatgcggcagcaccagcgaacgcagctatgacagtgaattcgacgacaatggcgcggcgaaggccgtaaccgaatacggtgccacctgcggtgaaggcgtggacctgtctgacatccgtctgccttggcaccaggatgaaatgctggacgaagtcgtggcattgaccaccgctccagttgtttcggtggcggtgtgcggcagggcgcatgtgctgactcatgtaatgggtcaatccgctgtgacgatttgggccggatatgctggccagtatggtccgcaggccgtggctgatgtgctgattgacggtgccggtttgccgggctgccttcctgtaacgctgcctgcgcatcccgcagccattccggttcgatacaacgaccggcaaagtgccgcccatgtatacaaggatgcggcggaaccggtattgcgcgagtttggctacggagccggttctttggctggagtgacgtttagtgggatgcatgccgatgccgaatcccgcacgaatgaggtgttggtgcaggtgacagcatatgccggcgaccataagacggccggttcggtgaacctcttcgcacacgtcagtggcggtcgtcgtatcccacgtttggcagtgctggtcgattccgttgctctgacgcttgaggcgggcgaaagccacgcggtatcgttctcggtaccctttgaacggctgatggacgaagctgatgacaatgtgcgtgtgacgtttgccctgacagccgctttgaatagcgatgatacccgacatacagacgactgcgataccagcgtaagcatcgtgatacatcgctgacgatgtgcatgagacaagtcggagaggggtatgttccgtaagtctcatgacctactcattgcggccgatatggtcggcgggtgagagaaaaagagaatgtgggatatggcgttggtgagatatcgccgtatcccgtggctcaaaccgtcctaccggtttgagccaccgtctacgcaagccgcatagacggttgatttccggcgtgagtcggaggaaatcaaaggagattatagatgagattgtcatcaggcgatcccgctgggcgtgcttctgcttggactcaacacaggaaatggctgcggactggcttggccgcggtgctgtcgatggccacgctggcggcactggctgcaccggcaagcgctaccgacaccatgccgtggggaggccagtatgccgataccagtcatccggagcaggctgcgggagccaaccagccgtatcagcatggttacaccggtctagatattctgaactggaatccggcagtggataaggattcggagtacctgcgttcccgcgtgccgttgcagacccgcatcgccgccaacgccgcgacgcagaaggacccgaaccttccggccgatacggagatgttcaaccttgccggcgactatggcaacgcgttctttgagtcgttccatgacaacaatgtgttctcgcagtacctgttcaactactggcagtacacggattattacggcacctggcatggccagccgaccgcgaacgtgccgaagagcctctacgatgagaaggcccagtctgattggactcagaaatggtttgaattcggtacgctgaacttgccaaatgcagcgtacacgaacgccgcgcataagaatggcgcgaagtcgattgcgacgattttctactcgggcaacgaccgtggtgaacagacctataaggatttgcttcaaggcaagcgtgccgatggcacctatccggtggccgacaagttggtggaaattgccaagtactacggctttgatggttacttcgtcaatcaggaatccaatgtaaactccgatgatgttccagcctatcgggatttcatgaagcagatcgtcaatcagggcatttacatccagtggtatgactctgcaacatacccgggtggtaatatcggctaccagaacagatttaacgagaaaaactcaccgtgggtgcaagatggggccgagggcaaaatctccgattcgatcttcctgaactactggttcagcggaaacatgctgaaagattcggccgaccacgctaagagccttggcattgatccgaagtatgcggtgttcgcaggcatcgaggccggacagcagaaattcggcagtatcggtagcaacgcggattatatgaacgtcaaccttgatgctgacggtaaaccgtatgtgagccttgccgcgctcggcaccgacttcgtctcccatgagctgggtgacgacaagaaggtctatccgaagtatcaaaaccaggtgttcgaccgtgaacgtcgcttgtggactggttcatccaccggagagaagggcacgacggatatctctgatccgtatatcgatgatggtacgagcagcgacggctggaagggcttcgcctcacagatcgccgaacgctccgtcatcggtggcccggtcttctccacggcattcaacaccggtcacggtcttgaatggcgggacaatggcgaacagaccagcaaccagcagtggggcaacatcaacctgcaagacattctgccgacttggcagtggtggattgatgccgattccgacccgctgcaagccgacttcgactatggcaaggactatgagacggcaccgcgcttcaactacaccaaggtcggcggctacgaaggcggcgattcgctggtgctgagcggcaagctctccagcgacaacaccgtccgtctctacaagaccgacttgagcgtcactgccggctccaagatcgaattgacctacaacaagctcaacagtgacgattccaagctgcaactcggcctcatcttcgccgacgacaccaataccgtagtgccggtggacgtggcggatggcgcggcgagcaacggctggaagaccgcaaccgtagacctctcccagtacgcgggcaagaaaatcgctacgctgggcctgatcgtcaaggccggagcgaacccgatcgacaactaccaggtgaacatcggcaagattaccgtcaccgacggtgctgcctacacgccggccgccccgaccggcttcaaggtcgagcgcgcctacgcggattccgacgaattgaccgtcaagtgggatctcgccgactacgccaccaccaagaactacctgctgtacttggacaacaccttcctcggtggccgctacgacgacaccctgtacgtcaagcacctgcctgccaagaccggcacgctgaagttgtacgccgtgggcgcggacggttcgcgctcgatggctgccgaagcgccgctgaacgaagcggcggccgtgtccagcgtgaaggttgagcccggcaaggacggtaacgtcaaggtctcctggaccaacccgcaggtctccggcgagaaaaccgtaaccgttaagtccgacaccggttcgtggcgttacgccggtcagccatactcccagaccgtcaaggtcgctgccgacaagagcgacgtgacgattccgaatgcgccggttgacggttcccgttatgtggtgactgtcgacaacgcaggtggcgctaccaccacggcagcaggtgcattcgccgatgccaccatcgagccatacccggcttgctcagtgacgtggaatggcgacaatgtgtcgctgattcgccccgagactcaggattggcgttacctctacatgaccgagaagtggaccgacgagaacggtaaaaagcaggagaagcagctgggtgccaagtacacctattcgcagaacactccgccgattaccggcattattcgtggccgcaccactccggagtcgtacaccaagtccattcccgacggccatgaactgtgggtgcaggtcgaggactacagcggcaacaagaccgatccggtcaagattccgacctctgacgaactcgccaagtgcacggtcaccgacccgactcagccggatgccaagaagtccacgctgaccgccgttgacggctcagccgtggccgatggcaaggacacgcgcacggttcaggcaacggtcaaggattcgttcggcaatccgctgaccaacgccgaggtggcgtttacgctgcccgagggtgtcacggccgttgacggcaacgccactgtcaagactgatgccgctggcgtggcttcactgaacgtcgtgtccacgaaggtgggcaagtacacggtgaaggccgcactgggcgacaagtccatcggtgagggtgtcaccatcgaattcaccaaggtcgcggcgaccccgaacaagcccggcgaccagaacaagcctggcgataccaagccgaacaagcccagccagaacgacaacaagaacaatgacaagaatggcgcttcgttgagtgccacgggttcgtcggtcattgcgattgtggcggccatggtggtgctgcttggcgcgggtgcggtggtacttcgcgctcgtagcaagacagagtagttcgtcgcaatacgggtgttgatactcgtgccataagcgggatttaggagttgcccaatgggtgcccccctaaatcccgtttgttttgtcgcaagacatatgccgagaccagtgactaaaatgctttagttatttgactaaaattatagatatcataagagttagcgcacggttgatgcatatggcccaatgcgggggtgccgtcaaccgtatcgcaatagtcgcaatgcggtcgtaaaaaggagtgttcatgagatctgctcgcgaggcatcgtcatcgtctgacggcacgcagcgtgtgagcctgaaagacatcgcagatgaattaggcatctcgcagaccgcggtatccttcgccatcaatgatcggcccggcgtttccgcggaaaccaaacgtcgggtcaaagaggctgcagccaggctcggctggacgccggtctacgccgcacaagcactgggatcctcgaagaccatgaccataggctttgcccccgcacgatccacgcaggggctcacggatgaaagcttcatgctgcacttcatggcgggtgtgcacgcctcgctcagccccaaaggctatggtttgctgtaccgcccatgccgattcctgaacgaggagatgagcgtatacaaggattgggcgtcgcgcaagcgcgtggatggcgttatcctcgtcgatttgcgagccgatgatccacgcccggaattgttgaagaatctgggtgtgcgcgcagtgcttgccggaggacccgacccgaacaattatgtgccgtcactgtccatcgatgattcacgcacgatgggaaccgtgctcgaacatttgtcgtcattgggacaccgccgaatcgcctatctttccggcgatccgaacctggattattcacaggggcgtgtcgcggcgttccgcgcatttgccaaacggcgaaagctggaatccatcaacatcgaattcaccgattttgttgcggaacaggccgcgatgctcacgttggagatgctgcattcaccgaagccgcctaccgcgttcatctatgaaacggagatcctcgccgcggccagtcttcacgccatggccgaagattattccgctcggcagatggaggcgggggagggccatgcggaagtctatccgaatgggctgcccgccattgtcagttttgaagacagtttcatttgtgaggcggcgtatccgtcaattaccgccgcgcatcgtgatgccagcgaatacggtgccaaagtggccaaactgctgctcaaagtgcttgccggagagcaggtgagcggcaaccggcgaatcctcaccccgaaactggtgattcgggacagcaccgccaagcccatggataccatggcgtagaacggtcattgcatcggcttgcagacaatgacatgcgaccagtacggcgttggcccccttattccacgggggccaacgccgttgagaaagaggaagaaaaaaggatatagaggcttagatgctgtcgattattcagcgttcttcacggccgtcgcaatggacacggccgggtccaagaacggaatcagcgtggactggaaggcgtggtacagatcggacttgcccggccagaccgtgccgatcacatggttgttcttgtcaagctgatggaaccaggaaccgccctcgtggtcgatgacatgctcatcgacatactgggcgaatgtggcgtaccagttggcgtacatctcctcgccggtggccgcatacagcgtggcggaagtgttcaacgattcggccagcgtccaatgcatgcgatcggtgaccacgggcttgccgttccagtcggtcgtgtaggcgagtcccacggtgccgtcggcgttccatgcgtcggccacggcacgcgcgaacagatgctcggcggcgtcgacgtacggctgtgcgccgtcaaggttggcgaaggagcttaacgcccactgcgtgatcaagcgggcccattcgatgccgtgacccggcgtggcgccgtacggcttgaactgatcatccttcttgtcgacgttgcattcgaggtccagcgaccaatcggacttgaaatgttcggggatgcgccactcgttgtgcttcgcccagccgatcacatggtcgatgatgcggccggcgcggacgcgataggtgttgttcccggtggcgtcggccacggccaagaacgcctcggtggtatgcatgttggcgttgagaccacggtacgggtcgagctcggtgaattcggtgttccaagtatcgacggccaaaccgatttcgtcatcccagaaatgcttgtcatacgtggcaagcgcctcatcaagcagttccttggcacccggacgtccggccagcagggcagaggatgcggcgagtatcacgaaggcatgcgcatagcagaccttgcccggagcatgggtgccgtccgcgaacacctgcgggtaccagccgccgtgctcgtcgtcatgaagaatgccggtcaatcccttgagcgccgcgtcggccagctccccggcgcccggatatccgagcatgtcgccaatcgaatacacatgggccatacggctggtgatccacgtttcgacgccgtgggatgggtcaagggtgccgtcggcgttcagccagccggaaccgccgttcggcgctgggaagcctttgccgaacttcagcagctcataggtttcggaagccatgaaaatgcggttggcttcggtgccgagtgcataacgtgggttattggtcataatgattgttcctttccttaacaagaacatgcggtgggtgcgcaatgagtatgcggtgggcacgtcttagtgcttcacacgaatgtcgaaatagtccatgaccagttcacaaaacatcatattcgaccagctgaaccattcgcgcgtgtacttggtcggatcatccacgtcgatgccttcgtgcatgagatgtgtaccggcgtcggtggctacaagacggtcgaggatatgcgccttgaagtccttgctgtcgctggtcatcgcctcgatagacagcgcgatcggccacacatagcgcggcggggtgtgcggtgagccgatgcccttgagatactcgccctcgtaatagtacgggttttcgtcgctgagcagcgtgcgtcgggtcgccagatacgtcggatcgtccggtgcgcagtaccccaagtaaggggccgccatcaaggagggcacattgctgtcgtccatgatattgacgtgacccaggccgtcggtctcgaacgcgtaaatcgtctcgccattgcggttcgtcgttttggcgtgggcttcgatgccttcggtgatggtgcggcgcagctcgccggcacgggcggcgatatcggcgtcatccagaatctcaccgccgaagatgcgttccagatagcccatcaccacggcggcgaacatgttcgagggcaccagatagtggtaggtgcaggcgtcgtcgctggggcggaagccggaccaggtcatgccggtgtacgccaccggcgaccccttgccgtcattgctcagcgattcggtggggatgtccgtgtcgcggatgaagaaatacggggagcgttcatgatgctgctcggtctcgaagacgtcaagaatcttcttgacgccggcaatgaattcggcatcgaagtgatcggcgttgccggtgttcgcatacagcatccaagccaactggatggggtagcacagcgaatccacctcgtacttgcgctcccaaagccaagggctggagaaatcggaccggtcgtccttgtcccaggaggcgccgttcggttcctcgttgaaggcattcgcatacgggtcgatgatgatgtagcggaactgttgccgtatcagaccggcgatcaggttcgcaatatcgctgtcttcggcggcaagggccagatacgggcgcaattgcgcggtcgaatcacgcagccacatggccgggatatcgccggtaagcaggaatgtggtgccgtcgtcatgccgtttgaccgtggtggtcagggtgtcggcaaagcaggcattgaagttctcggcccaggcggcgtgttcggtgccacacaggtccgtgatgtgctgcatgaaatccgagaccgacttcggtatcgcggtggtcgtcataaattcaacttctttgtttgagggatatacatatcaagggaacagcattattctaaaccgctttagttcatgacacgcgaaaggatgtgaagagcatgagtgtgagcgcaccatatgaaaaaccggtgagatttcctgttcggagaatctcaccggttgcgatcagtcgattcgtgaagtcgcacgaatggcggataaggggatggatggattacttgccgatttcagccagatagtcgggcatctcggccgggtactgcggccaggcaccggcctgggtgcagacgtaggcggcggtgttgacggccttgcggtgggcttctgccagcgtgtcgcccagcaggatgcgggcggtgaaggtgccggagaaggagtcacccgcgcccacggtgtcgttcacctcgacgtgcggagtgtccagcgtggaggcctcgcccttgcgggagatgatggtggagtaggcggagccggcggtcagaatcacgtagtcaaggccgaattcctcgatgaaccagcgggaggcgtcttcgccggaggtgccgcggatgtcgaacatgtcgcgcagcagcaggagttcctcgtcgttgatcttgaagacggtggccgccttgaggagttcctcgatgaggtccttggagtagtggtcgccacgcaggttgatgtcgaagaacttcatcgcgcccggcttggtgtgcttgagcagctccgtgatggtggcgtgcgattcgggggagcgcagggccagggtgccgaagcagacggcgtcagccttggagaccacgtcgatgagctggcgggtgtacaggatgtggtcccaagccacgcccttgacgatggtgtactccgggatgccgttcttcagcgcgacctcgacggtggaggtcggccaggcgttgcgctggatgacggtgttgatgccggcctcgttggccttggcaatcagttcgtcgccgagctcatcctcgccgaccgcgctgatagcccagccttcggtgccgttcttcatcgcgtggtaggcgaagttgacgggggcgccgccggctcgcttgccgctcggcagcatatcccacagcagttcaccgaggctcagaacgatcggggtagtcatggttggtttcctttcctttgtttcttttaccgggtgtttcgtatggaacatcttgtgatgtcggcgcttggtttaggagacgtcgaagaacaccgaggggtgttcgaggaattgggtcaccgccactgctgcggcaccggagaccgccgcgtcggcggacagggtggataggctgatggaagtggaggcattgatttcggggatggcccgttcggccaccgtggcgcgcacctcatcgagcagtatcgggccggcttcggacacgatgtcgccgatgatgatgtgctcaggattgtatccattgaagatggtgacgcatccgtagccgacgtatcgggcgacttcgcggacaatggcgattgacgcttcgtcgccgtcgccggctttggcgaacagggcgcgggcggcttcggtgtgggtcatatcggccgcgccgggaaccacggtgccatcggcgatgagcatgtcgtgaatggcgggggtggagcagtagcgttcaaggcagccgacgttgccgcaatcgcaggggcggccgttgacgtcgatggagatgtgtccgatttcggtggcggcaccgaggaagccgttgatgagacgaccgttgtcgatgacgccgaggcccacgccttcgccgaccagataataggcgaggttgccgtcggcgtgcaccgacgggtcgaagagataatgtgcgagggctccggcgcgggcgtcctgttcgatgaacacaggcacgcggaaagcggtggcgaattcgtcgatgaagttgattttgcgccagccctgcatgctggacaccacggcggtgcggcctacgttacgcaggtaggggccgggcaccgccatgccgatggccacaatggacgggtcgttgtcaagcagttgttcgacgcgctggtggatggtgacgatggtgtcgttgatggtgttgtcgtacaccgtgggcaggttttcaaagctcagggtgttgccacacaggtcgaacacgccgatctgcaccagcgagcgggcgaatttgatgccgatgatgcggaaccgcgtggtgtcgagtttgagaccgatggaacggcggttcttggaaccttccaaatcgccggtctcttcaatcatgccggcctcgataaggcgtgcggtgattttggtgatggccgcgggggtgagttccagtgccttggcgatttgcgcgcgggagctgatgccgttgtgatacaggtgcttgacgatgcgggagcggttggattcggagacactggcttgggaagtggcatgggtggtgtttgttgccatcggtcttaagtcctccttgtctgcaccgttgcgagttgttccgctcgtctttgaatctgaacttgattaagatattaacgctgttaattgattgacgcaatcaatatgtcattcggtgtgtcgtgcatgtgagtgtcgtcttgggggaatttgttaagatggttgtcaatagtcggatgcacactgatatcaagcgaaacgttcgatgaagaacaggggaggactgatgtctgaaaacactatgaacaatctcaaaatcggtgttgacgtgggcggaacaaaaatcgaagctgtgctggttgacgcaatgggcacggtattgggttccgcccgtattcccgccaggcatggcaacgatgccgtgatcgaagacatcgtcgctgtggcacatcaggcagcgggtgagcgttttgacgaggtgagggccatcggtgtcggtaccccgggcacggtggattcggccagcgggcatgtgggcaatatcgtgaatctcgacgtggtctcgctggatatggggccgttggtctcgcagcgttcgggcgtgccggcccatgtggaaaacgacgtcaatgccgccgccgtcggcgcggccaccgtattgggcggtgcggacggcatggccggtaccattgcgttcctgaacttcggcaccggactggctgcgggcatcgtcgaaaacggcgtgctgatgcatggctatagcggcgcggccggcgaaatcggccatatcccaatcgaacctcatcgcctcaagtgcccttgcgggcaatacggatgcttggaaacagtctgctcgggcgcatccgtggggcgtctgtggcccaacgccgacccgccgatgcccgacctgattcgtcgcgcgaaaaagcgggaggccaaggccgtcgatgtgctggacatggtagtgcgcgccatcggcgacaccatacaaatcctggctcagtccgttgatccgcgactcatcatcttgggcggtggcatggccaaaaccggcgaaccattggtcgaggtgatcacggctgagctgcgccggcgcgaatcgcaatgccgattcctcgaaacgctggacctgccggcccggctgcgtctggcacctgtcggccaaccagtcggagccatcggtgccgccatggcggcgtagcctggcatagtgccggggcatgggagatgaggcctcagatttgtctccgaggccccatctcccgcgcagtcctatatcgctttatgtcgtgctgtgccgcgcttggtcttgcgcgtttcgttgccggggtgaccggcttttatttggccaagtgttggaagaccacggcgatggcctcgccctgtacggtgatgtcaggtccgcattcgcagcgccggattaccgtgtgtttgtggaaggacgaggatgtggcggcatccagatattgctgggccgcgccgatgaacgtcgcgttgatgatgttcggctggccatagacgcatacgtctgccatatccaaaaggcccacaggcatggccagggcttggccaagatagcggcccgcccgagcaaggataccctgatgctgctccacgtctgctgcgctgagttgcttcttcaatgcggttccggaaatcatcgtctccaagcaaccgtgcttgccgcaagggcacagcggcccgtcaagatcgatggaaatatggccgagctcgccagccgcgtgcagttcgccgattaccggcgtgtccgagagcagaatcgccgaaccgatgcctctttcgatgcgcacgaaaagcatattcggcccgccttggccaaagaaacgttcggtgagcatggctgcggtggcgtcgttgctgacgtttacttcaagtccgaaatgttcggcgattggcgtggacaggtcgagattgttccagccgcgcatcgtggaggagcggaccacgccgttgtctaccacgccgggggaggcgactccgatgccgatgacctcgccatcggacatgcccagcatcttctcaatgagctcgatgatcacatccacggaaacgaatgagccggtgttcagggtgacttcggcgtgacgcagcggctggccgagcagattggtgactgcgccgtgcagcaggtgctcctgcgtcaggtcgatgctgatgatgcgcagtcgatcgatatcgatgctcagcagtgtgcctcgtttgcctttgccgccgctgggtgcctgaccggtctcgcgcagcaatccttcctccagcatccgaccgaccacatcggaaacggccacgcggctcaatccggtgcgtcggccgagctcggcgcgcgaatactggttggtggggaacaacaacctgaagataagttggcggttcttgcggcgcacatcggcgggggaagccttggccgcatggtcgtcggtcgttgtgttgagaccgagatatgacatgtttcctcctacctgatggtgagcgagtggacggcgattgttgttccatacacagcttagacggtgaagcgcaatttcgtcgttgaaactgttatgaaacttcactaataaattccagtgtacctgtgtgaagcgtcaggaaacaccgtgagtgttcatgaggtccaaaattgttactatcattaacaaatagcgaatcaccaatcggcgctacgccgaacggtggttggaacgccgcgcggcacccggacgtgacaaggatgttgccattatccgcaagacgggcggcggtacagcgactcgcatcgggcgggccgcacggaactggaggaaaccgatgccggaaatcatcattgtcaagaacgaagccgaggccggtgagatctatggccgttgtgtggctgacctgatcaaagcaaagccgaatgcggtgctgggcctggccactggctccagcccgctggccgcctatcaggcgctcgccaagatcgtgcatgacgagtcaatcgacgtctcccaagtgagtggctatgcgcttgacgaatacattggactgccgctgacccatcccgagtcctatcatgcgaccatccatcgcactgtggtcgagccgcttggcctggacccggccaaggtccatgtgcccggtgacatactcaatggcactccgctcgaagatggcgacaaagtcgcgctggccggcccggcctatgatcatgccatcgaagccgctggcggcatcgacgtgcagatcctcggcatcggcaccgacggccacgtcggcttcaacgagcccggttcctcgttggcctccggcactcgcgtcaagaccttggccgaacagacccgcgtcgacaacgcgcgcttcttcgacaacgacatcaaccaagtgcccacccactgcatcacgcagggtattggcacgatcatgaaggcccgtcacctcgtgctgctggcgttcggtgccggcaaggccgaagccatcgaggagacggtggaaggcggcgtgtccgcgttctgcccggcttccgcgctgcagatgcacccgcacgccacgattatcgtggatgaggaggccgcctctcgtctgcgccacaaggactactatcgctacgcctacacccacaagccggcctggcagggcatctgagttatcgtgtgctggcttccctctttgtgtgaggggagctgtcgaatgtaatgagactgagggtggttatcggcggcggcatatgtgtattgcttcccgattggaccaccctcagtctcgtttcgcgagccagctcccgttggcgggagcgcatgagcggtaaggagaacaacatgtctgataggaacgagatagtctcgcgcgtgaccgcggcactggagggcaagccggctccggtggcgattcgcaacgcgcgcaaggtggatgcgtgcggcgaacggcgcggatattgggtcgtctccgatgccgccggcgtcatcgtggcggccggcacgggggaggaggccttcgagcactactgccgcacggtggggctcgacccggccgatcgcaacgcggtcatcgacgccgaaggccgtattctgacccccggctacgtggacatccacgcgcacggcgcatgggtgaagagcttcgatgacgggtcggatggcatcgatgtggcgcgggccggccacgccgtgcacggcaccacgcgccaggtgctctcgctgatcaccaatccggtggatgtgatctgccggaacatccgcaccgtccgcgccaagatggagtccggccgccccgacatcctaggctgtcatctggaaggtccgttcctggctctggcccgcaagggcgcgcatgacccggaatgtctcaaggatccggtacccgacatcgtcgacgacatgcttgaggcttcaggcgcggcgaacggcaagattggctgcatccgccagatcaccatcgcccccgaactaccccacggcatctccgccatccgccagttcgccgctgccggcgtggtgccggccgtgggccactgcgacgccgactacgagaccgccaaagccggcttcgacgcgggcgcgggcatcatgacccacatgttcaacgcgatgaacggcctgcaccaccgcgagcccggtccgattccggccgcggtggaggatccgcgcgtcaccatcgagctcatcaacgacggatttcacgtgcaggatccgatggtgagcctctccttccggttcgcgcctcatcgtacggccttcgtaaccgatgcaatggccgcgaccgactgcccggacggtgcctacaagttgggtgcactggacgtgaacgtggtcgacgggcatgcgcgtttggtttccaacggcgccatcgccggctccactctgctgctggaggtcgccgtgcgccgtgcggtgtgcgaactgggcttgagcccggtggacgcggtcgaggccgccacattgacgccggccaaggcgttcggcttcgaccggccgaacccggtcaccggggtgcctatcggcctcatcgcccccggcttcgccgccgatttcaaccttgccgatccgaccgattggacggtcgaacaggtgtggtgcgc

SEQ ID NO: 3122 - DNA, 69400 bp, Unknown
  R215_18m  MAG No. k141_25826
attgacgccggccaaggcgttcggcttcgaccggccgaacccggtcaccggggtgcctatcggcctcatcgcccccggcttcgccgccgatttcaaccttgccgatccgaccgattggacggtcgaacaggtgtggtgcgcgggccgcaagctcaagtagcagtaggccgaccggttgacgaatggaaagcattcgtctacaagcatgttcaaatggtgacatgatagcatgttcatctcaccatttgaacgttattcacgtcgtaatacaagaatccgtaatactgctcgataccgcataaaaccggccatggtcgccacaagcgaaacataagtcgatggctgtggaaacgcaggagtaacacatcctcaccatagtcaggcggtaatccacgcccgcagtgatggcgtggaaacaagttatgagagaggattcctgttgaattccaagaagattctggccgccgccgtctccgtggccgccatcgcatccctgaccgcctgcggcggtgtgaaggatgacaccaccgcaggcgccgattccggcaacgccatcaccatcggcaccaccgataagatcaccagcctggaccccgccggctcctacgacaacggctcctacgccgtgcagatccaggtgttcccgttcctgtatgcccaggactacaacacctccgagctgagcccggacatcgccgccgatgacggtacctggaacgatgacggcaccgaattcaccgtcaagctcaaagacggcctgaagtttgccaacggcaacgacctgaccgcttccgacgtcaagttctcctacgaccgcatcaagaagatcaacgacccgaacggcccgagctccctgctcgccaacgtcgaatccgtgaccgctaaggacgacaccaccgtggtgttcaaggattccgtgcctttcgacgtgactttgaagcaggtcatgtccagccccgccggcccgatcgtcgatgaggataccttcgacgccgacaagctcaccgacgccgacaccatcgtctccaagaaggccttcgccggcccgtacacgctgaccgccttcaagatcaacgagtccgccgcctacgctaagaacgactcctacaagggcctgaccccggccaagaactccgccgtgcaggtcaagtacttcgccgacgcctccaacctgaagatggccgtccagcagggccaggtcgacgtggcctaccgctccctgagcccgaccgacatcgaggacctctccaaggactccaaggtcaaggtcgtcaagggcccgggcggtgaggagcgcttcatcgccttcaacttcaagattcagccctacggtgaatcccagcccgacgccgacgctaacaaggccaaggccgtgcgccaggccgtcgccaacctcatcgaccgcgaagagctctccaccaaggtctacaagggcacctacaccccgatgtactccttcatcccggacggcctggccggtcacgatgacacgctgaagtccgcctacggcgacggcaacggcaagccgagcaccgagaaggccaagaaggtcctcgccgatgccggcgtcaccaccccggtcgacctcaagctccagtacaacagcgaccactatggctccgcctccgccgacgagtacgcggccttgaagtcccagcttgaggaaggcggcctgttcaaggtcgacctgcagtccaccgaatggacccagtactccaaggaccgcgtggtcaccgacgattccgacggtgtgtacccggtctaccagctcggctggttcccggactactccgacccggacaactacctgtccccgttcttccgcgacggcaacttcgtgaacaacggctactccaacaaggaagtcaacgacctgatcgtcaagcaggccggcgagaaggatgcctccgcccgtgaggacatcctcaagcaggtccagaaactcgagaccgaagacctctccaccatcccgctgctgcagggtgcccaggtcgccgtcaccggcacctccgtgaagggtgtcaccctcgacgcttccttccgcttccgctacgcctccgtcaccaagggctgatccagcatgagctcccctcggagaggggagcctttattgctttatataccgattaccaacaccaaggagcatcgcgtgtcagacagcgccacagcgacctccagcaccactccggcgaaagccaagacgaagaagaaccgactgtcaggtagtttcttccgcttcgtgctgacgaggttcctcctcattatccccaccgttttcattctggtcaccatcgtgttcttcgtgatgcgcgccaccggcgacccgatttccgccgccctgggcggccgcctgacacccgccgaactccagcagcgcatccacgcggccggctatgaccgcccgctgatcgtgcaatacgtcgactatcttggcggcctgctgcacggcgacctcggcacgacgctgaccgataaccagccggtgatcagcatccttacgcactacggcgccgccacattcgaactggccttcctcgccctgatcgtggcgctgatcgtcggcatcggcctgggccgactcgccgcccgcaaacgcgaccgtgccgccgacgccggcatccgcatcttcgccatcctgtgctacgccaccccggtgttcttcctcggcctcgtgctgaagctcatcttcgccgtctggctcaacatcctgccagcctccggccgctccgacctgaactccgaaatgcagttcacccgtctggtatcgccgaccggcttctacatcatcgacgccatccagctcggcgacatgaacgtgctcgtcgacgtgctgcgccacgccgtgctgccggccgtcgccctaggcctgctgaccgccggcgtgttcatccgtctggtgcgcaccaacgtcatctccacctacaattccggctacgtcgaggccgcccgctcgcgcggcgtctccgaaaagcgcctgctcaacaagcacgcctggcggccggccctgatcccgatcatcaccgtcatgggcatgcagatcgccctgatgctcgccggtgcggtcctgaccgaaaccaccttcgaatggaagggcctgggcttcatgctgtcccagtacctgaaggcccgtgacttcgtggccgtgcagggcatcgtgatccttatcgccatcatcgtggccgtcgtcaacttcctcgtcgacgtcatcgccgcgcttatcgacccgagagtgaggtactgagatgaccaccgcatcctccgacaagatcaccgtccccggtgacgaccgcctcaccaagctcaacgtcagcaccaagacgccgttctggaccaagattccaatcatcaaggaactgcgcgtggcggtcggctggcagaagggcatgctgatcaccggtctcgcgatcaccgcgttcttcctgctcgtggccctcttcgccccgctgatcgccccctacggccacgcccagatcaaggccgccgacggcacgtccttcccggcgcaggccgcgccctccgccgaacacatctggggcaccaccgccgccggattcgatgtgttctcccgtgtggtgtggggtgcccgcaccgccgtcatcgccatcgtcgtggccgtgctgctctccatcttcgccggcgtgctgcttggtctggtgtccggctactacggtggctgggtggaccgcatcctggtgatgatcgccgacgccgtctactccttcccctcgctgctgctcgccattctgatggccatcatgatctcccacggccagtccggcctgtggagcggcatcctggcctccggcatctccatcaccgtggtgtacatcccgcagtatttccgcacaattcgcgccgaagtgatccgcatcaaggaatccgcgtatgtcgagtccgcgcgcgtggtcggcgcctccacctggcgcatcatgaccaagcacctgttcaagaactccacccgcacgctgccggtgatcctgacgctgaactcgtccgaagccatcctgaccctcgccggcctgggcttcctcggcttcggcatcgagccgaccgccgccgccgaatggggctacgacctgaaccgttcggtttccgacgtgaccgccggcatctggtggaccgccgtgttcccgggcatcgccatcgtgcttatcgtgctcggcatcacgctcgtgggcgaatcgctcaacgatctggccgacccgcgtctgcgcgcccgcaagtccgccggcgaagtggtcggatcgatcgaagacacgtccgtcgacccaaacgagaagccgtccgcacgcaacgaggtgatcgccgaactcgacgcgaacgtcgacccaccggccaccgtcaccgaccatgacccgaccatcgtcgcctccgaatggaccggcgaaggcaagccggaaggcaaggagtgagagatgagcgaagacaacaagaatctcgccgatatcaaggacctgtccgtctccttcatgaccgacgccggttccatcaaggccgtcgaggacgtgaacttcaccattccgcgcaagaccgtggtcggcgtggtcggcgaatccggttccggcaagtccgtgaccgcgcgctccatcatcaagctgctgccggagacggccaccacctccggtgccgtctacctgtccaagcgcgatggctccgattcgctggacgtgctctccctgagcggcgaacagctgcgcgaagtgcgtggttccgaggccgcgatggtgttccaggagcccaattcggtgctgaacccggtgtacaccatcggctggcagattgaagagggcctgtgcgcccacggcatgaaggacaagaaggaactgcgcgccaaggccatcgacatcctgaagaaggtcggcatcccggatgccgaaacccgcgtggactactacccgcaccagttctccggcggccagaagcagcgcatcgtcatcgccatggcgttggtgctgaaccccggcctgattctggccgacgagcccaccaccgccctcgacgtgaccgtgcaggccgaaattctcgacctgctgcgcctcgcccgtgacgagttcgacgcctccgtgctcatcatcacccacaacatgggcgtgattgcggacatcgccgaccaggtggtcgtcatgtaccgcggccacgtggtcgagcagggcgacgtggagcagatcttctaccatccgaaggacgactacaccaagcgactgctgggtgccgtgccgcgcatcggtcagaagctggtcgtgcgcgaccgcgagggcaagccgatcgagcgcaaggccgattggcgcgaacagccgatcgccgttgaggccaagaacctgaccatcacgtacccgggccatctcatgcagcccgacttcaaggccgtggacggcgcgaacttcaccatccaccgctccgaagtgctgggcctggtgggcgagtccggttccggcaagtccaccaccggccgtgccatcgccggcctgcagaaggtgtccggtggctccctgaacgtgctcggcatcgagatgaacggcgtcaaggagcgtgacttcaagcccaagcgcgcggacattggtttcgtgttccaggatccgggctcctcgttcaacccgctgatgaccatcgcggagaatgtggccgagccgctgctcgtgcaccacaagtacggttccgtggccgaggccaagaactatgtgggcgacctgctggagatggtccagctgccgcgcgcctacatgaaccgtttcccgcatgagctgtccggcggccagcgccagagggcgtctttggcgcgtggtttggcgttgaagccgtcgctgctgatcgccgatgagccgacttctgcattggacgtgtcggtgcaggccaaggtgttggagctgttcaagcgactgcaggcggaaatcggcttcgcgtgcctgttcatcacccatgatttggcggtggtcgatatgctcgccgaccgcatcatggtgatgcataagggccagatcgtggagcacggcgatgccgaccagatcatgcagcacccggagaactcgtacaccaagaagctgctggcctccctgcccgtgcctgacccgcgcgaacagcagcagcaccgcgcccacctccacgagctcctagcccaagaggtgtaatcgcatagcattggagctccctcgtcagagggagctaactttatatccgctagtactgctgcccatcgaactggaacagggcgtgggcgtcgccgtgctttttgttctcgatgtaagtatggaacagctccagccgctcgctcgtgcttgccgccaatggcgtgggcagatcatccagatcgaaccagccgacgctgaggctttcctcgtcgcccacgaacggctcggcattgccgccgggcttcagggcgcacaggaacgaatgatccatgtacatggtgttgtcgccattggcgtaggtcagcaccttgtttgacgaggtgacggccaccaaatcggtgacgatggcatcgatgcctgtctcctccttgatttcgcgcaccaccgtgtccgccggctgttcgcccggctcgttgatgccgtagaccatcgcccattcgcccgtgtccgaacgacggcccaacagcagttggccatgttcgttcagtacacaaccggtcacgccattgagccacagcagatcatggccgatcttcttacgcaattccaacacaaattccggagtaggcacattgcctccttagtagaaaaaaggagctccctctgatgagggagcttaagggttacttggcttgggcagcctgcttaatatggtgcgcttcgcgcatgatttcattttcctcgcgcttgtcagcgttcggcgtcgcctacaatcagtccaccggactgattgctttacggctccgcatccacgcttcgacgtcgtcgatctgcttcgggatgccggcggaaatccattcggggccgttctcggtcatgagcacgtcgtcctcgatacggatgccgatgccgcggtattccggcggaatcagcagatcatcctcgcggaagtacagaccgggctcgatggtgaagatcatgccgggcgtgatcttcgcgccctgataggactcatagcgggcctgcgcgcaatcatgcacatcaagacctaggtggtgggccacgccgcaggcgagccaacggcggtgctgctggccttgcggagacagcgactcctcgacgctcaccggcagcagaccccaatcgtgcagacgttcggcgatcacacgcatgcaggcgtggtggatgtcggagtaggtggcacccggcttggcggcttcgaaaccggcctgctgcgagtcgagcacggcctggtacagacgcttctggaagtcggtgaacttgccgttggtcgggaaggtgcgggtgatgtcggccgtgtacagggaatcgacctcaacgccggcatccaccagcagcatgtcgccggtcttcaccacaccggtattgcgcatccagtgcagaatcggggcgtgggggccggaggccacgatggagtcgtagccgacggcgttgcccagctcacgggacacggcgttgaacgcgccttcgaggatacgctcggaacgcggcttgtcgagcgcggccggcagcgaggagagcagacggtcgaagccatgcttggtggcgtccacggccttgcgcatctcgttgatttcgtagccgtccttgaccatgcgtgcctcggcggcgaactcgtgcagcttgtcgtcggatgcggagttcttgtccggatcggcgaaaccgttggcctcgcggatggactcgaccatcgaggtgatttcgggatcggtctcgctgaccacgcgcacacgcacggcgccggcctcggcacccacgtccttggacagggcgtcggccagctgggcgatgtcgtgggtctcgatgccggtcatcgcctgcatctccttgaggccagcacgcgggccaacccagtattcgccgtagtgggcggacatgaagaagtcctcggtggagttgtcggcgcgaggtgccacgaacagttccggagtgtgcgtcttgccggcggcggcttcgggggagtcggggtcgaccgggttcaggaccagcacggcgccggcctcgtaatcggaacccagaccggtgtagtaggcgaacgtggtgtccgggcggaacatgtaatcgcaatcattgttgcgcaccttcggctggccggccggaatgaccagacgctcgcccgggaaggctttgcccagcgcctcaaggcgggctggcgtgaacttggaggattcgagaggcttgatctccggatcatcgtcggtccagccggacttcataaactccttgaatgcagccgactgcgggcgcagcgagcggttgttcacacggtcgctcatcgactggttcgcgcccggcgccgtagcgcgctcctcggcctcatattccttgtccttggcggtgatcacttcacccattgccactctcctgtatgtagttgttgtcgaatcatcgattcccacctcatactagtcggctttatgcgatgtgccacgattgacggctgacggtaaaaccaagtacggaatttggacggtcttccggacatgcccatatggcgagtgcatcgggctggaatgcgggcccgtttattgttctcggtagggaaggaggggcatgggctggagcttgccgattgatattgacatattttgcgggctgaatccatgtgcacccatgcgatgaaggttcatcgcatcacgggacccgctgctatgcggaggtctccacctgaggcaccccggctttgatcagttttacccgcagcgaagtgcgttcgatgacgtcggcgtatgtgaaatggacgatttcggtggcaccggctcgtttcagtccctcgtcgcgtgcgcgttccttggccactatctcctgaatgctgcggttatcggtcatggctgggtccacgtatttttgtgtgccgtcgtattcggccactatcacgcgcccgtcatcgagcttccatacgaaatcgacgcggtgctcggtattcgtctgtgggtcggtcaccgttacctgaatacgcggcgtgaggaagcgatcttcgatgatggtgcctcgcgcgagggattctccgccattctcgctcctttcgtttgcatagcgcagcaggcggaatactcgggcataatcgattctccattgaacgcagtcggcggctatctcttccttggttattcccttggcaagggccgagtcaaagatcggcaacgcaaaccgaaaatcaaggtctatagcggcctcgaccaaggttctagccggtgatatcagggataggccggaggcctcgtaatgtgtcttcggattgttcatatcgggcatatagacatgtcgtaagcgctgatggcattgacgagatccatgatcggaagtcacgatggttatgcagccatcatgcaaatgccattgatgttcgaatccataggcgcttactgccaccaagccaccaaaaacccactgaggatgctcttgcgcaagagcgcgggccatatgcaacgttcgctccggcggcgtcaaaccatcccagtatgcggtatttgcataaagactgggaatgccgtcatacactttcaacaactcgccactctgggcacggcggcgtagagcggtctgttccgcttcatttcttgaatagacgcatctcagctcattctgcgcggctgatatgagcgaggccactgctttgtgtgtcttcatgacgtcgagcgtagccggaacgaagcagcgtaagtatgaatttcagccattgtggttctagcctcggagcttggctgtcttggagtgagatattcccgataatttcaaggtattaggccgctaattcggaatagtggataacatacaaaacttatccaccatcagtaatgtcattcgaacaacgtgctttggggattcgaacaagatatcatcggcgaagacggatgtagctggtagagggcggcgaattgacggttaacggtgcttatgctttgtacgccgtcggtgctggttcagatattggctggcttctgtctgagtgtggaatctagcgtcggcgtgagtccaatggttgtatcgtggccgacgatttgctgcaatttattggcggcatagatccagggcttggacggctgccgacggtgagagcagtcataacagtgaatgagcctctgcgagttcaaaagatgatgtagaggacgtttgtgagagtcgtttccggggcaagacatggtcgattgacgatgttgaaatttctcagcgacggcagaatggcatgccttggcgaggaggcgacactgagaggcgatggagtcgggattaatccaggttttggccagctaccgactcgcaagagcatcatagcgtcggtgtaccgccagaagctggcactgtaccgacgctgaatagcatcagcgtcgccggacatacaagttttggattgcagccgactaagaatgggatgccgacggcaagagccgcattgcaactatatgagatggcttcactgtgcgcgctgcaggaaaaggccgcccgcgcggcggcgacatatgagacggtttcactgtgcgcgcacgataaaccaccccggcggctaggatagagggaattgagggagtgcggctccacgcgtgaaggcaagaatcccgaaccatgcagggcaaacctgtgcgaggggagcttcctgcgcatgcggaagcggaatatatgcgggcatgcgtagacatgacgagaatggcacgaacacgtaagtggcatacgcactccgaacggttcaacagcaacacgagcagaggtcagaagaggatatgtcattcgagcatccgaatcggaacaacgagagcatgcgggacgtcgaactggacatcatgagccgcccgccggagcataacaccaccaatctggatctcgaccggatgaacctgatgctcgacatcctgggccacccggagcagtcgttccgcgtgattcatatcaccggtaccaacggcaaaggctccaccgcacgcatggccgaggccatctgccgcgcctacggcatgcgcactggcctgtacacgtcgccgcatctggagaagatcaacgagcgtatcgccatcgacggccagcagctgtccgacgacgatttcatcgacatctgggaccagaccaaggatctcgtggccctggtggacgccaggatggaggagcaaggcaagccgaagatgagcttcttcgaggtgctcaccgccatggccatctggaagttcgccgacacgcccgtggacgtggccatcgtcgaggtcggcatgggaggcctgtgggacgccaccaacgtgctcaacgcggatgcggccatcatcggcccggtggacatggaccacatgcagtggctgggcgacaccgtcgaacagatcgccaccgagaaggccggcatcatcaagccgaactgcaccgccatcatcgggcctcagccgcatgaggaagccgtcatgccgattctcaccgaagccgccgaacgcaaccacgccatgctcgtgcgcgacggctacgaaatgaccgtgtccgaccgtatggccgcagtcggcggccaggtcgccaccctgaccacgcccaacggcacttacgagggcgtgccgatcgccaagttcggcgagcatcaggcccacaacgcgcttgccgcgcttgccgcctctgaagtggtgattccggtcaatggcccgctggacggcgacttggtgggcgaggcgttgagctcggtcaagattcccggacgcatcgaacagatccgcacctcaccgaccatcattctggatggcggacacaacgtgaatgccgccgaagccctacgcaaggccatagaggaaagctacgacttcaagcagctggtcggcgtggtcgccatgatgcgcgacaagcaggtcgaggaatatctgggtgttctggagccgatcctgagctccgtggtggtcaccgagaactcgtggcgcgagcgtgtgatgccggccgatgagctcgagaagattgccgtggacgtgttcggccgtgaccgtgtgatcaaggaagcgaacctgcccgacgcgattcagactgccgtcaacatggtcgatgccgaggacgagctgggcgtgggctacggccacggcgtgcttatctgcggcagcttcgtcaccgccggcgacgcacgcctgatgcttgaggagcatgccagccccacgatgaggcaggccatggccgtccatcagccggcggtcgacccggacgattcggatcagccggcagacaaggccgaggatgaggccgccgacaacctcgaggattcggtgagcccggacgacttcgacgtgttcgacgtcctcggcctcggcaaggaacaggccagtgacgccggtaacgccggcaccggcacggccagtgccgacacaggcaccgacgattccgccgacgcccggtaacccgaatccaaggcatatcggatacccggacacacggaaaacagtctcacgccatgtatctcaaggaactcaccctccgcggattcaaatccttcgcctccgccaccacgctgcgcttcgagcccggcatcacggcggtcgtcggccccaacggttcgggcaagtcgaacatcgtcgacgccctgacctgggtgatgggtgagcaaggtgccaaaaaccttcgcggcacttcgatggaggacgtgattttcgcaggcacgtcctcccgcccgccattgggccgtgcacaggtgagcctgaccatcgataattccgatcacacgctcgatatcgattacacggaagtcaccatatcccgcaccatcttccgcaacggaggctccgaatacgcgatcaacggctcgcaatgccgtctgctcgacattcaggaactcctctccgataccggtcttggccagcagatgcacgtgattgtgggtcagggacgattggatgcgattctgaaggccgacccgtccggccaccgtgcgttcatcgaagaggccgccggcatcctgaagcaccgcaagcgcaaggaacgcgcgttgcgcaagttggccaataccgaaacgaacctgagtcgacttgacgatttgctgggggagattcaccgccagctcggccccctcggacgccaggcacgcatctcccggcgcgccgacgcgattcagatatccgtacgcgacgcccaagcacgcctgtatgccgaagacgcccaacgctcgatgaaccgccgcgacacggtacgtcaagagcttggcgatgtgcgcaaccagctggccgtcgcccaacatgaactcgcccaagccaaagtacgcatcgaacaggtcgaggcgttgagctctgaatccagtccgaccatcgccaaggccaaccaatactggcatgaattctcacagacccgtgaacgactgaacgcgctcgctcagttggccgaagagcgcagccggtcactcaccggccagatcgtcaccaacttcggtgaggatcccggcatgctcgtcaaacgagccgaggaactggagtctcaggccgcggcacaaaccaaggccgtggccgatgcacgcatcgcactcgacaaggccaccgaggaacgcgccgacgacgagaagaagctcgcctcagtccgccagaccttgacggaactgcgcaaaaccgcacaggagcgcgatgcgcagatcgcccgactgcgcgaactcatcgcccgcgaggaatccgccgtgcaactggcgaccagccgcgccaaggattatgcctcccaacgcgacttgctgacttcccagcgcgacgatgcccagcaacagctggacgcattacgcagcgaagcagactccattgccgacgatgacggtgccgcattggacgccgcgcgtgcaacgctcgccgaatgccgcgaacgactgaacgaactcgccgataagcagcgcgagatacagtccaagatcatctcgctcaaatccaaggccgatgcgcttgccgacacgctaggcagccgcaatgcttccggatcgttggagcgcgacacggacgtggcctcgcttggccgactcaccgacttcatccatgtggccgaaggctgggaagatgccgtggcccacgcgctcgaccagtatgccagcgccatcgtggtacccgaggcaggcaacatgttgcacgccctcgaacgcgctcgagaagataagctcggcaaagccgtggtgctgaccgcgagcattgccggcgatcccgccacagagccgggcacggagtcggaggagagtagcgccgagaacacggcggccgccccgcaatcgggcaacgcgctggcagcactcgtcaccgcgaacccggatgcaaagaacccggcacaggccgaagctgtcgtgcgcaccgtgcgtctcctgctggctgatgtagccatggccggcaccgccgacgaagcacagcacatcgtggcatccggcgaagccatgcgggccgtcaccaagaacggcgagatcttcacacacggcgtggcggcggtcggcggctcttccatctctcaatcggacctgtctctggccgcccgtcgagacaaagcattggcacaggtcaaacagttggccgcccaagacggcggaatggctgagcaagtggccgaggccaaagccaaacgcgatgaagcggcccgactcgtcgaccaggaatccgccaaacgcaccgaagcccggctcaaagcccaacaggcggagaaatctctgaaatccgccacagaccgcgtcgcatcgttcacccgtcagcttgagcagctggataggaaaatcaccgagacccaagagaatcgcaacgagcatcagctcaagctcgacgatctcaatcgcgctttggcatcggcccagcaatccacagcggaacatgccgatttcgacgaacttgatgaacgtgaacgcacgctggagcgcgaactgaacctgactcgcgagcatgaggtcgccgcgaaaatcgcgtggaccgaagcaagccgcaaaggggagtcactgagccggcaggccgggctgctgcgggacaacgccagagaagccgccgaacgccgcgcccgcatcgaggcgttgaacgatcgcagacgcgagcaggccgcacacctgcaaggcgtggccgatgacgcgcgagcagtggccgccatggtggaacatacgctgcatgacgtggccgccaaacgagacgagctgcaggccgccgcctccagccatgacgaggaactcaaggccctgcgcgcgcagcgcaaccagatcgagcccaaggtcaccgatctgaccgggcgcgaacatgccttggatgtaaaccgcgaacggttggccgccgaatccgggcagctcatgcaaaaagtgtccgacgaactcggtctcactttggaggaattggttagtggttacggccccgaacagccggtgcccgtgctggatgatgagggcaaccctgtgccgttggatgagacggaagctgaggctgggaccgaagagggagaaaccgggggagaggccggcaccaacggcgattccgcccgctttaagaccgtgccgtataaccgtcaggagcagaagaagcgtctcgataaggctcgccgcgatctggccgcactcggcaagatcaaccctttggccaccgaggaattcgaagcgcttgaggagcggaacaagtatctcaatgatcagcgcaacgatgtggtcaaatcacgtgacgatttgatgcagctcatcaaggatctcgattccacgatggtccaggtgttcaaatccgcgttcgacgataccgccgaggcgttcgagcagatgttcgccacgctgttcccaggcggcaccggacgactgcgcctggaaaacccggaagacatgctcaccaccggcgtactggtcgaggccagcccggccggcaagcgcgtcaaacagctgagtcttctgtccggcggcgaacgttcactgaccgcgctggcgttgctgttcgcgattttcaccgcccgccccagcccgttctatgtgatggacgaggtcgaggccgcgttggacgacgtgaacctgacccgtttgattaatgcgttcaatgagctacgcgcccatgcgcagctcatcatcattacgcaccagcaacgcaccatgtcgattgccgacgcgctttacggcgtaaccatgagagccgacggcgtaacagccgtggtgagtcaaaaactcgaacgataaacgaatggttcccgctgacaggaactggtaccacaggtgacagagggcggtccatatcgaaagaccgccctcagtctcgcttcgttcgacagctcccgccagcgggagcggggcggtattagcgcaatgccttgcgtacgccttggatggtttgcagcgtcttgtagaagaccttcttgatgggtacgtcgcgggcgggggccaccggggtgatttcctcggtgaacttgcacttgaactcgttaaggcccttgagagacggcgcgaaatcggagccaatgcccatcagatcgtattcagtaataccctgcgagcccaggatgcagcattcggaatacagcagcttgtcggtcacatgcagacgcataacctcgttgcgcatgccggcatagtagcgcaccgcatgcgtgccattcacggtgacaatcgaccatgccaccacacggtcttcaatacgtgcggcgaacacacggcaatgatcggcacccaacgcgccgatcatatcggagtagtcgctcatcggagcaggcgtgaatccatcgcgctggccggtctcgaccatcacatcgtagtattcggagaaatcggccagcgccttatccgtctcatcggcaacctcggccgggcactcgcgcagagacttgcgcacgtcacggcgtccacgacgcttcatccgagccagaatctcatcatcgccaccggtgacgtcgatgaccacggtctggtcgtacggcactgtggacagcaccttctccgtaccatcggcgaaccaggtgtcgatacgcaggaacgcgatgttcttgtcggccttcttgacggtgtccacgatggcgtcgacgacctcgcgctcctcagcctcggtgggcttggcgacccacgccggcccatgcatcgagcgcagataatgataaccgtgcgtctcaaaatcgataaaggagatcacggcgaccaattcaccatcacgcttgatcagataatcgccccatggtgtgcgtccgtcgatatccgcctgaaaaccagaccaaaccttggtctgttcgatgggcaacgtgatgccggccttctcggcttcggcttccagtgtggctccgtcaactttctccaacgtgatcattacgattcagctatcctttttcgttcgtatccgtatgtcgtgtttctggtttggtcgtattgcgcgtgatctgatgtgggccaatcgggatccgatcaggatctgattggccggaatcccgtcacaagccaaacatgcgttcgacgacgtgatcgtcgccgtcgaacggcacatgcttgtgatggtccttgatccaacgctcgttgcccttgccgatgatcagcaggatgttgaatcggtcggcgtgcgcacgggcatcgtaaatggcgttggtgatggccgtcggacggtcggaaatcaccgtggaggccacatccttgttcgtgatgtagccttgcatttccatgcagatgtcgatgaacggctcggtgtccgtatcttcggcggtgaaaatgaagttcgcgatacggttctcggccgcctcgacgatttccttacgacgatcgtaggccttgttgccggccgatccggtcaccagcgtgatacgcgggttttcctcgccccaacgctcgtagacgaagtcaagcagcgcggtgacggatgcgtagttgtgcgcataatcgacgatggcgagcgtgttcgactgcgggtcgcggaactgttccatacggccggcgatacgtacggattcgatggcgtgcagtgcgtcggcgtcatcgagcgatacgccagccgcatgggcgatggcgatggccgccgccgcattgaggtagttgaagtcgccatcgatggacagatggtagtcgccaagggcctgatctccgtcggcgatgtggaaggaggcgtgctccgggtcggcgggccaggcgacgacgtccgcactggtgccggcattatccgcgtcatgcagggcgaaggtggttgcgccgatgccggctgcctccgcgtcctcccgcaacagatcggcgtgcagactgtccgcgccgagtaccagcgacttcgcgttggcgatgatctggcgcttgcaatacaggtaatcctcgaacgtggggtgttcgatcgggctgatgtggtcgggggagatgttgaggaacgcggccacatcgaaagtcagtccgtagacgcggtccaccttgtacgcctgggaggagacctccatcaccagatacttcatgccgttatcggccgcctcgcgcatcatgcggaaggcgtccatcgattcgggcgtggtcagatcggattcgacgtaggtgtggccgtcaaggcaattatcgaccgaggagaacaatgcggccttgccaccggagacggcgttgataagcgcctgcgtgaagtacgaggtggtcgtcttgcccttggtgccggtgacgccgatgaccgtgagctcgttctgcggatatccgtagaacgcggcggacagcaggctcatcgccttgcgtgcgtcgttgacgatcaggccgggggcggcggttgcggctgagtactcggtttcggccacgtatgcggccaggccggcttcgtcgatgccgttcagatactcggccttgaatcggcccttgcagcacagcagggtgcccggcgtgaccttgcgggtgtcgtaggtgatgccggcgaacggttcatccgccgaagcgatacgggccgggtcgtcggtccagacatccccttggatgatttcacgcagcagatggtgttccttgagcaggtcagcggccgaagccaaagtcaaagccataattgttactccctattatctagccgatacgccattctacaggtggggtgtagcgtgttgtggctcacacgtcatcgaccacgatatgggcacatgatttgattagaatggtgaaccgtgacgacaagcgaagcaactacgcaatccgggcagtcagccggatcgggcgagtccatggcagccaagcgcgccagattcgagcagctcgccatgcccgccgtcaatgcactgtaccggcaggcgatgaggctgaccaacaatcccgatgacgcgcaggatctggtccaggacaccttcgaacgcgggttcaaggccttcgactcatttcagccgggctccaacttcgaggcgtggatgaccaccatcgagcgcaatgcctacttcaaccagtatgccaaggccaagcggcgcccgcagcgtgccaacgactccactggcgaatacgacgattgggacatttacgatgccgccgaacatacgtcggacgggctcaagtccgctgaagaggaatatttggacgccttcgcgcccgaggaaatcatggccgcgctcgccaaactctcgccggaacgccggcaggtgttcatcgacgccgccatcgacggcaagtcctaccaacaggtggccgatgagcagggcgtgaaaatcggcacggtgatgagccgcctgaatcgcgcccgcacgcaactcaagcgtgagctcgcctcgtatgcgaaagagcgcgggtatgcgactggttcgtcggctggttcaccatccgcgaagttgagcgaaaacgttggtcgaatcgccgattccggccataatgaaagtagtgaacaaactgttggcagcaatggcgacacgcaagccgtagtgagacatagtcatgcgactcacgcccacacgccacaacagtcaagcaagctttcgggaaaggagatctgatgaacgatcagccggtagagcgtactcgccatatctccataacccgtacggcggccgatggcacggtaagccagaccgaagtgcatatcacggcggtgcatcatcgttcagtagataccggctcggccgctgcgtcggtccagacagacgtgcatatcgttacggagggcgactgttttgacccccgtacctgctgcgacgagcgtgaacaggcgttgattgccgcgttgcgtgcctacttgcgcccggatgtggcgcccgaatgtctgatggcccggctcaaggccacgcttgatcactgctgcggcgaagataagtaacgacatatacaacaaggcccgtctgatgtatcatcagacgggccttgagcgttctataagaaacgcgaagaatcaggcgttaggacgcttgccgtggttggcggccttcttacgacgatccttgcgcttacgtccgcgcatgcccatgatggactcctttgctgcagtaaaaaaataagccttcggaattatgccacataagtacgacgtgatgcaacacgggtgtccatgtggcgatgatcgtcaggcttggttattcggtttttcagatttgttcggcgtggaaggtgaccacggtggtgtagtcatcgcccggctcgagcacaaccagatccttgccggtgcggaaggcgtcggcgtaggcggtcatcggttcgacggccacgccggcctgacgagccttcccgccgatttcgttgccggtgcacacctgccaggagttgatggtcttgtcgccggtcagcgtgaccttgatgccgtcggggcgggtgaacgcggcggaagtgctgccgtcttcgccgcggttggtgatatcggtccaggcatcgtcgaagccacgtccctccagcgtggggttatcgcgcaggtcgaagatgccggaaaccggctcttcgccggtgggtagcaggtgttcgtctacggtcacgtgggtatcgcagtgcagctcaagacggcaggactcgttgtcggcggtaatggcctgaccggtggcgtgcttgccgttggccagccacgggtggatgccaaatgcccatggggccttcacgctgtcgttgttgtgcacggtgaaggtttccgtgagaccgttctcgtcaagtgcataagtggcggtgatggtgatatcaaacgggtagccggcgatgtcgggggagcgccaggagagcgtcacatgtgattcctgcaaatcaacgagctcccacatgtagcggtaggcgtagccgtgcagggaggattggcggtcgaactcgtcgatcggcatctggtagtcttcgccatcgaaagaatactgaccattggtcacgcggttcgggtacggtgccagcacccagccgttgcagcaggggatgaccttgttcgggtcgaaggggacgatgaggtcttcgccgcgccacttcagctcgcgcaggctggcacccagttcggtgacgacggcactccattcgccggacgagatgacatattggttaccagtgcgaggcttcaaagccatagtgcacactcctttgtgaaacagattgttaccgctcacaatcgtatcgcacaagtcccaagacgcggcggcacataaggataaaaaattggctcccctctggaggggagccagcgtaacggaactacttctggactacttcgtagcggaccacagtggtgtagtcgccgttgggggcgagcgtcaccaagtggtcaccagtgcggaaggcattggccggggcggtcatcggttcgacggcgataccatacggatgctcggcgaacggcgcgccagtggcggtgtagcactgccaagcattgatcgtctcatcgccaatgagcttcacttcaataccgtccgggcgggtgaatgtggtggtggtcgtaccatcggcggcacgctccacgtcgacccaggcatcatcaaaggcgcggccttcgagcgtcgggccatcgttcaggtcgtagatgccggtaaccggttcggtgccggtgggaatcagcgcctcgttcaccgtcacatgactggcggccttgatctgcaggtggcaggcggcggagtcggcgtcacgctcggcggaagtcgcgccctgcttgccgttggccagccacggatgcaggccgagagcccacggtgccggctcgtcgccatcattgcgggcattgacggtcacggtcatgccgttgttgccgagttcgtatgtgacggtcacggtcacatcgaacgggtatccgtccaggttggggaagcgcagtgaaagcgtcacggcgctatcggtcaacgattcaagcttccacatgtagtggtaggcgtatccgtggttcgcgttgttgcgcggtgcgggatgatattcgttgaccggcgcgcagtaatgcttgccattgaaatcgtattcgccgttttcgatgcggttcggccacggggccagcacataaccgttacaggtgggggtcaggtcgttgacgccgaacgggcagaaaatttccttgccttgataatcgaatcggcgaatcttggcgccgagttcgcagatgacggcggaataatcgccatagtgaatcgaatactgatttccggtgcgtggtgttttactcgtcatggaatcactcccgtagtgaggttggtgggccggtagctcctgctatcgctggccccagtctagcgcgtctcctctatcgaggcggggattggcgatagccggcatataataaacaattcgtacagacacggtagcaatacgtggagtgacgagtctcacaccatcatgcgagaagcacgtggattccttggaaaccggtgattcgtgggagacgcggaaaagttgtgacggcagattcctgtaatccctgctttacactggaaaaacactattgacgttcaggaggttccgatgaccaaaagcgttgtgctcgctgatccgcgaggcttctgcgcgggtgtggaccgtgcgattcttaccgtacagaccattctcaaagccgcggaggcttccggaaagcgaacgcgcgaggatgggctgcccccggtatatgtgcgccggcagatcgtgcacaacaagcatgtggtcgaggatttggccgggcaaggcgcggtgttcgtccaggaattggcggagattccggatgctgctgcccaagcgggtattccggtggtgttttccgcccatggcgtatctccggtagtgaaggcggaagccgaacgtcgtggcatgcatgtggtggatgccacctgccctctggtgggtaaggtgcaccgtgaggtgctgcgtttcgtgcgcgaggggtatgaaatcgtctatatcgggcacaagggccacgatgaagcagtcggcgtggtgggggagaaccccgaacatgtgcacttgatcgagcatgaatcggatgtcgattcgttggattttgcgcccgacaccaagctggtgctgctctcgcagaccacgttgagcgtggatgagaccgccggcaccattgccgcgctgaaggccaagttcccgtggattcaagagccgccgagttcggatatctgctatgccacatcgaatcgtcaggctgcggtcaaactggtggcccagcagtccgattgcgtggtgattgtcggatcggccaactcctcgaattccgtgcgactgatggaggtggcgcaggagggcttgggagagcgcggcaaagcgtatcgcgtggatgatgccagcgagcttgatccggcgtggttcgtcggactggagtccgtgggggtctcctcaggtgcctccgtgccggacgaactggtgtccggtgtgattgacgctctgcaaaacttgggtttcaccggtatgaagtccgtcgaaaccatcaaggaaaacatgcacttcgtgctgccggcggagttgcgcaggaagaagtagtcatccttggctcccctcacagaggggagccaaggatgactaccacgtgccgattggtgcggcaacggcgttcaagaccttgagcaggtcctgcgggttcacgcctacggacaggcctcgcttgccgccggagaccagaatctggtcgaattgcatggcgctttcatccaacacagtcttatgacgtgtcttctggcccaacggcgagatgccacctaccacatagccggattcgcgcattgccaccttgggatcggccatagaggccttcttggcacctacagccgcagccagggccttcaaatccatatgtccgctgaccggtaccacgcccaccacacgctccgaaccggtgtccgccatcaacgtcttgaacacctgatgctcgtcgaagccgagcttggtggccgcctccacgccgtagccgtcatccatatggtcgttggagtgctcgtattcgtatacgtggaattccacgcccgccttctccagttggactgtcgccggggtggaacccgcgcccttatcatgcttgcttttctttgccatgattaccgttctactacgaagagacccccgcacaaggcgggggtctcacagcttagttctcaaacgaaccgtagcggcctagaccgcagtggttcactcggagatctcagcgaagtacagcagggtacggatcatgttggaggtgaagccgtactcgttgtcgtagaaggacacggtgcgagccagggtcacgccgtcaatggtgttgacgtcggtctgggtcgggtcgaacacgccaccgtgggtgtcgccgaggatgtcggaggagacgatgccctcatcgttgtagccgtagtaatcggtgtcggagaaggcagccttgaaggcttcgttgatctcgtcggcggtggtctcggtgttcagaacggtggtcagctcggtgacggagccgtccggaacctggacgcgctgggcatggccctgcagcttgccgttcacggacggaacgaccttgccgatggccttggcagcgccggtggagtgggcgatggtgttgatggcggcggcgcgcaggttgcggccggtcttggtgccacgcgggccatcgagcagcatctgggtgccggtgtaggcgtggatggtggtcatgaagccggccttgatgccgaacttctcgtccagcagcttgaccatggcggccatggagttggtggtgcaggaaccggcggagacgatcacgtcggaagccttgaggatgtcgtggttcacgccgaacacaacggtcggggtggtgtcatccttggccggggcggagatcaggaccttcttggcgccagcgttgatgtgagcctgggacttctcggcggaggtgtagaagccggtgcactcgagcacgtactcgacaccgtcgttcttgacccacggaatgttgttggcgtccttctcggcgtagaccttgtattccttgccgtcgacgatgatggagtcttcggtggccttgacgtcaaccggagtgccatcgtcatgacggaaggtgccgtgggtgctgtcgtacttcagcaggtaagccagggtagccggggtggtcagatcgttgatggcggcaacttcaatgtcaccagcctggccgccgcgagcctgcagctcgaagatgcgacggaaggcgagacgaccaatgcgaccgaagccgttgataccaatcttaactgtcatgtaattctcccttgtagggtggccttggcgcgctttggcacaccgggccattgtttaccaacagttgctactgtaatgccgactctgtacacatggcaacgtttcagcgtgcgttttgggtaaaaatgccgtattttttgtgagcgctcacaatttggattgcccgcaaccgacatgtgattttcctctcctttggaggaatgtctcgaatcatcacgagcaagcgcgcggcatgcaagtcagcgaaccagcagcttggacacttcggtgtccagctcgccgatatcgccgccgaattcatggaatctgctcacctgtggcaacgccacttcgatggggaaggtgacgatcagtgtgccgcgtttcacgctgatggccgcgtccacgccgtcgcggaactcgttgctgaccccctgcaccaccgtattggtcagcgtgccgtctttaagctcatatttcagccccggttcgttcacgccaagcgaaacatcggagtgggagaacaccgacaccatacggccgtccgcgggcaccggatgcgcggggaacgaaagcctgccatcggtgatggccgtgacgatgagcccgtcaccatacaggtacccgcttgccccatgccgggccaataatgccatcagttgaatgccggaaatcgtatggtcaatacggccgccaagcccgccgtacacgtgaaactcgcggcaacccgccgaccaaccgaccttcagcgcggaaagcatgtccgggtcgtccttcaacgcgggcagcgcgatggtgcgcacatcggtgcggggcggccggccctccagcgaatcgaaatcgcccaccaccacatcgggcacgatgcccaactcgcgcgtatggtcgagcccgccatcggccgccaccacatacgcgccggccggcaccacgggcgtgcccgcatagtattcgcccgcaccaaaaatcacgcatacctgagccatgatgcccactgtagccggtatccacccatcgacacacgggccgcgaatgtccgggcatgtggtaagattcctatttggcttgagaaatcaagaaagcggggcaaccccacctggaagcctttcaaggcctcgggttcaaggcaaacagcctagcgattgcgatatacaacgcgcaatcaggaatgacgcaaagaactgatatgcgtctgcagaagctgagcgcatattggcgctggttttggcttgccatgaacccaaagcattgaacaggactccagcaaagggcccgccacggaattaaagtagaggattggagtcatcatcagcgacgaaccacgtattaacgacgagattcgcgtcccgcaggtacgcctgatcggcccgaagggcgagcaggtgggcgtcatcgcgacttccgtcgcgctgaaccttgcccaggaggccaacctcgatctcgtcgaggtggccccgaacgcgaagcctccggtcgccaagctcattgattacggcaagttcaagtacaacgagaagatcaaggctcgtgaggctcgccgcaaccagagcaccgcggaaatcaaggagattcgtttccgcctgaagatcgacgaccacgatttcgacgtgaagaagggccatgtgacccgcttccttaacggaggcgacaaggtcaaggtcaccatcatgttgcgcggtcgtgagatctcccgcccgattggtggtgtggaactgctgcagcgtctggccgacgatgtcgaggaatacggcaccgtcgagtccaagccgaagcaggagggccgcaacatcatcatgacccttgcgccgaagggcaagaaggtccacacccagtccgagcagcgtcgtcgtggcgccgagtcccgcgccgagcgtcaggctcgccaggcggctcgtctcgcggccaagcaggagtctcaggctcaggccgcggccgacgcgcagtccgcgatttctcagaagacttccgacaagaagcaaaccagcaaggagggcagcaatgccgaagatgaaaactaattccgccgcttccaagcgcgccaagatcaccggcaccggcaaggtgaagcatgtcggttccgccatgcgccacaacctcgagcacaagtccgctcgcaagcgccgtgaactgtccgccgacgatgtgctgcgcggcggccaggccaagaagctgcaccagcttctgcagaagtgagcatagggcttacccggaaataataagactttagaaagctgaggaatagattatggcacgtgtcaagcgcgcagtgaacgcccacaagaagcgtcgcgttgttctcgagagggcttccggctaccgtggccagcgctcccgcctgtaccgcaaggccaaggaacagctgctgcactcctttaactacaacttccgcgaccgcaaggctcgcaagggcgatttccgcaagctgtggatccagcgcatcaacgctgccgtccgcgctgagggcatcacctacaaccgcttcatccagggcctgcgtctcgccggcatcgagctggatcgtcgcgctctggctgagatcgccgtctccgacccgaacaccttcaagaccatcgtggacgccgccaaggccgccctgcctgaggacgtcaacgctccggttgaggcctgattgcttgaagtcgtgacttcacactagaaaccccgcttccgagcggggtttcctattattagccccctctgacgagggggctctcgcgcagcgggtggggaagagaacaaactcatgaccaacggattcaccaaactcaccgagcagttcctcgtccacatcggtgtggagcgaggactcgccacggccaccgtcaccgcctacgaatccgatatcgctaaatacattgattggctcgaaacccgcggcatccacgaaccggacgccataaccaaacaagacgtcgaagactacatcgccgcacttgaccaggcgggggagtccgcccgctccaaagcccgaagactggcctcgatccacgaattccatcgcttcgcgctcggtcagcacgcggtgactgccgacgtttctgccgcagtcaaggcacccaaaggtgccagcaccctgcctgacgtactcaccgtggacgaggtaacccgtctgctcgacgcggcggcagccggcggctcaaccgatccggtggtattgcgggacaaggccctgctcgaattcatgtacgccaccggctgccgcgtctcggaagccaccggtgtgaatctggacgacatcgacctggacgagcacatcgcgcgactcatgggcaagggctccaagcagcggcttgtgccattgggcagctacgcatgccgggccatcaccgcatacctcaatgcggggcgtggcgagctggaacggcgctccagcgccaagattcccgagagacgcgcactgtttctcaacaaacgcggcaagcgcatctcgcggcaatcggtatgggaaatcgtcaaagcaaccggggagcgggccggcatcaccaaaccactccatccgcacaccttgcgccattccttcgccacgcacctgatccaaggcggcgcggacgtgcgcaccgtgcaggaactgcttgggcacgccagcgtgaccaccacgcagatctacacgcacgtaagccccgaaaccctgatcgaaacgtatctgacctcacaccccagagcgcggtgagacacaccattttgcgacgcgtccgcccatagcggaatcgcggcgggggggggaagcaccaaagtcggccggaaattcaaggcgtgacaatacagtacataacagcgaaccgtcagccaggaagaggtattcatgctgcagatcaaatcgatctcgaagcgctataaaaccggtgatttcgttcaacaggcgcttgacaaagtcagcctgaacctacgcgacagcgaattcgtcgcgattctgggtccctcgggttccggcaagaccaccttgctcaacatcatcggcggcctcgaccggtatgacgacggcgatttggtgatcaacggcatctcgacgcgccaatacaaggatcgcgattgggattcgtaccgcaaccacaccatcggcttcgtgttccagagctacaatctgattcctcatcagacgattctgtcgaacgtcgaactcgcgctgacgatttccggcatcggcaaggccgaccgtcgcgaacgtgcacgcaaggcgctggagaaggtcggactcggcgaacacatcaataaaaagccgaaccagctgtccggcggccagatgcagcgcgtggcgatcgcccgcgcactggtcaacgacccggacatcgtcctggccgacgagccgaccggcgcgctcgattcggacacatccgtgcagatcatgaacctgctcaaggacgtggccaaggaccgcctcgtggtcatggtcacccacaaccccgaacttgcggaacaatatgccacgcgcatcgtcaacctgcgcgacggcgtgatccgctccgactccgacccgtttgtcgtggatgagacggccgaacagccggccgtgcacaagacgatgggccgcgcgtcgatgtcgttcgtcacgtcgctggcgttgagcttcaacaatctgaaaaccaagaaggcgcgtaccctgctgacctcgttcgccggctcaatcggcatcatcggcattgcgctgattctatcggtgtcgactggcgtgaacgcatacatcagcgacatccagcgtgacacgatgaccgcctacccgatcaccatcgactcccagaccttcgacctgagcagcatgatgggcggccagatgggcggcgatgacggatacggcggcaagacgcacagaaccgacggcatctacccggacgaccgcagcgtcaagcaggcatccagtctgaccagttcgattaccgaaaacaacctgacccgcttcaagaaatacctggataattccaagagcgagattcaccagtatgtgggttccgccggtatccagtacacgtatgacgtgaaattctccgtgttcgaccacgaccccgatggcacgctggtcaatgcggacggcgtgacgatcggtgccagcgactccacttcaatggcctcgcagatggcgtccacaagctcgtccggcatgtccggcacctcgtcgatcacctcgcagcagatgtcgatgctgaccggcaaaaccgatgagaacgccgcgcccgactcgttcaatgagatcatgcctggagcggacgacagcaagctcgtaggcaaggtcatcaccgacaactaccaagtggtcaacggttcatggccgaagtccaaggacgaggtggtgctggtgctcgacgacaacaacagcgtgccgctgaccacgctgtacgagctcggcctgctgcccgcctccgactaccacgagatgatgtccaagctcaacgccggcgacaaggtcagcactccacaagacaagatcgactatgctaaggcgctcgaccagacgctgtacatgattccggcatccgaccagtacgtcaagggcgatgacggccactaccgattcatcggcaacgacaaggatgtaatcgaacagcgcctcgaaacggccaccaaactcaaggtggtgggcgtcgtcaaggcgaagaaggatgcttcggccacaccgttggccgctggcgtgggatacacgcgcgctctgaccaatgatctgatcgaccgtgcggcctccagcgccatcgtcaccgatcagaaggccaacccgaacacgaacgtgctcaacggcatgacgttctcgccctcggacgacgccaccaaggcggccgacgcgcgcacctacgtggtttcgctgggcgtgacgcagaaggcgaacatggccaagtcgatgatgagtgccgggcatcggtccggtacgggcgcatcggatgccgctggtgctggtgctggcgctggcgctggcgcggcgggtgccggcgatcaggccgacgcgatggccgcgatgagcgaacagcagctcgccgacagtttcgactcgtatatcgccacggcttcgaacgacgtgcttgtcgcgatctacgaccagtacgtgtcgaccggcacctacgacgacaacctcgccgcattcggtgtggtgagtcgtgacgcgcccagctcgatcaacgtctacgccgacagcttcgaagacaaggaccacatcgccgacgcgattaccgactacaacaacaccgtctcgaagaaagacaagatcacctacacggattatgtggggctcatgatgagctcggtgaccaccatcgtcaacgtgatttcctacgtgcttatcgcgttcgtgtccgtctcgttgattgtttcctcgatcatgatcggcatcatcacctacatttcggtgctggagcgcaccaaggaaatcggcatcctacgcgcaatgggtgcctcgaagcacaacgtgtcccaggtgttcaatgcggagaccggcatcatcggcctatgctccggcctgttgggcgtgggcttgaccgtgctgctcgatattccgatcaacgccgtgttgcatcacttcatcggcaatgcggacgtcaatgccgccctgccggtgaccggcggcgtggtgctggtgatcctaagcgtggtgctcacgctgatcggcggcctgattccctcgcgcaaggcagccaagcaagacccggccaccgcactgcgcaccgagtaagcgcatcgacatagtacgagacgagatccataaacctcggaacactggaatgcccgctgcaaaacggtgttccgaggcgagcccggcgagtacattaggataggcgagcaggtattcccggcaaagggggcgagggcaacgatggacgactggcgagacatccgcgataaagacagcgcattccgtcaaggaacgctgcctatggcgggaacgtatgtcgttgcacccccagcgaacccggatgttgataaggtagacagtatgcctaccgatttgcttggacgtgaatacgaaaccttccccgcacccgaaccgctgcaacagcacggtccggcgcgtgtcattgccatgtgcaaccagaagggcggcgtaggtaagaccaccagctccatcaatatcgccggtgcgttggcccagtatggccgccgcgtgcttatcgtcgatttcgatccgcagggcgccgccactgtgggactgggcgtcaacgcgaataccgtggagaacacgatttacaccgcgctgttcgatatttccgtggacccacatgatgtggtgcagcacaccgcattcgagaacatcgatgtgattccggcgaacatcgatttgtccgccgccgaggtccaactggtcacagaagtgggccgggagcagatcctgaacagtgtgctgcgcaagctcaagtcggaatacgatctcatcatcgtcgactgccagccatcgctcggcctgctcaccgtgaacgcgcttgccgcagctgatggcgtgatcattcccgtggccgccgaattcttcgccttgcgtggcgtggccctacttatgcagtccatcgaaaaagtgcagtcccgcatcaatcccgcattggaagtggatggcgtgctcatcaccatgtacaccaagacactgcactgcgaagaggtctgccagcgcatttacgaggcgttcagcgaaaaggtgttccacacgttcatctcccgctccatcaaactgcccgattccacggttgccgccgcgcccgtggtggtttatgcccctgagcacaagacatcaaaggaataccgtgaggtggcacgtgagctcattgctcgcggcatcgtggcgtaacgattgtttcgataaacgatgaatgagacttccctttctcggctcccctctctgagggaagctggctcgcgtagcgagactgaggggagctccgcggaagccgaaatcagcacggaggaatccgccacttccggcttccgggtcaacctcgaggtctattccggtccgttcgatgccttgctcggcatgatcgccaacaacaaactcgagctgaccgaagtttccctctcctcgatcaccgaggaatttctgacatacgtgcgcgggctcgacttcacgaaaaacatggatgaggccagcgcctttctcgacatcgcctctattctggtcgaggccaaaagcgtggcgattctgcccggcggcgaagacaaccagtacgacgagcaaagtctcgaggcgctgcgcgaacgcgatttgctgttcgcccgactcctccaataccgcgcctacaagcaggccgccggtgatttccgggcgcgtatcgccgccaatgccggccgattcccgcatccggcggccatggacgagggcattgccgccatgctgcctgagctggtatggacgctgaccccgctcgaactcgcccaactggccgcccaggtcatcgccaacgcgcccgcctccgaagtatcgatccaccagctgcacgtgccgctggtcgatctgcgggcccaatcgctggtggtgcgcgaccggctgatcgcggcactggaatccaagggcgaccagtcgatgtcgttcagcgaattgacccgggactgcacttctcgtattgaggtggtggctcggttcatggccgtgctcgtgttcttcaaacaaggtgtgctgcagtatcagcaagatggtccgtttgccgaactgcacctgaggtgggtgcccggcgtagacgaaacgatgaacgacgtgaatatttccgaaggcgattttgcgtaaggacggcgactggtgactgaacggattgacgcaacgaatgcaaccgagcacatggcggatacggaatcgacggctggatccgcaaaggccgaggtgaggggagtggaggagacgcgccccgaatacgtggatttcacggtagacgattttcccggcgggctgcccgcatgtctggaagcgattctgatggtcgccgaccagccgcagaccgccaccgagctggcccgcattttggcattggaccgcaacacagtcgaagagacattgcaagccctgcacgatgactatgagggcgatgaatcccgtggcatccgcccgcgcggcttcgaactacgccgcaccgctcgtggctggcagttcgccagtcgcgccgcgttcgagccggtcgtctcatcattcgtcaccgacggccagactgcgagactaagtcaggccgcactggaggcgcttgccatcgtggcctatcgccagcccgtcacccgagcccaagtggccgcgatccgcggtgtcaactccgatggcgtgattcgctcgctcacggtacgcggccttatcaaggaagacggcgtggaccccgaatcccgcgcagcccttttggtcacctccgaatccttcctcgaccaaatgggcctgaagagtctcgacgaactaccctccctagcgccgttcctcccgtccgtcgccgaaatgacacagtcgaaatcgggggatacggacgtgatttcgtagcgattggggcccgctacctgaccaatattcgtgcgctagaccatccaatatgtgatttatggtcattgtgactataagtagtgctatgctctcaatgcggggagaacaaccggtatggaaagaggcatggcatgggattcggcaatgtgtccgagcgccgcagcgcaccgccacaggtcggcgtgtcagtggtgattctggcactcggcccgaaaggcgataccggcaacagtgccgccgattccggcaacgccgcgaactcggcccattcccgtctctggctgcccctggtcaagcgcgtccgtcagccgttcctgggctgctgggcgttgcccggcggcgacctgcgctccgatcggtcgttggaacagtccgcctacgcggccctcgaatcgaccacagacctgcacccgcgatacctcgaacagctgtacacctttggaggcccgacccggtcccatggcggattgcccatggtatccgtcgtgtactgggcgctcgtcggccagaccgaggccgcgggcttcgaggacggtgacaacgtacgatggttccccgaagacgaactgcccgagctggcgttcgaccatcgccagatcatcgactacgcgctgctccgcctgcgctccaaaatcgaatactccgacgtggccacccgactgctcggccccacgttcaccctgcgccaactgcacggcgtctatgaggcgattggcggcgaaaccctcgacttggcgaacttccgccgcaaaatgcttgcctcgggagatcttgaagacaccggggagaaggtgcgcgaaggccgccaacgaccggccaccgtctaccgctacatccccaaacgacctgtcgagaatggcacgccccacgaatccgatggcgacgacatcgtggaactgtccagacaaggcgagcgtgaagacgctctcgacgcgctgattccatccgcgcgcatctgatttttcccgccgacccgcttcgggccggcatcacagacgtatataggaaaggaaccgctatgaccgcactatccactgcgccgtccgttgacgagatcatcgccaagctgggcgcgcaaagcacctgcgatgcaggactgacccaggacccatggcacttcgacaccaccacacccagctacggtcccggtgcctcgatgcttgaccgtctgcccgccaacgcgccgcgccagcaggtgctgccggacgagtaccgcaaggcctccgacgaggaactgcagcagcgcatctccgacgccaagcagcgtctcggctccaaactgttgattctgggccacttctaccagcgtgacgagatcatcaagcacgccgatttcgtgggtgactccttccagctggccaagaacgccaccgaacgcccggacgccgaccacatcgtgttctgcggcgtgcacttcatggccgaaaccgccgacatcctctccacgcccgaacagagcgtgaccctgcccaacctgtccgccggctgctcgatggccgatatggccaacatcgaccaggtccaggaatgctgggaccagctcggcgagatctgcggcacccagccggacgccgatggcttgcagcagatcatcccggtcacctacatgaactcatccgccgcgctgaaggcgttctgcggacgcaacggcggcattgtatgcacctcgtccaatgcgcacgccgtgctggaatgggcgttcgcccgcggcaagcgcgtgctgttcttcccggaccagcacctgggccgcaacaccgcccgcgccatgggcattccgctgagcgagatgccgctgtgggatccgttcaaggcacagggcggcgccgccgatccggccgactacgcccgcgccaggatgattctgtggaagggcttctgctccgtgcaccagcgtttcaccgtcgaacaggtcgaacgtgcccgtaaggcatacccgggcgtcaaggtgatcgtgcaccccgagtgctcgatgcaggtggtcgacgccgccgacggcactggctccaccgcgtacatcgtcaaggagatcgccaacgcacccgccggatccgccattgccgtgggcaccgaaatcaacctggtgaaccgtctggccgcgcagtacccggacaagaccgtgttctgcctggacccggtggtctgcccgtgctccacgatgtaccgcatccacccggcttacctggcttgggctttggagaaccttgaagccggcaacgtggtcaatcgcatcaccgtggacgaagacaccgcccgcgaagccaaggtggcactggagcgcatgctgcgcgttcacccgtgatccgtccctggcgcccctcgtacatgaggggagctgtccgcgtagcggactgaggggagcagatgacgcaaaaacagaggaaagcaacacaatgagcaacactgaaatcgtcgtcgtgggcgcaggcgtcgccggactgtccgcggcactggccgtggccggcaccggacacgacgtgaccttggtaaccaaggccggactggtggaatcgaacacctatcatgcgcagggcggcatcgccgcggccattttctccgacgacgacccgaagctgcacgccgccgacaccatggccgcgggccatggcctgtgcgacccgaaggccgtggacatcctcacccgtgagggtgcggagcgcgtccgcgagttcgccgcggccggcgtccacttcgaccgcgacgcgcagggacacatgctgcgcggcctggaagcggctcattcgcgtgcccgcgtggtgcatgccgggggagacgccaccggcaaagtgctcgaactggacgtctccgccatggtgcgcaagaacccgcgcatccacatcatcgagaacgccttcctcaaagacctcatcgtgcgggacggccacatcgccggcgtccgcctgctgatcgacgggcaggacaaggatctggccgccggccgggtgatcttggccgccggtggcgcgggtcgtatgtacccgtacaccaccaatccgccggtctccaccgcggacggtctcgccgccgcatggcgtgcgggcgcccaggtcgccgatctggagttctaccagttccatcccaccgccatggccgtgggcgagcacttcctcgtctctgaagccgtgcgcggcgaaggcgcggtgctgctggacgaacacggccaccggtatatgaaggacatcgatccgcgcgccgaactcgcaccgcgcgacgtcgtggcccgcgagaacttccgcgtgatgcaggcgcaaggtggcaagcccgtgatgctcgacgtctcgccgatgacccgcgagaaccccgacctggccagcttcctggcccaccgattcccgaccatcgatgcctatacgcgttcgcttggcttcgactggagcaaggagccgatcccggtggcgcccgccgcgcactactacatgggaggcattcgcaccgatctggacgcccggacctccatccccggcctgtacgcggccggcgaatgcgcccgcaccggtgtcatgggctccaaccgccttgcctccaactcgctgctcgaaggacttgtctacggacgccgcgccggtcttgccgccgtcgcggacggtgacgacgcggtctgggcacccgaaccgttcctgaactccgccaccggtgccgtgttcgaccatgcgccgatcgcgctggccgctcctgccactacggctgctgctgacgataccgccgccgacaaggtctgggaccgtgcccgcatccagaacaccatgtggcatggcgtcggcgtgctgcgcgacgaggccggactgaaaaccgccatcgccgaactcggccaaggcctcgccgccgcaaacgcccaggctgatgtaaacgccgatggcgctgcaagcagcgttgaggctttggagaaccgcaacatgctcaccgtaggctatgtggccgccatcgccgcgctcgcccgcaccgagtcgagaggcgcccacgcccgcaccgactacagcgagccagtcgacaactgggcccactccgtcgcctacatcaaggactgacccatgctcacatcacacatcatccgcaccgccgtcgaagcggcgctcgccgaagacgcgccctacggcgacatcacctgcgagaccaccatccccgcggacgaaaccggctcggcccacctcaccgcgcgcgaaaacggtgtgatgagcagcatcgacgtgttcgccgcagccttcgccgcgcagaacccggccgtcaccgtcaccgtcaccgtcaaggacggtgagcgattccagcgcggccagatactcgccaccgtggaaggcccggtacgcgacctgctcaccgccgagcgcatcgccctcaacttcactcagcgcatgagcggcatcgccaccatgaccgccgctttcgtggacgcggtgaacgccatctacggcgacgattatgacggacccgtcacccggccgcgccgctacgagcgcacccgcatcgtcgatacgcgcaaaaccacgcccggcctgcgcccgttcgagaaatacgccgtggtctgtggcggcggccacaaccatcgctacggactgtccgacgcggtcatgatgaaggacaaccatctggcggcgctcgccgcgcgcggcatcgacctggccggcgcgatccgccacgtgcgcgaacaggtgggccacaccacgcatatcgaagtggaagtcgaccgccttgaccagattcccgccgtgctcgccggcggagcggacaccatcatgctggacaatttctcgctcgacgacacccgtcgcggcgtggagctcatcgacggcaaggccatcgtggaagccagcggcaacatgagcctggagcgagtgccagccgtggccgccaccggcgtggacgtgatctccgtgggcgcgctcacccactcggtgcgcagcatcgaccttggattggattggaactagtcatggccgatacccccaacgcatccggtgaacccggcgaactgtacctggacgccgccgccaccgaatcagtgagcccggcagtcatcgaggccatgaccccgttcctgactgaggcctacgccaatccggccagtgtgcaccagcccggtaaaaccgcggcccgcgcgctggacgcggcccgcgcatcattcgccgcggcgttgggcgcccggccggatgacgtgatcttcacctcaggcggtaccgaatcggacaatctggccatcaaaggcatcgccatggcgcgcatgcgcaaactgggcttgcggccggtctacggactcgacgaaaccgatggcgaacagctggcaagcagccgcccgcgcattatcatttccactatcgagcacccggccgtggcccaatcggcggcatggctgcacgaatggttcggcttcgaagtcgtgcgcattcccgtggatgcgcaggcgcatctcgatcttgacgcgctcgaacgcgagcttgacggcgaggccggcgaacgtaccacgatggtctccaccatgcttgccaacaacgaggtcggcaccgtggaacccgtggaggaactggtccgcatcgcccacgcgcacggcgtgcccatccatgtggacgccgtacaggccgccggccagattccgattcgttttcgtgactgggatgtggacgccctgtccgtatccggacacaaattcggcacgcccaaaggactgggcgcactgctggtacgcggccgcacacccatcgaaccggtgctgtccggcggagggcaggaacgcggcctgcgctccggcacacagaacgtggccggtgccgtggcgcttgccatcggactcaatgaatcgaatgcgcgcatgcaggcgcagtgccgtgagttggtcgcgtcccgagacatgctcatcgatgcggttcgccgggtcgcgcctcgcgccgacctgaccggcgaccccgtgcgccgtctgcccggtcacgcctccttcatcttccccggcgtcaccggggaagcgctgctcgtcgacctggacgcgcgtggcatcgctgcctcatccggctcggcctgcgccatcgggcgccacgagattcctgccacgttgctggcgatgggcctcgaaccgtccatcgccaaatcggcattacgcatgaccttccgcaagccgctgacccgcgaacaagtcgaacgcatcagcttggccatcgaagagtcctacaccgacctgacccgacactaaatctgacgccacttaccagaaaggaaacgacgtgagcaccaccactccagcgcaacccgcgcagctcacccgcaacgagcgcctcgaccggctgcccttcaacaaggcgcaccgtaaactcctcgtcgcctccggcatcggctgggcattcgacgccatggacgtcggcctcgtttccttcgtggtcgccgccatcgcagccgacccgcacttcaacctcaccccgaccgaaaagtcgtgggtgctgtccatcggcttcgtcggcatggccatcggcgcggcggtgggcggcttcatcgccgaccgcgtgggccgcaaaaccgtgttcaccgccacgctgatcatcttcggcatcgccaacggtgccatggcgctgtcctggtcgctcggcatgctgctcggcgcccgactgatcatcggactgggcttgggcgcggaactaccggtcgcctccacgctggtctccgagttttcgccgaccaaacagcgcggccgcatgaccgtgctgctggaatcgttctgggccgtcggctggatcatcgccgccataatcggctacttcgtgatcccgaacaccggtgactggggctggcgctgggcgctggccatcggcgcgctgccactgctctacgcgattgtcacccgtgtacacatcccagaatccgtgcgattcctcgaagccaagggtcgcgaagacgaagccgaaaaggccgtgcgctacttcgaggaagccgggggagtggccccggtaacctctcccaagggcaagccgctgccgaagatcaagacgcgcgagctgttcggctccaagtacctggcccgcaccatcgccatctgggccacgtggttcttcgtgaacttctcctactacggcgcgttcacatggatgccgtcgctgctcgccgaccagttcggctccctgaccaagtcattcggctacacgctcgccatctccatcgcccagctgcccggttacttcctggccgcctggctggtggaggtctggggccgccgcaagacgctgagcatcttcctggccgtctccgccgtggccgccttcgcgttctcgcaggccggatcagcggccctcgtgctcgtgttcggcatgctgctgtccgcctccaacctcggtgcgtggggcgtgttgtacgccgtgaccccggaaatctacccgacccgcctgcgtggcgcggccgccggtgccgccgccgcggtgggccgcatcgccgccatcatcgcgccgctcctcatgccgtggttcctgaccctgtccggcggcaacaaggccgtggccttcatcatcttcgcggccgccttcatcctcgcctgcatagcagccctctgcttgcccgagcgcaaaggcctcaatctcgaagactgattacacttcagccttcgctactaaagtggcccacaccaatgtgtgggccactttttgtcttatagctcccgaatgacacggcaagggttgccgtatgtcactgatcaatcgagggaacgacgggtgagattgcgcggtggttttgtgaccagccacgccaccagcagtccggttgccactacgccgaatgccagcgccgcctgcaatccccagatcggcacggtttccagccaatgaccgtccacaccgatcctgcggttccatgccacatgcagccatcccaacgccacgccggataccacgcccactggcgcgccggccagcagaatcaccgcagccttcgtcaggccgtaacgtctgaggaatcggggtggcgcgcccacggcgaccatcgtggccatgtcgcgctgggcctgcgtgcgggccagcagcagtgaaacgagcgtggccatcagtgccagcaatgccaacaggccaatgggcaccaatgccatattgtcaccccacggcaggcgattcccgtcagtgctcgtggatgccagcggcagattttcgattgcataagctgaggccttctttacggtaacgggggagttgccaccggcgaagtctagatactcacccagataccgcaattgtttgatgccgagcgcctgtgctgttgccgggctcatcaccagcgggtacgcgccgcgcacgtagatggccttgcgcttctcgatatgtgtggcctgagattcgtttgcaattgccggattcggcgaaatggccacacgcaccatacctcccgcgtcgattgtgccggcatcgccgaccaccacaccgcccgcatcaagcacctgtgccgcctcatccgcgttcgggaagccggacaaacgcatcgcattgccatccataatgagattcacgccgcggaaactcggcagtatattcgaatacgttggctgatgggaccggtctatcggcacacaacgtatcggaacgtttggatacagggccgaagcggcatcctggcccacccatgtggacgtgtccggttgctcttggatcgttgggttatcacaagtgtgaccggccgggagcaatgcagcggcatacatgtagccgtgttcggcgttcaacttgtcggaatcgacttcggtcgtatcattgagctttgaccatcgcttgacatcctcggtgtacaccgggtaatgagcgcgtatcggcgtctctttgccaagccggtgtatcgcatccgacaccacagcacggtcgaactcattgctgacatgcacgtcggccccaatggccatccccgacggtccatacgtcatcgtcatcgtggaatttcgctggtccgccaccatggagccggtgattaccagtgtgtacgaggcgatgcacatggtaatcagcaccgcgcatgccgccggaacgaaccgtcgatgatgctcggctgcatccctgagtgccaggcgtgcgccgatgttcagttgggaacccgctttgccgcaccaccgtgcaaaagtgcgaatcgacaacgcaagccctatgacagccaacaaaatcgtggcaacaagcagagccatatgcgtttcggttccggccggaaccgcgcccggattgtgatcggccagcgtgggcaatggcaatgtcagactgagcgcggcgcatacgatggagaccaagaccagaatcggaccaaccgcaacacggagcagtctcaaaggattacggcgaagcttcgtatccacgccattcgcggattcaccgtagccgatttcctctcttgtcgggcaatccttcaacgcatcgactggatgcatacgcgccacatgccgagccggcgcaatcgtcgcggcaaatccaatgatgattgccgtgacaatacccatcggcagcgagccccacgagaatccgtgcaggatctccagcggcgtggatccacgcaatgcgcctatcgcagggccggccgccaaggtaagcgcgaatcccaatgccgagcccagcacgccaccgatggcgccgataacgagaccttgcgaggaaatgattcgactgaggtcacgtggtgcagcaccggatgcggccgcgagcccaagcacacgacgtgactgatctgccgacaccgtaaacgcgggcgtgaccagaaacagtaccagcaacatacccaccagcatggtgatgaccacagtgaccatgtggttcaacatggtagccgcatcgatctgcatcgggtagagctgcgatgcgggcggatagccgtcagtcagcacatggcgggaaatgacgatggcctgcaacaggttcatgctgcgggtgtgcgcccacgtgaccggctctggaccgaccaccaaataatggccatccacaccgacgccatcagattccaatatggctgacatccagccttccaagccccatgccgcggcttcggattcatcggtcagcccgctgactgtccaagcacgctgagtgtcggccaccgcctcgccgatgcgcccgtccaggctcatccagccatcgaacggcggagcgacgaacgtcaccgtgctaccgagagaagcgccgagattatccgccaatgtgcggctgatgacaatctgcgtattattctgcggcgccgaacccttgaccagcttcggcaacattcgttgcaatgcctcaggtgaagcctcggtcatggtcgcggtggaggccgcgttcagatcaatgtcgttcccgcttttcacgtcgatcccagccttggtctgttcgccgggttgcaacgcggtgccggtgatggcgatgagttcgggcgactgccaatacgggagcagccgatcctgttgcggcagaatcttcgcaagctcggcggccgaggccggctgctgggagggatcgtcctgccacgtgccgccgctttcgggtgactgccggaacggttggccggtgcggggcctggcggtggcggtgatgaccgcctgcgtatcagccgggattgtcgccagcgcacgcgatctggtgggcggtatggtggtggtcataccgatggaggccaccattgcggcgattggcagcattaccagcagcaaggacagtagggtgcgggccttgtgccgtagtgcgtcgcgccagccgagtcgcagcgcggcccgataccggttgcaacgtgcgccaaggcttggcctagcggcatggggaatttgggcagagcgaccgacggtggcattggcaagattattgagggctgcgcgtgccatcatgctcccctttcctcaaggttgagcaaatcatccatattgctggagccggtttcatcgatgatacggccgtccttcaaaaacaccgtgcggtcggcccaggcggcgaagcgaggctcatgagtgaccagcagtacggccgcgccgcgatctgcgcgggtgcgcaacacttcgagaatcgtcatgccggcattggaatccagagctccggtcggctcgtcggccagtagtagacggcgtgggccgaccagtgcgcgggcaatcgccacacgttgcgcctggccgccggacatgtcttcaggtcggcgatcagccatatcggctacccccacttcattgagggattgcatcgcggcctcacgtgccttgcggggattccagccatccaattccaaggggaacgacacgttctcggctgcgctcagggaaggcagcagattgaaatcctgaaacacgtagcctatcgatttgcggcggatggccgcgcgttcggccactgacagtgtggccagatcgcggccttcgaccagcacgtgcccctgcgtgggcacatcgagcccgcccgcaagattgagcaaagtggatttgccggaaccactggggcccatgatggccacgaattcacccgggcgaagcgtgagattggcgtgactgagcgcggtgacacgacgtgcatctttgccgtgaacgcgagtgacgtcgtgtaattccagcgcgcatggggaagattgcgggagagaagaaagaacgggagaagtcatgatgtgctcctatgcactattgaatggtggcggtgagtgcggctgagcttgccgtgagaggtgccgaaacggggtgctgcgccagttgtgctcgcagctgggtctcatccacggtatcgagccagcgcaattccgcttcagtgatgaaaatatggtggtcgagtactagacgtgtggcgagttcggtgggcggtgtttgccggcgcagtcgggtgatgtcgtgcagcagttgctgcaaagcgtggcgttggtgttggatgagttcggaaacatcgaggccgggtatttccacggcgacggccagcttcatcaccagttcgtcgcgtccgcgttgttccggggtaatgggggagcgccaccatcggtcaagctcttgggcgccggaattggtcaatcgccataatggtgcggccgctgcggtgccgacatcattggatccgctagtagtcggcgcggtctcttcaatcagtccgtcgcggttcaaccgctgcagcgtagtggaaacttgccccatattgagcggccaagtcagaccgatggtgcggtcgaagtccttcttaagctgataggcgctggccgggcctcgctccaacagtgctaatagcgcttctctgattgccataccgcatcccctttgcatagacggtttgccttgggtgaaggttactgagtaactatcgttggatatcaggttactcagtaactacccatgacggtgctgtactcagggatgattcaggggagattcaggggatacacttggcgcccctcagttgcccacggcgacagctcccctcagggaggggagtcgagagtgtggaatacaaaaagtctcgcaagccagatgacatgtgactaattctcagaaagccgggcccgttgtgtgtcaaggtgtgccagtaacatcgtgacggtttgtgtgtaggtacaggttgatatccaagagcaagtactcgagaacgcaagtaccgaacgattacgcaagaaaatcagtattaagagaggtttcgatggcggttcgtggagatatccgtaatgtggcgattgtggctcacgtcgatcacggcaagaccaccctggtcaatgccatgcttcagcagtcgcacgtgttttccgagcgtgaggaagtgccggatcgtgtgatggattccaacgatctggaacgcgagaagggcatcaccatcctcgccaagaacacggccgtggaatacaccggtccgctggccgccaagtacggccacccggagggcatcaccctcaacatcatcgacacccccggccacgccgacttcggcggcgaggtcgagcgcggcatctccatggtcgacggcgtcgtgctgctcgtggacgcctccgaaggcccgctgccgcagacccgcttcgtgctgcgcaaggccctcgaagccaagctgccggtcatcctgtgcgtgaacaaggtcgaccgccccgacgcccgtatcgaagaggtcgtcggcgaaacctccgacctgctgctcggcctggccgacgacgtgcagcacgagggcatcgacctgaacctcgaccagctgcttgaaatgccggtcatctactgcgccgccaaggccggctacgcctccgtgaaccagcccgccgacggtggcctgccggacaacgacaacctcgagccgctgttcgaagccatcatctccaccattccggcccccgaatacgaggaaggcgccccgctgcaggctcacgtggccaacatcgactcctccgacttcctcggccgactcggtctggtccgtatctacaacggcacccttgagaagggcaagacctacggcctgtcccgtgtggacggctccctcgagaacttccgcgtctccgaactgctgcgcacgcagggcctcgagcgcaccccggtcgagtccgcgggccccggcgacatcgtggccgtcgccggcgtcaacgacatcatgatcggcgagaccatcgtcgaccccaacgacccgaagccgctgccgctcatccacgtggacgatccggccatctccatgaccttcggcaccaacgactccccgctggccggcaccgagggcaaggaccacaagctcaccgcccgcatgatcaaggaccgtctggaccgcgagctcatcggcaacgtctccatcaaggtgctgcccaccgaccgccccgacgcctgggaggtccagggccgtggcgagctggcgctggccgtgctcgccgagcagatgcgtcgcgaaggctacgagctgaccgtcggccgcccgcaggtggtcaccaagaagatcgacggtgtggtcaacgagccgatggaaaataccaccatcgacgtgccggaagagtacatgggtaccgtcacccagctcatggccgaccgtaagggccgtatggacggcatgaccaaccacggctccggctgggttcgtctgcagttcaccgtgccgtcccgtggtctgatcggcttccgcactgctctgctgtccgccactcgcggcaccggcatttcctcctccatctccgctggctatgctccgtgggctggtgccatcaccattcgtcagaacggttccatggtttccgatcgtcagggtgtggccactccgtatgccatgcagcgtctgcaggcccgtggcaacttcttcgtcgaaccgcagtccccggtgtacgaggggcaggtcgtgggcgtgaacaacaagcccgacgagctggatgtgaacatcacgctggccaagcacatgaccaacatgcgttcctccaccgctgacgtgctcgaaaccctgaccccgccgatcaagatgagccttgaggagtccctggacttcgccaacgaggacgagtgcgtggaagtcaccccggagtccatccgcgtgcgcaagatcatcctcggccgtgaggactggtacaagtggcgcgccaagcagcgccgccagaacgccgcccagcagggtaagtgatctggtgcgactgtagccgaccattctctctggctcccctctctgaggggagccaagtttattcctcgccaagtcatatccccacctatactgaaacgcatgactgtgaagagcactactgaactgcgtccgtggtcgtatcgccagaacgcgctggtcaaatcgttgatcacgattgcggcgggcgtggcttccgcctttgtgggcacgttcgcccaccgtatgggtgcagaactgagtattccgtatggtctggtgctggcatttctgctgatcggcctatcgacatggtgcgcccgttcgcgcatgggcgcggtcggactggccctgcacctcatcgcctcctcgctgaccgcatggggcatggcactgaccaccacatccggcaaggcggtcatcgtcgccggattccaaggcgacatgccgttcttctcccagcatgccggctacatctggctgtacggcctgatactggtccaagtcgtcctgctcattcttcccgcccgctggttcgttattcccactcattctgaatcgcgcgcgtaactatatatggcggcacatttccgcgaatgcgtcgcgtatcggcgggcgtaggggattacggccgctaccatagaaccttatggcacgcatgaaactgttttacttgggcccggaaggcaccttcacccatcaggcggcaatgacggccgccgaccagttcgccacactcggcgacttcgacctcaccgccctgcccgacgtgcccgcgatcatgcaggccgtacagtcgcgccaaggctggggcgtcatcgcatgggaaaacaacgtcgaaggctatgtggtcccgaatctcgacgcgctgatcgacgcccccgacgcggccggcttcgcccggatcagtgtggacgtggccttcaacgccttcaccgtgcgcggccacagcatctgcgactgcaccggcaaccccgtcagcgcccacccgcacggcctggcccaatgcacccggttcatcgccgaacaccatttgcagcccgaacccgcatcctccaacgccgccgcctgccgcgacctgaagcccggccgcgtggcgctcggccccagcatctgcggcgaactctacgatctcgacaccctcgccgaacatgtgcaggatttcgatggcgcgcacaccgaattccttgtcatcgccccgcgtgatgtggtccaggaattcaacgcccgcgcccaccgcaatgacgccggcgacttcgaaaccatcatcaccttcatcccgctggtcaccggccccggcgtgctcgccgacctgctggacgtcctgcgtgatgcggggctgaacatgaccagcttcatctcgcgcccgatcaaaggccacgacggaacctacagcttcatcgccacccttgacgccgccccttgggagccaagattccgcaccgcactggaagagatcgccggacacggcgactgggcaaaaaccctggccgtctacccacgccgcgaacgcccgaacccgccggtcgacgcctggatgctgcccgagggcggcgtccacatcaccaatcgtgcgtcggaaggctggcagtacgccgagggagcaaggaaggaactgctgtggtagacacagtcggaatcgtcggactcggattgattggcggctcgctcgcacgccgcctgaccgagcgcggcgtacgcgtcatcgcgtggaaccatcgctcgcacccctacgcccaggccgaagccgatggcattttctgcaagagcacgctctccgaactcatggatgccgagccggatgtggtcgtgctgtgcaatccgctcaaggcgatgccctcaatcctcgccgccctagccccgcttatgggtgaccatccgaacaccacgctcaccgacgtgggctcagtcaagggcatggtccgcgatcaggtcaaggctgccgcgctggggaagtgctacgtcggcgcccatccgatggccggcaacgaactgtccggctggcaggccgccgacccgcatctgtacgacggtgccctatgggccgtcaccgtggacgagtccacggactaccgccgcttcctcgacgtcgccgcgatgatcaccaaggacgtcggcaaccgcgtcatcgtcgtggacgacgaaacgcatgacaaggccgcggcgatgatctcccacatgccgcatgtggtgtccaccgcgctgatcaacgaactggtcgccaacccggaccgcaacatcgccgccgcgctggctgccggctgctggagggacatgacccgcgtgtccctgaccgacccggaccgcacgcgcgcgatggtcgaggaagactcgctgaacgtcgaagtgctgctgcgccgcatggcggcacgtctgaccgatatggccgaccaactgcacgctggtgccgacggcgagcaggatgtgatgggattcttcgccgaaggcgaccccttccgccggtacaaggccgccgtgacgcgagccggcatcaccgctgcacaagctggtacggccaccgcgcagcaagccgacacaactgccgccggattcccggaacgcgagctcgccgtccccgaagccggctggcagcagaccttgctgttctccgcacgccggggagaagccatcaccggtttcatccatccgcgtcaggccatcgtccaactgcgccccgccatgtaactgcgccccgccatgcagcccgtgtgcaggttcccctcgccgcctgtcacgaagaaggctgcgcgagggggatgaagttcccgcttgttttcgtgagaagaccgtgtggctccgctgttcgaaagacccaaaggagtaaggtagtctgtaccgtttttcgggaaacgcatcgaagtgaatgcggcggatggttaaggggatgatgacgtatgacgttaccaaggcagattccggccggtgcccgcgtggtggtgcgcatcaccgacggcattgacccggtcgaccaccgtatgaagttccgcgactatgtggggcatgtggtttcctgggatggatacacgttggagatggtgcgtgacgccgccgccaatggttcgcgcccggcccagaacgtgaccatccatcaggaacagattgccacattgaaacccgtgccggagcggcgcaacacgccaccccggccgtaacccaaggccataaagaattcggaggagaacgagagtgtcatctacgcagctcgacggcgatatcgactccttcgtctcctatctgaagtccaaccgcggcctgtcagcgaatacgctcaaagcgtatcgcgcggatctcacggcatgcctgcacctgttcgagctgcgcggcgtgaccgatctgaacgagatcacgctggatgatctgcgcagctggatggcggtggaatcgcgcgatcacgcccgcagcagcatggcccgcaaaaccgtggccgtgcgcgggttcttcgcgtgggcctatgagcatgggctgaccaccaccgacccggccgccacactgatgactccctcgattcccagcacgctgcccgcggtgctcaccgaatcccaggccgagcaattattggatgtcgctgaacatgccgttgcaacaaaccagtacaaggacgatgggggagcggcagccgcgtccggcagcggcagcggcaagacagctgataagtcggccgataccgtaaaccgcagtgaggcacccgcccgtgcagacaagcgcgacaacgcccgagtcaccgccgaatcgcagcgcaacgccgcgattctcgaactgctgtatgccaccggcatccgtgtcgccgaactggtgtcgatggatatcgccgacatcgacttctccaatcgcaccatcaaagtcaccggcaaaggcaacaagcaacgcgtggtgccgttcggactacccgcccagcgtgcgctggagacttggctggaacaggggcggccggtactggcccgtacggcaacggatgcagtcaagtcccgtgctgccaacgccctgttcctcggcgcacgaggcggccgtattgaccaacgcatagcccgtgacatcgtgcacagagcggcccgagaggccggcgtgccggacatcagcccccatgcgttgcgtcattccgccgccacgcacatactggacggcggtgccgatttgagggaggtgcaggagatgctcgggcattcctccttgaaaactacacaacgctacacgcacgtctccatcgagcagctcaagaaccgttacggacaggcctttccgcgggcatgaccactatgtggacattggttaacaaactcagcaaagactgaacctagccggcaagaacccctgaattttacatgggtgtaacaaaaaatacactgcttgtctcccaagtgcgcaaaaatgacaggtaatcagcaacggggttggattgttcgagacatcgtgagatgcaagtctcacggtgacggggaatccagccccgtttgcatgaggcggggctgagacgtcctgcaacctaatgaataggagaaatcatatgaagaagaaagctcttgctttcgctgccatggcctgctccgtggccatgctgctgagcgcctgcggcggctccaacagcaacgctgcctccggtaacaccgctggctccaacatcatcactgcgtacaactccgaaccgcagaacccgctgatcccgggcaacaccaacgaaaccggcggcagcaagccggtcgacctgctgttctcccgtctggtctccttcgacaaggacggcaaggcttccaacgaagtggccgagtccatcaccccgaacgatgacgccacccagtacaccatcaagatcaagtctggctggaagttcaccgacggcactccggtgaccgctgagtccttcaccaaggcctggtcctacgtggccaacgccaagaacgcccagaagtgctcctccttcttctccaccatcgccggctatgacgatctgcagaaggatggcctcaagggtgacgagcagctctccggcctcaaggtcgtggacgacaccaccttcaccgtcgacctgaaccagtccgactccgtgttcccgattaaggtcggctactcggccttcgccccgctgcccgagtccttctacaaggacccgaaggccttcggccagaagccgatcggcaacggcccgtacaagctggaccactgggatcacaacaaggaaatcgccctcgtcaagaaccctgactacaagggtaacgagcagcccaagaacgacggcgtgaccttcaaggtctacaccgacgactccgccgcttaccgtgacattcaggccggcaacctcgacgtgatggaatccgtcccggccgccttcaccaagaccttcaagaccgacaagaaggtccaggcttactccgaggtcggctccgtcatccagaccttcaccatcccgtcctcccttgatcacttcaagaacgacgaggaaggtcagctgcgtcgtcaggccatctccatggccatcaaccgtgaccagctcatcgacaaggtgctcaacggtaacgccgccgccgccaccgagttcacctccccgaagaccccgggctactccgactccctcaagggtgccgacaacctgaagttcaacgcctccaaggccaaggaactgtgggccaaggctgacgccatctccaagtacgacggccagctcaccttctcctacaacgccgatggtggtgccaagccgctttacgacgccgtcgtgaaccagctcaagaacaacttgggcatcgacgcggccaccaacccgatcccgaccttccaggagttccgtgacgccgtcaccaaccgtcagatgaagggcgccttccgtaccggctggcagcctgactacccgtccgccgagaactacctgtggcagctgtactccaccgctgctgctgacggcaacggctccaacgacggtgactacaagaacccggccttcgacgacatgtgcaagcaggccgccgccgccaagtccgtcgatgacgccaacaagctgtaccagcaggctgaggaaatcctcctcaacgaccttccggccatcccgctgtactactccaacgcctccggcgcggcttccctcagcgtgaagtccggctacgccttcgattggcagaacctcccgacctacaccgagatgtccaagaagtgagtctgactcactgaacggataccgttaggcagttcggaaataaagggcgaggatcgcaagatccccgcccttttttgttgtgtgaggggtgcttgcttccgctggcgggagctgtcgccgtaggcgactgagggtggtgacaccatgatgaaccaccctcagtctcgcttcgcgagccagctcccgacagcgggaaccaagttaaagtatccactatccgaccgcaaccatggacatatccaccagcattgcccaatctcaaaccttgcgttaacgcaaatttacatatcacagtccgggcatgcggtaaactgtcggagtatttatcgaccggcgggggcgtactataccctttctggccggtctaggaaataaggagcaaccgtatgggtaagtatcttctgcgacgcattctgcagatgattcccgtggttctcggtacgactcttctggtatatgcccttgtattcgccctgccgggcgaccccgtcaaggccatgttcggagacaagcctgtcaatgaggccgtcgcagcccagatccgcgcagaataccatctcgaccagccgttcatcgttcagtactttatctacctgaagaatgcactgaccctgaacttcggcgataccttcgccggccagcccgttctcgacgaaatcacccgcgccttcccggtcaccatcaggctcggcttgatggcgttcgtgttcgaggcgattttcggtgtggtcttcggcattatctcgggcctcaagaagggcaagtggtacgacaccgttatcctgatcgtctccctgctgcttatttccgtgccgaccttcgtcaccggcttcgtcatgcaatatgtctttggtattcagtgggcgatattgccggtgacggcaggcgccgaccccggcttccttgatctgctcatgccggccatggtgctcggttcggtgtcgatggcctatatcatccgactgacccgctccgaaatctcctccaacatcgccgaggattacgtgcgcaccgcacgtgccaaaggtatgtcgaacggtcaggtcatgctgcgccacgtactgcgcaactccctgattccagtcgtcacttacctcggccaggacatcggcgccctgatgggtggtgccatgatcaccgagcagatcttcaacatccacggcatcggcttcctcacctaccagtccattctgaagggcgaggcaaacctggtggtgtccatcgtcacgttgctcatgctgattttcgtagtgtgcaacctcgttgtcgacatgctgtacgcggccctcgatccgcgtatccgttacgcgtgatagggaggagtgagtcacatggcaaacgaaaccactgaaaacgagctcaaccagaccggcgagccaggaaccgaatacttcatggaaaccctgcccggtcaggaccgttacgtagctcctctcgacgagaccccgttgcaggacgtcgattccgtcgacgaatccgcaccggccaccagcatgtgggccgacgcatggcgaaccctgcgccgcaacccgctgttcatcatttccggcttgctgatcctgttcatcatcgtggtggccatcgcccccggtctgttcaccaagcaggatccgaacgcctgcgatctgggcaactccttgagccccgcctccgccggacaccccttcggctacgacctgcagggctgcgacgtgtacacccgcgtggtctacggcacccgtacctcactgtccgtcggcgtgctctccacgctgctggtcgtgattgtcggtaccctgatcggtgccgtcgccggcttcttcggcggttgggtcgacgcggtgctgagccgtatcaccgatatcttcttcgcgctgcctatgctgcttggcgccatcgtggtgcttcagatgttcaagacctccaagtccatctggaagatcgtgctggtgctgacgctcttcggctgggtcggcgtatgccgtatcgcccgaagcgccgtgctggaatcgaagaacctcgaattcaacaccgcttccacggccctcggctccacgcctgccagaaacctgttccgtcacatcctgccgaactccctggccccgatcatcgtcatcgccaccacctcgctggcctcctacatcgtggccgaagccacgctgagcttcctcggcgtcggcctgcccaccaccacggtgagctggggcggcgacatctccagcgcgcagaccaacctgcagaccgatccgatggtgctgttctacccgtccgccgcactggccatcaccgtgctcgcgttcatcatgatgggcgacgccgtcaaggacgccctcgatccgaagagccgtacggcctgagcgaggggagtggagaatcattatgactgacaacaccaacgccaagatgctggctatgcagaaagagcatggtccgctgctcgaggtcaaggatctggccatcgacttcaccactgacaccggcaagccggtgcatgcggtgcgcgatgccaacttcaccgtctaccccggccagtgggtggccatcgtgggcgaatccggctccggcaagtccacctccgccatggctgtgctgggcctgctgcccggcaccggtcacgtggtcaacggttccatcaagcttgacggcgaggaaatcgccggcgccaagcagagcgagttcgacaagctgcgcggtaccaagatgggtctcgtgcctcaggacccgatgagcaacctcaacccggtgtggcgtatcggctcccaggtcaaggaggcgctgaaggccaacaacatggacgtggcccacgagaagcgctcctccctcgccaaggctctggccggcgacgaggtcgaagtcaagggcaacgacgacgagaccttcctcggcaccaaggaactgcccgagctcatgaccgaggccaagaaggccctgaccgaagccggcgtgtccggcgaggccttcgacaaggccgtcgcccgcttcaccaacgaatgggttccgggctccgaaacccgttggcgcgtggccgacgacctcatcaaggccggtgtggccgatgatcaggcctggtacctcgccaagaagtacgtcatcggctccacaatggatgaccgcatcgcgggtctgctgtccgaggccggactgcccgatgcggccacgcgcgcccgtcagttcccgcacgagttctccggtggtatgcgccagcgtgcactcatcgccatcggtctggcttgccgccctgacctgctgatcgccgacgagccgacctccgctctggacgtgaccgtgcagaagcgcatcctcgaccacctgcacatgctcaccgactcactgggcaccgccgtgctgttcatcacccacgatctgggccttgccgctgagcgtgcccagcacattgtcgtgatgtacaagggtcaggtcgtcgaatccggaccgtccctcgaggtgctgcagcacccgcagcacccgtacaccaagcgactcgtggccgccgccccgtcgctggcctcccagcgcatcatctccgccaaggagcgcggtgagaacgcggacgccctgcttgaccaccacatcgccggcgaaagcacgcttgagaaaagcgagcacatcatcaccgtcgaccacctgaccaaggaattcaagctgccccgcaagaaggagatgttcaaggccgtcgacgacgtgtccttctccgtcaagcgcggcaccaccctggccatcgtgggcgaatccggttccggcaagtccaccgtggcgaacatggtgcttcacctgctgaatcccacttccggcaaggtgttctacgaaggccgcgacacctccacgttcaaggccaaggatctgctcggtttccgccgccatgtgcagccggtgttccagaacccctacggttcgctcgacccgatgtactccatcttccgttccatcgaggagccgctgcgcatccacaagattggcgataagaagtcgcgtgccaatcgtgtcaaggaactgctggacatggtcgagatgccggcttccgtgatgggtcgttacccgaacgagctttccggcggccagcgtcagcgcatcgccatcgcacgagccatggctctggatccggacgtcatcgtgtgcgatgaggccgtctccgccttggacgtgctggtgcaggatcaggtgctgcgtctgctcaacgacctgcaggccgagaagggcctgagctatctgttcatcacccacgatctggccgtggttcgccagatcgccgacgaggttgtggtgatgcagcacggcaagctcgtggagcacgccaccaccgatgaggtcttcgaccacccgcagaagcagtacacccgagacctgctcgacgccatccccggcggcaagctccagcttggtctggactgataatctgcgtttgagcgcattgtattgggttctttccatccgtggaaagaacccaatattcgtatgtgcaggtttgcatgatggttcgcgtgggacgaaaacgcaaaaatcggtgttttcccgatgttgtcccacaatttgtgggacaacatcaacatcaatcgatagacatgagtgttgtcccacagcagatttctcacgaagcccggaattacgccattcttagtgtggttgataattactcatgctgtggggcgtgggacgacccgcaaaaatcgtcgattttcggatgttgtcccacggaatatgtcatacctcgtatgtgatcgtgagtggggcgtgatcggaccagcgtttgtcatacgtgggagccttgtcgatgacgaatccgcgtgcggtctccgccagctcgggcgtggcgaactggtagtcgattctccagccgacattgttgtcgaaggcgcgccctcgttggctccaccatgtgtacggcccctgaatatcaccggccaacgaacgcatcacatccacgaactcgtattcgtccagccatttgtccacgtaggcacgttcttcgggcaggaatccggcgtgcttctcattggccttggcgttcttgatatcgagcggcgtgtgtgcgatgttgaaatcgccgcagagcacggcctgtttgccgccatgcgcagcctcgtcccgcaacgcgcccatgcgcttcagcatcgtgtccagaaaacgatacttctgttccattttggtcggatcatcggtgttgccggcatgtatgtacacggatgccacggtgatcgtatagccctcaggcgttttgacatcggtttcgatccaacgccccgaatccacatcctcgctcagacctggcagaccatatcgcttgtcaagcacttccaagtcggtgagcagcccgactcccgcgcggcctttcacccggcagacctcgttcatggtatggaggtcggccggcgcgtcgattttgccggcggtggcgtattcgaaaccaaattcatcgaaaatagaatcgacatcgtcctgaggcgcgcgaacctcctgtatgcaccagacatccggcgcatgcttgccggcccaatcctcgatgcccttgcgcttggccgcacgaatgccgttgacgttagacgtggtaatggtgatggtcatgcggccatactattttggcctccctacgaatcgaaccggacaccggcggccgcgatgctcagctttctctaagcctgagtgctagtgttagcaaggttgcaaccgttacatgaaacgaggaattatgggactgttcggattcggcaagaagaagagcaagaaggaagccgagccggccgttgagcctgtcgatgaggacaaggtggccgccgcagaagcgaacgctgccgcaaaggccgagagcgcggagaccgtgctcgccgagccggccagcgaataccagggccgcggcgaagagcgaggcccgtgggatgtcaacgatgaggacgtgcccgattatgacgattatctggatctcggcgcctactacctgcccttcctccagggcatccagctgcgcatcaaggccaaccgcgccacccagcaagtgcttggttccaccatcaccttcggctcctccagcctggagatcgaagcctttgccgcacccaagaccctgggactgtgggatgacgttcgcggtgacctgcttgaagccaacaaggccgcttctgaagtggacggtgtgttcggcaccgaactgaagctgccggtcaatgtcaagggcggcaaaaccgtgaacacgcgcatcgttggtgtggacggcccgcgctggatgctgcgtggcatcttctccggcaaggctgctatcgatccggacagcccggagaccgaggcgctgaacaagttcttcgccgacatcgtcgtcgagcgtggcgaggagcctttggcgccgcgcgatctgatcccgatgcatccgccggtcgcccccgctgagcgtaaggccgccaaggccgcggccgaagccggcgaggagaacggcaaggaacacttcaaggacattccggacaacaagccgaagggtccgctgagccaggaccagcagaccgaagtgaagaccacgctgtctcgcggcccgatgttctccgaagttcgctgatttataggaagagacttggcagacaacaaacgcaccggcctgtccgctctagccgacgccggcaatgaaggcgaggatttctccgtcatcgacgccatcggtggcccgcgtggtgtcatcgaatccatgctgcctggcgtggtgttcgtcgtactgttcgtggccacgagcaatctgaatctcaccattgcggtttcggccgtgttggcggtattgcaggttattgtgcgactgattcagcgccagtcggtaatgggcgcggtctctggtctggtggcggtaggcatctgcctgatttgggcatggcagactcatgaggcccgcaattactacatcttcggattcattaccaatgccggctatgccgcgttgcttgccgtgtcgctgattgcgcgcgtgcccggactgggtttggtcgtcgaattcatccgtagcctgcccaccgagcatttcaaggcatggttccatgactggatggacgacaaggccctgaaacgcgcctatatgattgtcaccggcctgtgggtcggtctgttcctgctgcggctggtggtgcaggtgccgctgtatctgaccaaccatgtagctgcactcggcgtgacccgcctgctcatgggcattccgttctgggcattggcgatttgggtgagttacctcattattgccacgccgatgcaccggcataaggtcgcggctaggaagatacagactgaagtcgctgttgatgccgaactcgaaccgagcgcaaccggaaaggacgatgatgcaagctgaagttcgtatcgaacgatacgccgaccaaggccgctgcgtggcccatatcaacggtcgtgtggtgttcgtccgcttcgccttgcccgacgaactcgtgcgagtcgaacttgacgagccccacgaccgggacgaccggttctggaccggcgaagtcgtcgaggttctcgagccgtccgaagaccgagtcaccccggcatggccacttgccggtcccttggcgatgggcgggggagtgggcggcgcggatctcgtgcacgtctctttgcccggccagctcaagtggaaggccatcaccgtctccgaacagatgagccgactcggccatatcgacgtggccgttcccatcgagcgcatgcccggcgacaaggcagccggcggcctcaattggcgtacccgcatcgaaatgattgccgacgacaacggcatgccatccatgcgccggcgcggcacacacaaccgtgtggccatcgacaccatgccgcttgccacgcgcacgctgctggacgtcgccaagcgcgaacacgtgtgggaaggcggctttgaacccggctcccagattcgtctttccgtgcccgaaccgcgcggcgagatcgtcgataccgcggcagcagacgacaattacgccgtacttgtggacggcgaactgcgcgccggctcccagctgctcaccgaacagttgaccatcaacggcacgaccttcgactatcaggttgacgccaacggtttctggcaagtgcatcgccaagcgccgatcgccctcggtacgcacgtgatcaacctggtcaacgggcagctgcagtcagcggcggacgccgtaatctgggatttgtattccggttccggcctgttcaccctgccgctggccacaatgaccggtgaacgcacccgcatgctcagcgttgaaggcgcgcgtgtggccgtcaagaacgcccagcgcaatctgcgcgccatgaacctgaacgacgtggacgcccgcgcgggtgacgtctcgcgcacgctggaccatgtgccggcgcatctggccaagccgaatgtcgtagtgcttgatccgccgcgtgccggtgctcgtgccaaggtctgccgccagattgccgcggccggcgcatccagcgtggtctacatcgcctgtgatcccaccagcctcgcacgcgacaccgcgacactcatcggcgaaggctacgagctcaaagacatccgtgccttcgacatctacccgatgacccaccatgttgagacggtggccctgtttacccgctgacaggtgagcatatgacacgacgaattctcggattgctagcctgcatggcggctgtgttgtccctggccgcctgcacgccggccggtagggcggtcggcgatacccaagacagcatgccggaagtcgcccacgattccacacatcccacggatgtcacagtcggctttgtggggtcgactgacaccgccgcagacgagttcgtcatcaatgcgctgtctgatgacaaactcaatgtctactatgcctcgctcgaaacatccgcaagctcggcaaacgcaactgatggtgtatccggtgaaaccgaatcttctgacgccggcactaccagcgaaaacggtgccgatagtatggatgctcatactggcgtcgacaagaatgcggccaccgcacagcagggtgttgccgatttcgtagctcgcgcggtcaaaatcgtggttatcagcggcatcgacgttaccgacgccaaccgggagagctggaaccagacgttgaccaatgcgcgtgaagccggtattccagtcgctctcattgatccaaagcatgcgcccgaagatgaactgctgtacgccgtcatccttcacctcaacaccaacagtgccgattctggcgacactgccgataccaagccaatgactattactgacgccgtgctcaccatcacgcgcgatgaaccccacgaacgcgagatcaaagtcaccgtttcctgagccgaatcaggcccttgaagctgagaaagcaccctgaatcatccctgagccttagcggattgcgaaacaagacgcggtaggctggggaatatgagtgcaacaacagccgtggaaatgcctgaaatcggagcaaccggtcttacctccaaagaagtggtgcagcgtatcgaaagtggccaatcgaatgcggtgaaaacatccacctcgcgttcggttcaagatatcgtgcgagccaacgtgttcacgctgttcaacggcatcatcttcgccgcgatggtactggtgctgatcaccggttcctggagggacgcggtgttcggtttcgtcatcatcatcaacacgggcatcggcatcgtcaccgaactcagggccaagcgcacgttggataagctttccatccttgtggcctccgaattcctcgtgcatcgtgacggcagggacgtggaggtgccccacaacgagatcgtgctcgacgacctgctgtggatccgtgccggcgaacaggtgccggccgacgggcagatcatccagacctggggactggagcttgacgaatccatgctcaccggcgaatctcgtaccgtgcgccacaaggtgggggagcaggtgtattccggtgccaccgcggtctccggcatggcattggtcaaggtcaatgcggtcggcagccattcctacgccgccacgcttaccgcgcaggccaaggtatacaagaaaaccgtgtccgacctgaacaagggcatcaacacgattctgaaattcatgaccttcctcgtggtaccgctgtgtattctgctgattctttcgcagattcatacggtcggcggttggggcacggcactctccaccggcgaatggcggcaagccgtggtttccgcggtcgccggcgtagtaggcatgattcccgaaggcttggtgctgctgacttcgctgaacttcgcggtggccgccatgcgtctcgcccgtcacaatacgctggtgcaggagcttgaatccgtggagacactggctcgcgtggacgcgctgaacctcgataaaaccggcacgatcaccgatggcggtatcgccttcaaccggctcgtgatgctcgattccgccaatgcggctgcggaacaggcagccacgcaggccctctacgactgctgcaacgaagagcagcccaacggcaccggccaagccgtactcgccgggctcaaggcccaaggatatggggcaggtgcggttgagtctcgtgtcccgttctcttcggcgcgcaaatggagtgcggtgcgtaaatccggcgagacctggtacatgggagcgccggaggtgattatttctgcgcttgagggtgactattcgtcggtgttgcagcaggttaacgagtatgccaatgacggcaaccgtgtgttgctggttgcgcggtctacagctcccctctccgaggggagctgtcgccaaaagcgactgaggggagcagttgagggagccaatgtctcggacggcccgcaactggatgtgcaggctgagccggtggcgttggtgttgtgctctgagaagattcgcgaggacgccgagcggacgctcgcttggttccgtgagcagggtgtgcgctgtcgtgtgatttccggtgacaatccagtgaccgtgggtgccatcgcccgcagagtgaaactgacaggagaccatgagccggtggcgatggacgcgcgcgaactgcccgaggacgtgaacgaactggcccgcgtgctcgaaaacgtcgatgtgctcggccgcgtgctgcctgaccagaagaaggccatcgtgcaggcgttgcacacgcagaaccacgtggtggccatgaccggcgacggcgtcaacgacgcgctcgccatcaaggaggctgacctcggcatcgccatgggcaacgcggcacccgccaccaaagccgtggcccaagtggtgctggtggattccaagttctcgcacctgccggacgtcgtggcacgaggccgtcaggtcatggccaatatggagcgcgtggccagcctgttcctcgtcaaaaccgtgtactccgcgctgatctcgctcggcgtagtgctgacgcaaatcccatacccatacctgccgcgccatatcacctatatcggcgctctcaccatcggcatgcccgcgttcatcctggcgctcgcgccgaacacgcgccgctatattccgggattcctcaagcgcgtggtcacgttcgcgctgccgggcggcatcgccactgcgctgtcggtgctgctggccgcttgggtgctgccgccggtcatgggctggaacgtgaccggcgatgccacggacctgtccgccctgcgcgccaccagcgccatcatcctgttcgcgatgggcgtgttcgtgctggcccgcgtggccagaccactcaacggttggcgtggcgtgatggtggcggtgttcgcggcggcgggcgtgatcggcgcgttcgtcccgttcgtggcgaacttcttcgccctgattctgccgaccggcgccacgatggtggccacgctgatcgcgttggccggttccgcgctgatcttcgcgctgtgcctgtggctggcgccgttcgtgcgccgactgacgggcaagctctcgcgtcggcattgagacggcggcgcgattgtctcatacttcaagccgacacgccagagcctcggtaacgtgcccgtaccatgtgtagcggataatcagcggcatcataagccgattcatgatttcggaggaagcatgtccttacgcgacgaccagctggctaccctcaaggcagccggcaaggacttcgattactacaacatcgccaatctcgacggcatcgatcatctgccgtactcgctgaaggtactggtcgagaatctggtgcgcaacatcgacggtgccaacatcaccgacgagcacgtcaagaccctgctcgactgggatccgaacgccgaacccagccacgaaatccagttcacgccgtcccgcgtgatcatgcaggacttcaccggcgtgccctgcatcgtggacctcgccaccatgcgtgacgcggtcaaggacctcggcggtgacccggaggtcatcaacccgcaggtccagtccgacatggtcatcgaccattccgtgcagatcgacaagtacggcatcgccgacgcggtccagcaaaacatggacatcgaataccagcgcaacggcgaacgctaccagttcctgcgctggggtcagcaggcattcaagaacttccgcgtggtgccgccgggaaccggcattatccaccaggtcaacatcgaatacttggccaaggtggtcatgagcaaggccgaggccaacggcaacgcgctcgcctacctcgactcctgcgtgggcaccgactcgcacaccaccaccgaaaacggtctgggcgtgctcggctggggcgtcggcggcattgaagccgaggccgccatgctcggccagccgatctccatgctcgtcccgcgcgtggtcggcttcaagctcaccggctccatcccggagggcgttaccgccaccgatgtggtcctgaccatcaccgacatgctccgcaagcacggcgtggtcggtaagttcgtggaattctacggcgaaggcatcgcctccgtgccgctggccaaccgcgccaccatcggcaacatgggccccgagttcggctccacctgcggcatcttcccgattgacaatgtcacgctcgactacctgcgcctgaccggccgctccgaagagcaggtcgcgttggtcgaagcctacgccaaggccaacaagctgtggggcgacgcttccgacccggattacgtggaaccgcagtactccgaatacgaggaactcgacctcggtaccgtggtgccgtccatcgctggcccgaagcgcccgcaggaccgcattctgctgtccgaagccaagagcatgttcgagaagaccgcccccgcctacgagaccgagaagaccgtcaaggatccggtggccgtgtccaccgacttccgtggcgatttcgacatcgaaaacggcgacgtggccatcgcctcgatcacctcatgcaccaacacctccaacccgtccgtgatgatcgccgccggcctgatcgcccgcaacgcacatgccaagggccttaagcccaagccctgggtcaagacctcgctggctcccggctcgcaggtcgtggccgactacctgaaggccgcggggctgcaggacgacctcgatgcactcggctaccagctcgtcggcttcggctgcgccacctgcatcggcaactccggcccgctgctgcccgagatttccgaggcgatcaacgccaacgacctgaccgtcaccgccgtgctttccggcaaccgcaacttcgaaggccgcatcagcccggacgtcaagatgaactacctggcctccccgccgctggtcatcgcctacgcgctcgccggcacgatggacttcgacttcgagacccagccgctcggcaccgacgcggacggcaacgacgtgtacttgaaggacatctggcccaccaatgccgaggtcgccgccgtggtcgacggcagcgtgagccgcgagatgttcctcaaggactacgcctccgtgttcgacggcgaccaccgctggaagggcctcgacgtgccggaaggcgagctgttcgcgtggaacgacaagtccacctatgtgcgcaagcagaccttcttcgacggcatgaaggccacgccgga

SEQ ID NO: 3123 - DNA, 3285 bp, Unknown
  R215_18m  MAG No. k141_25900
accaccattatcgattcggtaaataccgaaactatcgccgcccaacgtatcttgcataatgcgaatggtcgcgtaatacagctttcgaggcagcacttcgtccaattcacgggtcatcgcatacattttgccgaaactgtcacgtctaccgataatctgcccgcgcaacatacgacgatcatcaagcacatcgtggtacaggtcacgcaggaatgcaagtcgttcacgcagcaaactgttttcgtcacgcatgaatcgcaggttttctcggttacgcagctgcacgtatccgcatactgcgccggcaacgaaatacactacgaacgcaagccagttcgacgtgtcgtaaaacagcggagcgaacgacgcacccttcgacgcatacgacaacgccataccggcacatgccaaaaccgccgctaacacgcctgcgttcagtccgtacatcgtgccgacgatcaccacgaaaaacaagcgtaaatccacggtttcgagctgactgttgccttgtaccgcggcacgaagcagttcttccaatatgaacgtgatgaagatttcgattgcgatccacggtttcgaatggttgcgtagaaaatcccagatcgggtgctttccggattgttcctgagcacgcgcctctttccagcgctgaagtatagggggaagatcctgtttgagcgaatatcgcggcgaccagccatagcgcaatcgcagcacatgatcgtccgatgggtaacattggggcctgtcttcgccaaaagtcaccgataatccgggaaatgccgcgctaatcacatcagccaaatcaccgtatgtgaagttgaacacgttgggcacatggaatatttcgctttcggcggtccaatcgtcgaacatgcggtagatcagttcggcaagatcgtcggcgcagagaaagcatgtctgctggttcttttgctcgcagaacgacaatgtgcccgattccgcctgttcaaatagatgattgaaatatgcggtgacgccgttgcgatccgacgcatacaggtacgggcttcgaatgattttcgcttccagacggtaggtacgcgcataatacaggcagagttcttccgacgctcgagacatcaggcttttgctggtatcgtgtacgtcggcgttttccggatagatgaattcagattcggggccgctgaccatcagcatttgcgtttgcctgttgcaaatggcatgcagaaatcttcgcaatgttcctagatcgccgtctcggtcactgcgtggggtcagattttcggaaaagaatacgatgcgatcaaattcgtatgtggtaagggtttcggcaagggtgttggcgtcagacatgttgacgattctgagacggtcattgccgtccacggtgccttctcgttccgctatcaccacatggtctcggggaaaggcatgctgaatccaccgtttggtaatgaaatcggtattaccgaccaaaagcacttcatgctgccaccccattaccatgtttggtaggccgcctcgatggtcggggccgggtcgtcggtcctggtatgactttcctgccctgtcgttgatgatccgggggtgttgtcgccgggaacgcccccccccgtgaatactccccttaaacgggggtatggcatagttctgtccacagaccctccattgtccctgccttacggtattccagtgtaattcgttaacagacaaaattcccctcaacgggggtttcttacgccgtgcgattgcctcgcttcagcccttacttcgcgagcttggcgtactcgtcgaccatgaacttggcgatcttcttgccgccttcgcccagcagggtggacagcgagttgatcggcatggagttgaggaacatgcgcatcagggcgttgtcgagcagcttcgtcagctcgccggcctcgccggcggcggccacggcggaggtgttggtcacggtgttggtcacggtggcggtgttcgcgccggtcttggcggcgacgtcagcgatctcgaacgtggcgtagctcaggccgtagccgaacggatagtccacagacttgccgtaggtgtcgtagtagcggtagccgacgaacacgccctcgccatagtcgacatggccctcctcgcccggccagttcagcatgctcgggtcatcgttgatgtccagcggaatcgactgggcgagcttgccggacgggctgacctggccgaagatcacatcggcgagcgccaggccactggcttggccgagcagccaggattcgaggatgcccttggcgttcttggcccacggggccacggagaccacggagccgttggacagcacgaccacgacgttctggttcgtggcggcgacctgttcgagcagggcgatctgcttggcgggcatgtcgagggtgtcgcggtcgaagccctcggattccgcggcttccggcaggcccaggaacaaaaggcccacgttggtgcatatgttctccacgctgagcgccgaggcgctcgactcggcccaccccgcgcacgattatttcgccgaccgcgagcgccgcacggccaccatggcgctcaacatcaactgggccgtgccggaagatgtgaatatcgagcacctgctgcagtccggcttcgccatgatggacggcattcagctgcgttggctgcgctcccccggccaaaatctcaataccatgtgggccgactgcgaggatgttctgatgcctttgcctctttgggagggatatcgctaattggtgcggttgcacgccatccaaccggcgtgccaaacgtgggtgaggtcccatgggtcgagccgtgacgtgtcggattgtgggtcgatggcaggcaagaaatcacgattaccacgtaattggtagctccaataaatctgcccggcggatgcgctccacgctttgcgctgcatggcggcgacctcgcgatagacggcattcctcgctgaaggggttcggttcaccagattgttggccacacaccactcccccacgatcactggcgtatagcgcgctgctcggcggatacggcgttcattccagcgcacgaatagcctataacagctcatcatccatcgctccggaatcatacggaatagcggaaaatgctcggccatgaccagatagatatgcgtatcgagcatgacgccccgcatgtcctcccgcacaaaccagtcccgccaacggcccagtcggaagccgtcatggaacacgatggcttggttctcggccaaaatcgggcgcaaccggcgatacgactcacggtagaaacgcttgaggaacaccattggaatcggcc

SEQ ID NO: 3124 - DNA, 27208 bp, Unknown
  R215_18m  MAG No. k141_26954
aggaaccttgaaataccgcccaagctagggtgtttgcgacggtgcaaccctatgctatagtggcatccagaattgaagttgaatcatgcaccacttccggagaggaggtagggcgcatgagcggtgatgttgttgccccctctctgggggtacttcattgaagacctcggtcatagcgaccgaggtcttttcgtattcgcgggaccaggcctgaaagcattcggcccacttccctgaaggaaacgggccgaatgcttggactcgggtttcaacccggaaggcttcagtccagcgatttcaccacaacgacctcggtgggcacgttgcccgcggtggccttggagtaggggcacagctcctgcgtacgctcgacgagcttggcggcagcctcatcgtcaagatcgggcagaactacctcaatcttgcccttcaggccgaaggactcgccttcaggaccgagcgagatgctggcgcgcacctgactcttggccagcttggtggccgccacgcgctgctccttggcggcaagcgccaacgctccttggaagcaggcgccccagccgatggcgaacagctgctcggggttcgtgccctgacccttgccgcccatggcgaccggcgtgtccaggtcgaactccagttccggctcatggctcacggcgtggccgttgcggccgcccgtaacctgcgccgtagcggtgtagacgatttgcgatggttcgttaccttgatatgtgctcatgctttcatctcagcacgtgttcacgcccgccacaaggactgtcccaccgtagacgatgtgacatcatccacactgtgacttcgcgcacagagtcccgacaccgtcctcacctcgtttatcggcaccatgcgtgtataaccacatatggcattatcggcgaatatcggccggcagaccagttgcacaaggagaacatcatccacatggcagacaccgccaacaccaacgcctggttgccggcgctcaaagcggcgtttccgctgaccataccgatttgcctgggattcctgtttctcggcgcctcatacggcattctcatgggcaccaagggcttctcgtttgtatggccgatgtgcatgagcgcgttcatcttcgccggttcgatggaattcgtcacggtgaatctgctgctctccgcgttcaacccactcgccggctttctgctggccctgatggtcaacgcccgtcacctgttttatggactatccatgctcggcaaattcaaggggctcggctggaagcgtccgtacctgattttcggcatgtgcgacgagacctttgccatcaactccaccgcgaaaatccccgccggtatcgaccgaagctggttctacttctgggtcacgctgtgcaaccagctgtattgggtgaccggcgccacactgggcgggctgattggcgcgcatctgccgttcaataccgacggtcttgatttcgtactgaccgcgctgtttctggtgatcttcctcgatcagtggctcgccggcaagcatcgcgagcgactgtccgccgtcatcggtgtgctgacgtcgctggcctgcctgctgatattcggggccaatgatttcatgattccctcaatgatcgccatgctgatactgttcgtcgcgttgcgcccgcatctggatgtgttgcggccggccgccgacgccccggaagccacggcagaccgtgccatgagccacgcagcggaccagcagaaggaaggacagacgcgatgacgatgaccatctggcaaggcgcgctcaccatcgtaacggtggtgctggggacgatgtgcacccgttttctgccgttcctggtatttcccgaatccaagcagccgccgcgcgtcatcgaatatttcagccgagtcctgccctatgcgatgaccggtctgctggtggtatacgcactgcgcaacaccccgattctgaccggttcacacggccttccggaactcatcgcctgcaccgtcatcgtgctgctgcacgtctggaaacgcagtatgctgctttcaatcgccggcggcacgatcgtatacatgctactggtgcagctggtgttctgaggttgggctcggcttctccttcgttgatctctccctccggtcgccttcggcgaccacctccctctgtgagggaggtgctgaacgcagcgaagcggaggtagagacccgcggtcgtaagactgcgaaacacacagcatcggccacaggccgattcctacagctgcttcgccacccaatcgacgatgtacggagcgacttcctcaatctggtcgatggcgacctcgaactcgtgcttgccgccgtaccacggatccactaaatcaatctgatcctcgcggccgggcttcggcttgggcagattcgggtcgaagctgcggtacatgtgcacttcggcgcgcttgccggccggcagcatgcgcagcagggcgcgcatgtgggaggcggtcatcggcaggaacaggtcggtacggtcgatttcctcacgtgagatgcggtgtgcgaagtggtcacgcggaatctcatcaccatagccacgttcgcgtagcacgcgcacggcacgcgggtcgatcgggtggctccactcctcgtcggacacaccgctggattccacgttcacctggtcgccaagaccgcgctcattaaagaagtgacgcagaatgatctcgcccataggcgaacggcagatattgccggtgcagacggtcattacggtgtagggctgggtattgctcatagctttgaatcaatcctcaatcgggcttcaccgggccgcacacggcccgaatgtgtttttggggtcgaatgaatatgaatccggctcatgccgccataaaggacacaagccggattcgcatgctcacttggttttagccaagatacggaaacgataggaatcgatgccggactcctccttggcgggcgtatgccactcgcccacttcggcttcccgccacatcccggcctcgaccagcgacgccatatcgggcgcatagctgtcggcatccacagtgacggccagatcagtcacataggctttgtccgcgaacggcaacgcctcggcgaacagctgggcaccgccgatgatccaaatctccgaacggtccagaccgtcgtccggaatcgcctcctgacgggccatatcgagcgcgtcgtcaagactggtgaccacagtggctcccggcgcacggtacatcggatcgtgggaaacgacgatgttgtcgcggttgggcagcggccggtacttggccctaagcgattcccaagtcttacgacccataatcaccgggtgggagacggtcagctccttgaaatgcttcatatcctcggcacagtgccaaggcatgccgccattgaggccgatggcgccggcgcgaccttccttgtcgcgggcttcggaccagataagattcaccgagaaggtcttgggataatcgtcaccccagtcttcttcagtggcagacagcccggcagatccgggctcgggttcgtgatagccgctacggctactgtcatgctccatttcgcttactcctcctggattgcggaactgggccttagtgtagtggacagcgaagactcggggcccgtcgcctccacagtcttcgctgtccacgaacaacgctcagaccgcaacaggtgccttaatagtggggtgatgctggtagccgacgaccttgaagtcctcatactggtagtcgaacagggaatcggccttacgaatctcgatggtcgggtacgggtagggcttgcggcccagctgctcaaggaactggtcgacgtggttgtcgtagacgtggcaatcgccgccggtccagacgaattcgcccggcttgagcccggtctgctgcgccatcatcatggtgagcagcgagtaggaagcgatgttgaacggcacgccgaggaacatgtcgcaggaacgctggtacagctggcagcttagcttgccgtcggccacgtagaactggaagagcgcgtggcagggcggcaacgccatcttctccacctcggccggattccacgcggagacgatcatgcggcgcgaatccggatgatgcttgatgaggtcgagcacattggagatctggtcgatggtgcgattcgggtcctcgggggtcggtgcgggccaggaacgccactgcacgccatagaccgggcctaggtcgccgttctcgtccgcccactcatcccaaatatgcacgttgtgctccagcagccagttgatgttggaggaacccttcaaaaaccacagcagctcgtaggccaggcccttgaagaacacggtcttggtggtcagcagcgggaagtacttcgacaggtcgaagcgcatctgctggccgaacagggaaatcgtgccggtgccggtgcgatcggacttcagcgtgccttcggtcaggatcttgcgcaccaggtcctcatagggcatcggaatgtccgtttcgggacgtgcggggatacgggagcgaatatctgcgagttgttcttcggtaaaagccatgtgcaccagtgtagcttaggggcataatagagaagtccgatgatgcgggagagcggccaggtgccgcgctcccccgctggcatggcgatgggccagatcgccggcggctgaaaataaaggagcagctatgggtaagcgactgtgggttgaacgcaacaaggacggttcgtgggatgcgttcagcgacgatggcgcgcacattaagttcggcaaggatcgtggccagttcacgccgggcgatctgatgaaggtcgcgctggccggttgcgccgcgctgtccagccagttcgccatcgaacatacgctgggtgagggcaagggtgccaagatcgtggtggatggcacgtacgaccccgagaacgacgcctacaccggtttcgaggagcaggtggtgattgatgcttctgacgccagcctgtccgaggaggatgccaacaagctcaaggaacgcgtcacccgccatatcgacaagggctgcacggtcaagcacacctacgtacaggagaccccggtgcgcatgaacgtcaccgtcaagcactgacgtactaataaaccgacgtactaataaattgagctccctctgatgagggagctcattgtatacccggactttactgcctgtcgggatcgatggtcttttcgatctgctgggcgacttcaggctcggctgcggacaccggaatctcctcgacgccggcaatctcctccagcgacttggtaggcacttcggcgggcgagctcggcacggtgtcgagacgcgattccgcagcctcaacatacttgcgtggcaccacgtacaccgggccggccgcatgctgcagcagtccctggctggtggagcccagcagcagaccggtgaagccgccgcgaccacgggagccgacaacaacaacatcgtgatcgtagctggccttggtcagtgcgctgacggccgggccggaaacgatctgcttgttgattttcagatcaggatgcgattcctgcaacggcttgatacgcacctcaagatcgtccttgtaggactccatgatggcatcctcgccatccacgcccttcaggttcggcacagcggaaatcacgtccagttccgcaccccagcacgtggcgaagtcggcggcaatgtccagcgccttcagaccccacttggattcgtcggagcctacggccaccttggtaatcgtgttgttcaggtgcatcaggttgccgtcatcatcggtgtacggcaccactacaatcgggcagtaggcgtatgccggcagcgacgaggacgtggtgcccagcagacgctcggccagaccgcccttgccacggttaccaatgacgatcagattgtagttacgcgacaattcgacgaacaccgatgccgggtctccggtaacaatcagtgtggcggcttcgacgccctgctcgtctgcgatggccttggccttggccagaatctcctgagcatcggaatgcgcggcgttatcgtcccccatcgccgtgtaagttgcatcgaacgaaacggcggcatagctcggcagggaatatgcgcagacaatctgcagcgtcagccccgcgtgctttgcataattcgcggcccaccatgttgccttgtaactggcatgcgacccgtcaacgccgacgagaatggccttgtcgttaatcatgacgacctccttgaagttattgtggcacgaataccgcgtacctccaacaataccccgcgacactcggtttggccggtatcctccgctcaaaaagaaatccgcgtatacgaaaaaaggcacatcccaaaggacgtgccttaatacgaattcgcttaccgcataattcttgttacatcacgcggcgaatggaatatccagctccaccgaacacggaaacgttgcttattgccgttccctgcaccgggttcatagcattcatcacctgtccgttaccgatgtaaatggccgcatgagtaccattcgcaagaatgtcacccggcttggcatccgccaagcttgcgaccggagtacccacagtggcttgagcaccagaggttcgcggcagggaaatgccaaactgggagaagacgtactgtacaaaaccggagcaatcccatcctgccggagtgttgccgccggcaacatacggatagccttggaacttcagtgagaagctggcaagctcagcgccagtgccagtcattttacccaagtcaacctgtggaatcgacgcacgctgttcagagcggctggctgcagcagcagcagcggactgggctgccgcagcttcatcagcggctttctgagccgccgccgcagcagcagcctccttctcggcctgagactcggtctgtggcacatcaagagtctcgatgccaccccatttagagttctcgtcaaccgaagtggaggtggattcggcgaacaaattcttcttcaccgaactcgccttcgggaaagaacgtgaggacaccatagcactcgtctgcgcggaatcggcagaggcaaacggggctacgcatgcaaacatggcacccgtggcgataaccgccactgatgtggaaataatattcttaacgttcgtcatcagcgccttaccttagcacacatgggtcgatttcataacaggaatgtcttttcgaagatgatgtcgcgggtgtatcactcggcaggagaacgcaacgggcctcggataccgattggcatccgaggcctgcaatatatcaatcaataagactgcatcacgggatacgtaccacgatggtgagtttttcggtcatggcgctagcgagagccacgctgtagccgttccagccaccatggaccgcctgaccgttgccgacatacagcgccacatgatcgtagtgcgcgccgccattccatccaccggtgttggcataaatcagaatatcgcccggctgcagggacccgtctgtaactacgtggccaccgggaacattgacgtactcttcaggccaaccgtggaagttaataccacgggccgccaacgcttgactgaccaatgcggtgcagtccatgctctgtccgatcaaagaatacgcacggtcgatagaggcaccggcaccagcggaaaccgaaccactggcatcggaataagtaacagaagagcgagactcattacggctcgcggcgttggcctgcttctgggtcgcctgagcctcggcctccgtctgcttcttggcctcctcttcggcagccttcttggccgctgcggcatccttttccgcctgagattccgtctgcggcacatcgaggttctcaatgccgccccaatcagcattgtcctcaacattcgtggcagtggcttcagtcgtcagatctttgcgcacctgggtgtacgaggggaaggacttggtggaagtcacagtaacaccctcagctgcagtcgctgtaggaacaaacataaacgagcaagcacaggagacaatcgcggcaacaatggaagaagctacagttttggtcttcatagaaccatcaccttacacggtgcgcattaactcgtacaggatggaagaaataaaacaccccggagctattgggatatatcggcgtgtcggcacaggtcagttcggactaatacgcggtcgcaacacttgaaatgtcatttcgcgcgaacgattgccgatagggcgacgtcacatccgaacagtaatcaccgaatgtaagccaatgaaatgaatcagtagtggacgtactggaacttaccggcttcggcggcgctgaacgtacgggtcgaaatcacacccaatcccttggcattggattcggagatctcaatggagccgtcggcattgatcttttccagaacggcaacatggccgtatgtgccatcggcattggcctggccaggagcgaacaccacagcatcaccgacatggcgaggagtgttgtccacccaatagcccagagcggaagctgacgccgcccactcgccaccattgccgaagttgccgctggaaggcagtcccagttcggcacgacgctggtacgcgtaccacgtgcactgaccccacggatagttgttggagttggtgccaacggcatggttcgggttgaagccagccggcacagcatcgccatcggcatccatgagagccgacaccacaggattgttcgcattattgcgattcatcagcttggcgtccaaggtgctgtctgaattgctcagcccccaaccgccttcattggtggactgtgcggtaacggaggatgaactcagatcagtacgtgcttcggaacgagaagccgcagtcacatcgctgatgcgcttaatctgcgtggtcgtcgtggccggatcagccacgaacgagttcgtggcgtctttattgttggaaaatgcgagagcacctgcggccgtgccgaccagagcggccagtgaggccgaggcaagaatatggctacggcgttcagcggcacgagcggcctcacgaatggaacgacgagtctggggagcgatttcattgatcttctcggcaatggccggatcaagccccaaaacaacggcgtcgctgccagcggattgcaccgcgcgcacggcacgaacggaatgagaacccttgccggaggcaaacaatgccttcgctaagctgaacttctggcgcgagaccgtggtcgctttatgcgaagcatgcttcatactacgttaactccttggatgggttcggcggggtcattgcgatgacctcgtatgaccgtcacaactgagtactgtacaacaaacagaggtcaatcctcaatgcgatcccccaccatccgggcatgtcaaacgatttacgtaaccgtgcggcagggtgaaagactgccttgtttccgcccgttcccgaacctcactatccggttatcggaagaatcactaactcatgtcattccgacacaccgtagccatgatgtgctgcgtacattctgcactgcattccgcattgccgctactaccgcccggcaccccggaattccgcagtagccccgcagcaatcccgcacaccgagcattatccgcgatattccccaacactggtctacccttgaaaccatgactatcacactgagtattcccgagtcgctgaagcccgaagatggtcgcttcggctccggtcccagcaaaatccgccccgaacagatcgccgcgctcgatgccggtgccaccaccctgcttggcacatcacatcgccaggcaccagtcaagcaactggtcgcttcgattcgtgaaggtctgcgcgagttcttccacctgcctgaagggtatgaggtggcgcttggcaacggtggcgccagcgcgttctgggagattgcctgcgcttcgctgatcacccgtcgcgccgcattcggcacgtatggctcgttcagtgccaagttcgccgcgtccgccgcgaacgcacccttccttgaagacccggtgctgttccccggcgagccgggcacttaccgtctgcctgagctcaccaagggcgtggacacatattgctgggctcacaacgagacctccactggcgtggccgccccaattcgccgcgtgcccggcagtcgtgaagccggtgccctgaccgtcatcgacggcaccagcgcagccggcgctttgcccgtggacatcagccagaccgacgtctactacttctcaccgcagaaggccttcggtgccgatggcggtctgtgggtcgccatcctctcccccgaagccatcgatcgtgcggcatgcgtcgaatcaagcgctcatctggaaggcgcacatcgctgggtgccgccgttcctctcgctgaccacggcactgaacaactcccgcaaggatcagaccctgaatacgcccgccgtggccaccctgatcatgatggaaaaccagattcgctggctcaacagcaacggcggcctcgcctgggccaccacgcgttgcgccaagtccgcatccatcctgtactcgtgggccgagcgctccgaatacgccgctccgttcgtcgtcgatgcggacgcccgctcgaacgccgtggtcaccattgatctggacgagcgcgtccaggcctcccagatactgtccatcctgcgagagaacggcatcgtggacgccgccggctaccgcaagctgggccgcaaccagctgcgcgttggcgtgttcccctcggtggaaccggctgatgtcatggccttcaccaagtgcgtcgactatgtggtcgagcacctgtgatggcggtctatgcctcgcatggccgaccatatatgccatgcacattgatcggtctcaactgataccgattgaataaatcgtagggagaggtgtttgacgcccctccctactcttactacagtgcatgagtatgaagttcgcgcctctcattgaccctgccgtccgcaaacccgcgcccaagcccgtacgggtggacctgcgtaaggtgtttgccatcggtaccggtctatggattgtggcgttgattgtcgtgctgattctgctggccgtgggctacagcgtaatgccgttggtgattatgtgcgtggccggtgtcattattggcttgctactgctgatttgggaatacttcgaccgctgggactaccgccgcctcggacagtaataaagttcactgcgccaacggcaacgtcaggctgaacgtactgccttgcccgggcgcgctccatacggtcacatcgccatgatgggttagcgccacatgcttgacgatggccaagccaaggcccacgccatccgccgtgcgattgctctgttccgcaccccggtagaaccgctcgaagatgcgcgcctggtccttcttcgcgatgcccgcgccctggtcgatcacgcgaatcaccgcacggtcgccatccttgtctttggatgcggacacactgaccacaccattttccttggaatagccgatggcgttttcgatgagcttggtcacggcgctgtcgatctgatccgcctcaccattgatgactagatcatcgtcgcccttgatgttcagctgcacgccagccgcggccgcctgcggctccagtcgcgccaccgtggcctcgagctgttccataacgttcagtcggttggcggaagacggcgtaatcggctcctgtgcgcgtatgagcagcagcaaatcggacaccatatggttgagcttgctgcagctggaacgcacctggcgagcatcggcagccacctgctgttcgtccagattgccggactccagcgaatcggcgagtttggccaaagcttcagtggggcccaacaattgctcggatacattggtaataaacgagtcacgcacttgagcgaaacgaatcacgtcactgacatcggtaatcaacacgatgacgaactgctcgttgatacgccctacagtcaccttcagccagttggggcggtggacggactgcgtggcgacgtgatcgcccttgttctggtctgcgacgtaccgctccggagtatcggtggtcaagtcgaactggcgcttgccaccagacttgcgcgcctcgtgaatggcatccagcacctgctgctgggcgatggcgtcatctgacaccacacccaggcggtaggcggcgggattgcagcggaccacctcgtcgtgctcgtcgaccaccacggacgcacccggcagcatggacagcagcgtggcggtgtcgtcggacagatcgtcattgtcgtcatcatcggccagcggcgattccacggacactcgatgtgtcgcaaatcccacgatgagcgtgatgattcctaccacaaataaaacagccgcgacaataagagcaatcgcggcgacgagcggcatctgtgtcatgcccccattctttcacaccacacgccgggattgcggtttgccggcgcgccggtaacatgaatttcaggtgaacaacccaatgaacagtagaacaatttgaggttgccattacctacgttgaagtggggaacaagtactggaataatacactggtacaggttgcaataagcaagcatgaaaggctagagaaatgcgcgttattttcaacgaggagctgaagcaggttgctgacgacctcgaccgtatggcgcagaacgtgcgcaaggcgatcaaaggcgctggggaagccctgctgaatcaggacgttgaagccgcacagactgtgattgacggcgatatcgagattgatgccctggagtcctctgtgatcgaccagtgcgtcaagctgctcgccaagcagaacccggtggccaccgatctgcgtgtggtcgtttccaccatgcgtctggcttccacgttcgagcgtatgggcgatcttgcccgccacgtggccgaggccgctcgccgcacctacccggccgccgcgattcccgaatccgctcagccggtgttcgccgagatgatcgacttcctggacaacaccgctgaccagctggtggccatgctctccgatcgcgatgccaagaccgccgaggccatcatcctggccgacgacaagctggacaacctgcaccaccagaccttcgatctggcgctgtccgatgacatcacccgtcagcagaccgtggatatcgtgctgctgggccgcttcctggagcgtctcggcgatcatgccgtgtccgccgcccgccgtgtggtgtacatcgtctccggcttcgaccccaccaaggagccgacccgcgacgagggcaccgacatcgactgattggggcttgtcctcacattgggcgaataactgaacacttgtcctcctatggtttgaggaggatgcccgaaagcggcgatccggctacggctggacgccgttttttgttgcttctgggcggtacaccggcgtatccatggggcggcaaaacacccatagggcggtaacttgcccatggggcggtttgaaagatatgtgaaaccgcggaattaagccattctggcataccgccccatgagagttttaccgccccatgagagttttaccgccccatgagggttttaccgccccatggggtaatcaccgccccatggggatttggcaggcatagcaaaggggagccacacattatgtgcgactccccttacagcttgtaccgtgttagcggcttaggctcacttctggccttgagcggcgacagcggcggcaccggcagcagcagcctccgggtccaggtactcgccacgcggcttgatcggcttgaagttctcgtccagctcataaagcagcgggatggcggtcgggatgttgaccttggcgatctcttcctcagacaggttgtccagcatcttgacgatggcgcggagggagttgccgtgagcggcaatcagcacggttttgccggccttgagctccggctcgatggcggactcgaagtacggcttcacacgctcaacaacgttggccaggcactcggcttccggaaccggatcgccggcgtagcgcgggtcgttgttctgggcgtactggtcgttcgggtcgatctcgggcggcggggtggcgtaagaacggcgccacagcatgaacttctcgtcgccgtactcttcgcggatctcggtcttgttcttgccctgcagagcgccgtagtgacgctcgttgagacgccagtcacgctgaaccggaatccacagacgatctgcggcatccagagcgatgttggcggtgttgatggcgcgacgcagcagggaggtgaacacgatgtccggaaggacgttcttctccttgagcagctcgccgccacgcttggcttcggcttcaccctgctcggtcagcggtacgtcgacccagccggtgaactggttggttttattccatgcgctctgtccatgacggagcagtactagtttataagtcatacggttcagtctacagccgcgtgcgcccaaacacgagtattcgtcttattatttcgctctcatagcgccacggcaaccgccagcaccaccgcaaacagcaaggtctggaagctggcggcgggcagagccgggcggaattgacgtttattcacgctggagaccatgcgcacaggtattccggtgcccgagagcaacagcaccgcaccccacggccaccataatgtaccgcacatcagcagggcgatgatccatgcgatgacgcagcacacaatcagcaacgtacgcgcgccggactcccccagccgtacggccagcgtgtgtttgccatgctcacgatcctcgtcgatgtcacggatattgttcaccatcatgatcaggcaggagaacaggccagccgccacagcacccaatagtccgccgacgtccaccgtgccgcacagcgcgtattcggtgcccaataccgcagccaagccgaagaacaggaacacgccgacttctcccagcccgacgtatccatacggatgcttgccaccggtgtagaaccagccggccagcaaggaggccgcgcccacggccagcaaccaccatgcttgggcgagcacgaccgccacaacaccgcatatgcaggcgatggcggcgcaaatcatcgccgcgaacagtacatgcttggccggtaccagtccggatgcggtcagtcgctggggtttgcctgatttcgattcgtccgtgtcacgcccggcgtcagtgccgcggatgccgtcggaatagtcgttcgcatagttgacggcgatttgcaggaacagcgcgactagcaggcacaggatggtcaccggccagaatcggtccatcagcagggtctgctgttcacgggccgtggcgcaggaggccggttctggatatattgcgatgcaggtgcccgaccgctcgatatgcacgtacgccatcaccgccccaaccatcaccgacgcgatggaagtggacaaggtcttgggacgcgcgccccgaacccacaagccgatagacataagcaatccctttcatatataactctggctcccctctctgaggggagccagagtatgcctaatcaaccaacgagcggcttgaccagcgggaaggtgatggtctcgcgaatcgtggcaccggtcaaggcgataagcagtcgatcaatgcccatacccataccgccggccggaggcatgcccacgccgagagcctcaaggaagtcctcatcgatgtcgcaggcctcttcgtcgccggcgagtgcgtccttggcctgggccacgaaacgctcacgctgcacgatcgggtcgttgagctcggagtagccggtagccagctcgaagccgcgcacgtagagatcccacttctccaccacgccgggcttggtgcggtggcccttgaccagcggggaggtttcgaccgggaagtcacgcacgaaggtgggctcgtaaagcttgtcctcgtagaagtgctcccacaggtgttcgacgagcttgccgtggttctccacgtcgtcgcgctccacgccgagcttgtcggcgatggcgcccaaatgctcaacggaggtgccgggatgctcagggccgccgttcggcacgatttcctcgcccaatgcctcggacagcgaatcgtacatgctgatggtcttccattcgccgccgaagtcgtattcggtgccgtcgagcagggtgaccttgtgcgagccgtagacgtccatggcggtcttctgcacgagctccttgaccagctggccgatggaatcataggtgccataggcctggtaggcctcgaccatggtgaattcgggggcgtgcgtggcgtcgacgccctcattgcggaagtcgcggttgatttcgaacacgcgatcgatgccgccgaccaggcagcgcttgaggaacagttccggggcgatgcgaaggtacaggtcaaggtcgaaggcgttcatgtgcgtggtgaacgggcgggcggccgcgccaccgtgcagggtctgcagcatcggggtttcgacctcgaggaagtcgtggtcgtcaaaggtgcggcgcagggaggccacggccttggagcggttgcgcaccatgttgcggatgttctcgtccgcgatcatgccgatgtacggcttgcgggtgcgggtgtcttcgttcaggtccttgtgcagggccggcaacggctgcagggccttggaggcgatagcccactcagtggcgaatacggacagctcgccggtcttggaggcgatgacgcggcccttgaggtacaggtgatcgccaaggtcgacgagctgcttgaactgcttgagcgagtcggcgccaatctccttcttggagatcatgccctgaatcttggtaccgtcaccggcggacagctgcacgaagcacaggccgcccgcgttgcgcaggaacagcacgcggccagcaatgccgaccatgtcttcggtctcttcgccagcctcgagcttgccgtcatacttggcgcggaccgcctcgatggtgtcggtgacgtccaagtgcaccgggtagggggcgatgccggcctcaagcatcatcgcgcgcttggccacgcgcatctgcacctgctcggggtgagccagcgggccgaactccttgttggaggggtccacggcttcgtccagcgtggcaccggacttgatcttctcgcggatggtggcgtcctgctcgagcagcatttccgcacgttcgacggtgctcatctgcgggacggccggggtttcattctcagtgttttcggtattttcgacaacttcagccatgattcatcagtgtacgcaaggccggcgattatgagcccggcagaccgtacggccatctgaacacccgctcacatgacgcaaaaccggctctgcacaaggcttgagagacctgtacacacggcgaatccaccatcacgcaacactcgcgacatgccgatttgcattgtccaccaccacaatgtaatatctacgtctgttgccaaacgggctgtagcgcagcttggtagcgcgcttcgttcgggacgaagaggccgcgggttcaaatcccgccagcccgacaactggaccggattgttgagaaatcagcaatccggtttttcgtttcctaacccaacaatcagaccaagcgatcggacagcggtaaacaacccgccgcgcacagcgacaaaccgcgtcgcggcaaggcccgtatttgttgacggaccaccgtaatatatcgctcgaatcaatcgattgccgcactgtttttgtaagtaatactgaagtaattagaggaaccatgaagaagagtctgcttgcactggcttcgggcgcgttcattctcggtgccgccgagttcgtgatgatgggtattctgccgcaggccgcggccgccaccggcgtggacatccccaccgcaggccattacatttccgcgtatgcgatcggcgtgtgcttcggcacactgattctggtgttcggccgcaaggtgccgccgaagaacctcatcatattgtttatggcgattgccttggtaggcaatctggcttccgtgttttccgtcaatgccgccatgctggtcgtcgcgcgattcgtcgccggcctgccgcacggcgcgttcttcggcacggccacgctcattgccaagactctggcggagaaaggcaaggaagcgcaggccgtatccgtgatggtcaccggacagaccgtggccaatatgctcggcgtaccggcgggcaccctgatggccgagttcctttcctggcgtcttgccttcggcattttggccgcttgggcggcaatgacgattgtgctggcgttggcgtggattccgtacgttgcaccgattaaagacgcgggcatcgccggtcagttcaagttcctcacccgccgtggcccgtgggtgattttggccgccgtgttcaccggcaatgccggtgtgttctgctggtggagctacgtctccccctggctgcagaaaaccggcggatggtcgtcttccctggtgccgatgctgatgatgcttgccggctttggtatggtcatcggcggtctgcttggaggtcgtctgaccgaccattggaggcatgccggcgcggccgcaataggtcagtccatctcctgcctcggcttgttgctggtgctgatcactccgggcaatcagccgatgaccgctgtactgacgttctggatcgccgtcggattgttctttacttccgctccacagcaattgctgatgaccgaagccggccaaggcggcggcgagctcatcgccggcgcagccgtgcaggtggccttcaacttcggcaatgccatcggctcgattgtcggcggcgcgatgctcaccaccttctcgatgaactatcgctataccggtctgggcggtatgccgctggccctgcttgccgtagggctgctggccttctactcgtggcgctgcgaaaccgataccgacgccattcaccgcatgcgcgaaatcaaggtggactgagaccggacgtcacattcacgcataatcagcggaatgtgacgttgctctcttcttactgaagttcatctgcggttcgttttcattacacacgtattccaccttgcctttctaagttctcactatgaaagagcatctttcctgatgcctcatgaaggaagggaatacagtgaaacccatcaggttcacggcgaggatgatcgccgcactcgtcgccgcagcgacgctgtccagcgttgcgattgcgaccacgacggcttctgcagatgaatccgtaccggcagcgtccacggtcggtatcggcggcatcgccgccagcggcgccacggatgcgttcagtgaaaccaagtacgcggccaccaccgaaggccgttacgaagcctcggtcgacgcgaatgacgtcaccggctatgcagccgttccgcagacgcgtgcggccaagccgaatcttgtgcagctgcttggcgaatatgacagctactggcagccggccaccgaaaccgctggcggcaaggtgctcaacaagaccgtgctcgatcacgatgacgcctacatccaacagatcaacaacgccgccgccgaagacggagacggcacgaccgctaccgcacagcagcagcgcgctctggtggacgcggatatgagcgccgatgagaccttgccggactccctgggcccggtgctcggcgaatatttttccgccggtctggccgacggcagcctgaagaaggtcgcggacatcttcaagtacgatacaatctccacctctaccgccaagaagcacttccagcatcctcgtcctttcgaggatcgcaccaatggcggcaagaacgacatcacgaacatcaacgagaacatcatgcgcgtccccgactggactgacgcccaaggcaacgcgcattccgccgaatacgacgggctggtcggttccggttccttcccgtccggccacaccaccggcgcatactcctggggcgtggctctggcaggcatgctgccacaacttgctccagagatcctgacacgcacctccgaagcgggcaacaaccgcatcgtgctcggcgtgcactatccgctcgacatcatgggcggccgcatcgacggcgaagtggcaaacggctactactggggcacttactacgacaagtacgtcaagccggcatccgaccagctgcagtcctatctggcagccaagtgcgtggcggacgaccacgccaccaaacaggacaccgattacgcgactgtgaccgaatgcgtgaacaaccttggcgcgaacgcctccaacggttaccagaacgcctttgtggatgccgtgagcaaggagcccgtcaccgaccgcgcctcggcgttgcgcgtctacacgaaccgtctgacctacgggttcggcaagaccaccgccggcaccgcattcaccgcgcctgaaggctctgccgacctgttgaagatcgcgtacccgaagttgcaccgcgaccagcgcgaagccatcctcgccaagaccgcgattgacggcggctacccgctggattcctcatccgacggatggcagcgcatcaacctagccgcagctctgagctccaccgtgacgttgaacgagaacggcgatgtcgtcaaggtcgagcccggcgcagccaccccatccgtgatcggcgaggaatacgccgacaagggcaaccacccggattccgacaacggtggctccggcaaccccagccaacccggtaaggacgccaagcaagtgaccgtgttcgacatcaccgacttccacggacacatcgaaaccggccagtgggtcgaagccgcttatcagaagcttgccgtgcagcacaacccgggcaacagcgtgttcgtctccagcggagacctcgtgggtgcttccccattcgaatcctcctatttccaagacactccgacgctgaacatggcaaaggcatgggatctgagtgtgagcgccttgggcaatcatgagctcgacaagggcactgcagacttcaacaaccgcatcgccgaaccgaagtacggcatcgactgggtcgccgccaacatcaccggcggctcgctgacttccgaccgtctcaagccgtataccatcaagaccgtcaacggcaaaaaggtcgccttcgtcggtgccatcacctccgatctgaagaacgtagtctcccccagcgtgatgcaaggcgtcacggtgaccgacccggttcaggctgtgaacaaggtggccgaccagctgtccgatggcgatgagtccaacggcgaggccgatgcagtcgtggccctgatccatgaggatggcgacaccatcgcctccgacggcgacggtctggacgctaacgtcgatctggtctacgcaggccacagccaccgcaacgagtacggcaccaccaccaagtccggagcgccgatcatcgaggccggcaagtacggccaggatgcagctgtccaggatctgtacatcgagggttccggcaaggattccaaggtcaccgtgcagaacgcctcccagtatgacgtgacgtacgtgaccaacaaggacggcaccgctccggccaagggattcgagggtgacgacaacggcccggccgccaaggtctacaagcaggctcaggcggattccgccgaggctggtaagaaggtcgtcggcaccatcgacaagtcagcgaatttcgccaagggcaactggagcgccgaaacccagctcggcacgctgaacgccgatgccgcactcgaatccgccaagaagacgcccgtgggcgagaaggcctccatcggcttcatcaatccgggcggcctgcgcaccgacaacctcgatcttgacggcgacaagcagatcaccgtcaaggaggcgtacagcatgttgccgttcggcaacgataacagcgtggtcaccctcaccggcaagcagctgaaggacgtgctcgcccagcagtggcagatcaaggacggcaagtccaatgtggtccgtctcggcatctcctcgaacgtgaccttcgtgtacacgctggtcgaggacgccaacaccaaggcaccggtcgccaccgtctccgacgtgttcgttgacggcaagcagatcaaggacaccgacaccgtgacggtcgccggcaactccttcctgctgaccggcggcgacggcttcaccggttttaccgcgcagggtcagccgcagctgaccggcacggtggatgtgcaaggtctgatcgactaccttgccgatcacaaggatgtcaaggccgatgactcgcctgcaggcatcgagctcaagtcctcctccgttgaaggcaccaaggcatccctgaccttcgacctgccggtctacgcgaatggccctaagccaatcgccctcggcctgtatgtcaacggcgtggacttcggcgtgaccaagctcggcagcgccaagccgtctgagttcaccgtggccaagacgctgagcgccgatgaagccaagacgttcggcggcaccgtctccaccgtcaacccgcagctgctttacacggacgccgagatcgccgccgccgaaaaggagcacgccaacggttccggcgaacaaggtgggaacaacaaccaaggcggcaacaacaaccagaacggcaaacccaacgccgacaagaagccgacggccaagccgaacaagaccgatctgccgggaaccggtgcttccatcgctggaatcttagccgcagtcagcctgctcgccgccgccggtggcgtgaccatcgtgctgcgccgtcgccagcaacgctgaacgattgtccgacgcctgtacaggtacggcaataaccgataactgaataccgaggaatagccccgcacgtcatagcatgcggggcttttccatgcctgttgagcctatttccactgaggacgacaacggggaaaacgacaagcacatacaccagctccggcagccgccgcacactgtaacgacactcacatcggcggtctccaaatcgttcacagtacgctggaacctagcaataatcggtatctcacgacgaaggagattatgtatggccgatgatgcgatggacgcgcggctggagcaggcactgctcggcatgcaggcgaaacacgcacatgatttcgatgcgcctgaaaacggcccggcggctcagggcggcaacgaactgcatgactttgacgtgaacgaattcctccacggcctcgacgccatcttcgacgcccacaacgccgcagaaaaggcgggcccgtatcttgaacaagcggcggtcgacgcggaaaacgccggagacgaagccggactgctgaccgtgctcaacgagacgatggggttctaccgctcgcaaggccgtcacaaggagaaccagtggatcgtgcagcgcgcgcttgagttggccctgcacatggggcttgagggtaccgaaagctgggccactacgctgatcaattgtgccactgccatgcgcgcggccaagcggtacgatcaggccgaggatctgtatcatcaagcgttggattgcgccaataagaacttcgctcccaacgaccgacgcctggctgcgctgcataataacctctccatgttgtacagcgaaacgaaccgattgccacaggcggaaatcgagctcaggcaggcgttgcacatcgtcgaggcggcgagcgtgaatcctgatgccgacatcgacgtggcctcgtcgaacaccaatctggctctggtactgctgcaggagagcaagctcaaggaagcgcacatccatgccaccaaagcgttgaccatctatgagactggcaagctgacgcactcggcgcattatgcctccgcattggctggctgtgcgcaagtgctgtatgtcgaacaccgatatggcgaggcggcctctcattaccgcagcgctttggcggtgatcgccgaatgctatggcaaggacaccgattactatcgcgtcaccgaggcgaacctgcgcgaagccgaggcgcaaatcggtaacgatgacgtgcatgcagcgaacagcgccgatgcaaccagcaccgaaactaataccaacatcgatgctactgccgaaatcgctgtgtccggtctcaaattggcacgcgcgttctggacacaggtgggcaagccgatgattacggcacagtatccgcaatacgtgggccgcattgccgccggactggtggggcatggttcggaatgctatggctttgacgacgcctattctcaagaccatgattttggcccacgcttctgtctatggcttaccgatgatgattatgaggcaatcggcgagcagctcgaggccgattatgaagcactgccacgcgggttcacgatggacgcgcaaggccgtgtgacatttatcgatataccgttctcccccaccacgccccgcgcacaaggtgccaaccgccgcgatggcgtgttccgcatcggtgacttctttgagtcgatcaccgggtatcgcactgcgcccgcgcagaccgcgccgcatgagtggctgatgcttcaggaatcgaccttggccgccgccaccaatggcgaggtgttcgccgatcccaccggtctgttttccaagacgcgccaagggttcaaggatatgcccgacgacgtgcggctcgcgctgatctccaagcgactcggcatgatcgcccaagccggtcaatataatctgccgcgttcgttgaaacgcggcgacggcgcggctgcatggctgtccatccacgagttcgtgcaggccaccgcctcgttggtgttcctggttaacgtgccgatggtggtgggctatatgccgtattacaagtggcagttcgcagcattgcgcaagctgtctggctcgatgttcgcgctgttgccgaacgtgggcgaacagttggaaaccgtgatgcgattgagttcggcagcctgctatggaggggccggattcggcgaaggcggcaagggcgcggctacagcaatcaagaaaatcaacgatatcgtggagcagattgcggcggatatcgtcaaggaactcaaacgcgaacacctgaccacgtccggcgagaccttcctcgaatggcagcgcccgtatgtcgaggaccacatcgcctctgatgatccggtgcttaaaagtttgtagattcaagctccctctgtcacggcttcgccgtgccatctccctcatcagagggagatattagtgaaaggaacgtcgatgaccaacgaactgactgatgatgaactgcgcgaggctattgtgcgccatgaatgggatcagttccagcgcaccaacaatgagggcggacgcgcggcatgccaaggcaactggccggtgttccaccagatgcggttggcccagttcctcacatgggaacggccattactcaccagctatgccgctgatcttgacgcggccgaccacgtgggccgcaacctcgtgaccgaaaaatacggccgcatgatggcctccaccgcgccggaagatttcacgaagaacatagagccgtatattccgcgtccctctgaagagcgcgtggcccgtcaggaacaggtcatcgcccagcaggtcgcctgggccaaggatttccgcgagcgctaccccaagctcggcgaggcgatgcgcgtactcaccaccaccgaagacacaccatctgccacctcattcgaaacctatctgcgcggcgagcttggtacgtattccgaacggaccttccagctctacgaggtgatgattagcgagcgcgccgcagccagcccgcaacgcaatatcactgaggaaaccttgttgcacacagtccagctcggcggtttcgacactttggatgaggctgaagccgctcagcgctgacgacagtgcctccacgccgtcacgccccatccaccttcccaaatttgtgacgctcacggcgactcagtggcacatattcgggaaggagccggtaacgaccgtgaatatcacagactgaacaacccccagaaagacaatatcgtcaatgtgacaagtgcagccagtgtcaccatcacgcaaatgacacgacgcacgccgataatgctggcgcgataccgccacatacgttccagttcccacgcgaacagcacgaccaacagcacggtcagcacctgcaatgccctccacccaagggaaaacaactgcggttgaggcataaccaatacagccgatacgcctacggcgctcatatagccatacaacagcacggtaatcaccattaccgctgtgccgataccggcagataagccggcaatgccgtgcaacgtacgctgttgggcggctcccagcccactcggcgtcgcatgcatggcccgcacagtcgccacactacgtcgcccggccagcaacgtctgtagccaagaaaacacagtcaagccaatacctaatatcgccgccatcacgatcagcacgggccctgccaccatcagaccggccagcacgccgagcgagccgacgataccggatctggtacgttgcggcgcggcgaagcgctggtgaggtgtcgcaccggcgacttggggcgttgcccatccatcggctttggttccggcagtcacaccgttcacccaattttccagcgcttgcgtatagccttcggccaatggcaggttcggggtgaataagccctcaccagcccgcatctgatggttgccggcgaaatagcgtacggtgacgttctcgttgccggacttgttggccgtggcgatgatccgctgcgccccctgttcgatgggcatggccgtatcgtaggtgccgtagttcaccagcaccggcatggtgagggatttcagataccggtcggcatcaaagtcggcataggccagatcgaatggcgcgtagtccagcgacatcaatttggccatgtctttgaccacgggcttgggcgcgccggcctcatgcgtataggcgctgacagccatggccatttgctcacgtccattgaacaccggtgcggatgtaagtatggcaaaggcaatgtcttgccgtttcgaggttagaatcgtggcgatccaggtgccttcggattcggcgtagatgccggttttggcggggtccacgccgcttatgccacgcagcacgtcgagcgaacgcccgtattcgcgagcaaaacgcgggtagtcgcgatgcagcacggtgtagttgtcgttgcgcttggccggcaccaaggtcacgatgccggcagaggccatggcgttggcgatatcgccgaaatcctcggcaccgctggtaccggacccgtgaatgaacagacaagccgggcgtggcccgggagcgtcgaccggttcacgtagtacggcgggtagcgtgacgccgtcgccggtcttgatggatagtcgggtttcacgcgtacgatatcgcccctcgtggggaatgttcgcatgggcaggggtgatggtggtgtcggcagaagcgatagcgatgtgcttggtgtagggccgtgtgttccattgcggcatcatcgcccagccaagtgtggcgaataccagcgtcatcgccatcgcggtggcgatgacgctcgctacccgccgcgccgaaatccgtttcatagttactatgcctcccccc

SEQ ID NO: 3125 - DNA, 21005 bp, Unknown
  R215_18m  MAG No. k141_27645
cggggcggtggtcgatcgcaccagcagctggacggggaaggtctcgtgggggatttccggctggcgtccctcgatgaggtcgagagccttcttcgccgcgcagacggccatgtcgtagggcttttgccgcaccgtggtcagccctgcttcgctggagaacgtactgttgtcgaacccggtgatcgacacgtcgtcagggaccgcgatgccgttgcgctgcaacttgaacagcaacgagatcgcttgggaatcctgatgaaagcagattgcggtggggggattgtcactggcgagcagctcggagagtgcggcgttggcgatgtcgtcgccggggtcgacggcgacgatgcgaccgtcgacaccgtccagctcatcgaccgcatcgcggaagccagagatgcggttgcgcgaactgaacccgagcgtggacgtgaactcctcgtacatgtacatgatgcggcggtggctgagcgccgcgagatggcggacgatcagcttgatgccgacccggtcgtcgatgctggccgacgcggtgaaatcgctggacgtgatgttgatgccgatcagcgggatgcgcgtcgtgttgagccgtttgatctccgaatggctgatcgcgaacgacgagacgatcacggcgtccgcgttgccgcgcaccggcagctcgtcgaagaacgtcctgcgcgcgtcctcgtcgccgatcggatagacgaccagatcgtagccggcgttgcggagcacctcgttgagcccctcgataagccgcgccgtgaaccattctattttgccgctgcccaccagcagtgccacgcggtaggatcgcccggatttgaggattccggccgtgcgtgagaccgagaagtcgagctggtccgccgcgagcatgaccttggtgcgggtcttttccgacaccatctcgggtttggagaatgcacgggacacagtggctgtggatacgcccgccttgcgggccacgtcttcgatgctggctttcatgcgttcctcccgtctgctgcccggtacgttgccgatgtggatgcggctcattgtatgacccgatcgttccgccactcgaaggggcgggtgtcggggcggattcatatatgcaacattgtagggcattgcagggcaaaatggaaactgaatatgtaatggtttacatttgcgacacgccgaagaaaaaacctatgtgcacgctcacattgttgcaatgtaacgggttgcaaatgtaatgggttgtagatggtgggcaaccgacttgtcaaacaggctcgacgatcgtattctgttgcttgtcctcaaggatctacaaggaagtaggaagaaccatgaaccttaagaaagtatgctccgcagcgattgcaaccgtgagcattttatctctcgcggcgtgcggcagcggcaacaccggcactggcacgaccgacaccaacgccgacaagggtcttgatgtaatggggcagaccattcagtacgatccgaaccaccttgtcaacaacggcaagccgatccagctcgagtactggagctggggcagcaagggcgtcgacccggtctacgcgatgatcgagaagtatcaggagatctacccgaatgtgaccatcaagcccgtcaacgtcgcgtgggacgactactggaccaagcttccgctggcgctcaagggcaaaaacgggcccgcgctgttcaatgtccacaactcctgtgactccctgatccgcccgtacgcggccaactacgacatcgacacggccgcgttggaggccgactactctaccgccgacgtgcacgaggacgacaacggcaaggtcaagtacatcgactccgtgatcagtaccggcagcatctattacaacaagaccctgtggtccgaggccggcctgaccgacgacgacatcccgaccacgtgggacgagttcatcaaggtcgcccagaagctcaccaagaccgacggcggcaagatgacccaggccggcttcaacttcaacggcgacgcctattccgccatctaccagggcctcaactaccagaagggcgaactgctgttcagcgccgacggcaagaaggccaactacgacaacgcgacgaccaaggagaacatgcagttcctgcaggacctgtacaacaagtacaaggtcggatccgtcgatttcggcaacgactacacccagagcttcggcaacgggcagactgcgatgatctacgcctggggccatatgggaggcacgctcaaggagaagtacccggacatcgactacggcgtcttcgccaccccgaccttcaccaaggacaccccgttcgcatatgaccgctacaacggcgaatccacgccgggcgtcaatggcaaccagaccaaggaacagcaggccgtcgcgcaggacttcatcaagttcatcctcgccaacgacgactacattcgtgtggcggcggccgaactcaactccttccccgcgaaggtgagcctgcagaaggatgaggacatcctctccaatccgatcatggccgctctccagccgcgcgtcgaccgcctgatctggcccggcccggcgcccgccacagttgaaaccagcggcaaggccgcattcgagaacgtgttccagaacggcatgagcatcgataaggcgctcaaggaagcgcaaagccagatggacaccgacatgaagagctccgacttccagtcgatggaaagcaagtacgccttctacgacgaacacaagtaggccaagccgggccgttcgccctcttccctgacaaccggccggcattggccggaccccgggccgcggcagggcgtttcctttcctcctccctgctgcggccaccaacctctttcgatacaggagcattagatatgagccagtccatgatgcaatccaagcgaggcgagatccgatgaaaagcaagaacgccgccggatccgcgctcagccgcatttttaccctacgcaacatcgcagtcacgttcctggtggtgtatttcgccgtcttcctcgcctacccgatattcaaggcgttcgccggcagcctccatgactggaacccgctggtcggcacatacgaatgggtcggactcgccaacttcgcgcagatcctcaccgacaagctgttctggacctccatgctgaacaccgtggtgttcgcgggcgtctccaccgtcttccgcatcgtgctcggcctcggtctcgcgctgttgctcagctccaagctcgtcaagtgcaaggacaccctgcggggactgttctacatgccgaccatcacgccgctcgtcgccgtttcgttcgtgtggatgtggatgttcgacccgcagttcggcatgatcgaccgtgtcaccggccttgacatcaactggctgcacgacaccaaatgggccatgcccgcgatcatcatcatgacgatctggaaggatttcggctacgcgaccgtcctctatctcgccggcatcatgaacctgccgcgcgacgtgtacgaggccgcgtccatcgacggtgcgaacagcgtgcagaccttcttcaagatcacgctgccgctgctcaaatccagcacgctgttcatcgtcatcacctcgctgatcagctacctgcaggcatacgtgcagatcctcgtcatgaccgagggcggcccgggcacctccacctacaccatcagctacctcatcttcgatcaggcgttccagaagtacaacttcggcgtcgcctccgcgcaggccgtcgtgctcttcctgttcaccggcgtactgacgctcatcatgttcaaggtttcgggagatacggatctgtcatgaacaagaaacgcaacatcgtcggttggatcctgaccgcactacttttcgtcgtcgccttcatcaccgtcgtcccgttcatctggatgctgatctcgtcgttcgccccgaacagcgagatcgtcaaggtgaccggcggcctgttccccacgccgtccagcgtcgagaactacgtgaacatccaggagaaattcaactttctgcgactgtttgccaactcgctgttcgtggccggtctcaaaaccgtcatcgcgatctacaccagcgccgtgctcggattcgtgttctccaagatgcatttccgcggccgcgacctactgttcggcgtggtgatgagcaccatgatgatcccgtgggccgtgaccatcatcccgcagtatgagatgttcaccaactggggtctgcaggatacatactcatcgcttgtgatccccggcctgatcagcgccttcggcatcttcctgttccgccagtccatcggcggcatctccgacgagctgatagaggcggccaaactcgacggtgcatccgacacgcgcattttccacagcatcatcctgccgatgagccacaacaccatcgccgcgctcgccatctttacgttcctgtggaactgggaggactacctgtggccgttcctgatggtcaccgacgagaacaagcagctgctcgccgtcggactgaaggcgttcaacggccagtacggcactgattacggcggcctgttcgccgcgacctcgctggcgatcgtcccggtgatcgtggtctacatgatcttccagaagcagttcatcgccggcatcgccaccggctccggcaagtagccggagcagcctgagacggcctgccgggccggttgggccatcggcctgagacggccccggtctgaatcggcctgagccggctgccggccgggcacgcgttgcggcttcccaccctgaccgggaggccgcaaccacataccatgcaccatagttgaatacagcacaacgcactttctcgcgaagggggagaaccatggcaaagtcgcctgatccgaaagatttcacagtggatgcccgtcccgtcatgcgcggggagaacgtggtggccggcgattgctggcgcatcgggctgatcaccgattcgctcgtacgcttcgaatggtccgatgacggcacgttcgaggatcgtcccacgcagacggtgctcaaccgcgatttcggggaggtggtgtcatacgccgtcaccgaacgtgacggccgcgtcatcatcgacaccgcggccctgaccatcgtctacgaccagcagccgttcagcaaggaaggcctgagcgtggtcgtcaaaggcgtggccgacacccagttcaacacctggcactacggcgacgcccagcgcggcaacctcagaggcaccgcccgcacgctggacgaagcggacggcgccatcgagctcggcgacggcgtgatctcgcgcgacggctgggccgtcatcgacgattccgccgccaacatcatcatcgaaaccgacacagtgaacggcaaggcgaacccgttcggcacctgggtatccccgcgcgccaccgccgaaacggacttgtacttcttcggctatggccaccgctacatcgaggccgtacgcgacttctatcgcctgaccggccccacgccgctcctgccgcgcttcgctatgggcaactggtggagccgctactaccggtacacgcaggacggctatctggccctgatggaccgcttcaagcgcgagggcatcccgttcaccacctccgtgatcgacatggactggcatcgcgtggacgacgtggacccgaagtacggttccggctggaccggctactcgtggaaccgcgaactgttccccgacccgccggccttcctcgccgacctgcaccggcgcggcctgcgcactacactgaacgtccacccgcgcgacggcgtgcgcgcgttcgaggacgcctaccccgaagttgccaagcgcgtcggcatcgacccggccaccgaggagaacgtggaattcgacctcaccagcccggacttcgtggacgcctatttcgacatgcaccaccgcatggaggccgaaggcgtcgacttctggtggctggactggcagcagggcggcgtgacccgccagaagggtctcgacccgctgtggatgctcaaccacatgcactacctcgactcagggcgcggcggcaactggccgctcaccttctcccggtacgccggccctggctcccaccgctacccggtcggcttctccggagacacgatcgtgacctgggaatcgctcgccttccagccgcagttcaccgccaccgcttccaacatcgggtatggctggtggagccacgacatcggcggccacatgtttggctaccgcaacgaagagctggaggcccgctggtaccagctcggtgcgttcagcccgatcaaccgactgcattcgtccagctcgccgttctccggcaaggagccgtggaacttcaaccgtgacgtgagcgccgcgatggtggacgcgctgcgtctgcgccacgcgatgatgccgtacttgtacaccatgaactaccgtgccgccgaagccggccgtccgctggtcgagccgatgtactggcagaacccggatacaccggacgcctacgaggtgccggacgagttccgcttcggcaccgagcttgtggtcgcgccaatcgtctccccgggcgatgccgccgcctgccgcggccgcgccgacgcctggctgccgcagggggagtggttcgacttcttcgacggccgccgatacgtctcatccgacgccgccggccgccgactggaggtctggcgctcgctcgaccgcacgccggtgttcgccaaggccggcgcgatcgtgccgttgcaggacgtcgcggaatccggcgaagcgatcaactctatcgccaacccgcaggccctgcgcgtgctggtgttccctggtgccgacggctcgttcgtcatgcgcgaggatcgcggcacgtggggcgccaccagcgccgacaccgcgatagcgttcacgtggggcggggccgatgcgtcgcccagcgccttcaccgtcgtgccggttaccggcgatacgtccgccgtacccgagtcgcgcgactggacggtcgtgttccgcggcgtcgcgccggtcgatgcggccagcggcgtgcgtgcatggtccggcgaggctccggtcgaggcaacggtggcgtacgacgaggcgaccatgagcctgaccgtgtccgtcgtcggtatcagctcggctgccagtctgcgcatcgagattcccggcggtctgcgcatcgccgacaatccggtcgaatcggacgcgatggacctactgctgcacgcccagatgctctaccgcaccaaggagctcgcgctgcaggcggtccacaagctcggcatcggcgcgatcggcgccctgcgcaccatgaaccgtggtccgcgctacgccaacgatttctggatcaccgacatgcccgatgcggtggccggcgcgctcgaagaaattttgctgcgcagctgagcccggttgcagttttctgcaacatccgggtgcgccccggtatgcggcgataagtttggcatggttgccgaagagcgtggcataccgggtgcagtgcgtgggatggccttcgcgattgcactcaccgtgcggtcagtggaaaggaacctttcatgcacaaggtgaaacagcacaagggcgtcgcggtggccgccgcggtctgcgcggtcgcgatggcggcctcgctcgcgacccacgccggcgcggccggggaccggcgttattgactggctggcgttatcgagtgattggcggtatcaattagccggcgttattgatgagccggtgttgtcgattagccagcgttatcgaccggcactgaagcatgcagtacccactgcccgcgtttctcccgtacatcccaatccccgtgcgcatgcagcacacgctcccgatagtacgcaagcccggaatgccgcccctcaagcgtcgtgccaccttgacgtgggcggtccgtcacatcaatggtgacgcggtcctgagcggcggaaaccagcaccacgtaacgctgcgtcggatcggcatacctggcgatattgccaaacaattcccgcagaaaatcggcgacaaacactgtgtctgagttattcagcgcatcgatgccccagcgacaataacgtcgccgacacaccccatgcgctgcaatcgcgcgccgccgctggcaagtctgatggcaaggccgatggcgcgcccggtaacaaggctgatggtaaggctgatggggcgcccggtaacaaacccgacggcaagcccgaaggcaagggcgacggtaagcccgatcagcacgatgccgggcgctcgccggtggatttcggcggcgatctgtggcccggtgacgccatcaagcgccatatcaatcagcagcacgtcggtatgacgactgccggattggcattccaaaatcgccacggccggggaagtagtgctccatacgtcaacgatgcggccatggatatgggtcgaagtcgccagccgcgcgatgcaatccagcgcacaggcgtcgttatccagaatgccgatgcggaaagtcgctggtggttcatgcgctgattgagtcgcgtccgacatgactccatacactagccgctccgccccgctccagtcaccccttgcagttttctgtataagtggattttggctccagacgcaccactccgtcatcgccgtcagtcactcccaaaaaaacttgagccaaacatactcaactttttgtgttgaaattgggaatagaacttgccaaatggaagttgagtgatgtaggctcaagtttggaaggtccaagagacgaccaatcggaacttgggcaaagaacgtaagaacaaacgagtaattaaggagcacacattatggcacgtgcagttggtatcgatctgggaaccacgaattcctgcatcgcaactcttgaaggtggcgagcccaccgttatcgtcaacgccgaaggcgcccgtaccacgccgtccgtggtggctttctccaagtccggcgagatcctcgtcggcgaagtggccaagcgtcaggccgtgaccaacgttgaccgcaccatctcctccgtcaagcgccacatgggcaccgactggaccgtcgacatcgacggcaagaagtggaccccgcaggagatttccgcgcagatcctgatgaagctgaagagggacgccgaggcatacctcggcgagcccgtcaccgacgccgtcatcacctgcccggcatacttcaacgatgcccagcgtcaggccaccaaggacgccggcaagatcgccggcctgaacgtcctgcgtatcatcaacgagccgaccgcagccgctctggcctacggccttgagaaaggcaaggaagacgagcgcatcctggtcttcgacctcggcggcggcaccttcgatgtctccctgctggagatcggcaaggatgacgacggcttctccaccattcaggttcaggccaccaacggcgacaaccacctcggtggcgatgactgggatcagaagatcatcgattggctggtctccgaagtcaagaacaagtacggcgtcgacctgtccaaggacaagattgcgctgcagcgtctgaaggaagccgctgagcaggcgaagaaggagctctcctcctccacctccaccagcatttccatgcagtacctggccatgacccccgacggcaccccggtgcacctggacgagaccctgacccgcgcgcacttcgaggaaatgacctccgacctgctgggccgctgccgcacgccgttcaacaacgtgctgcacgacgccggcatctccgtgagcgacatcgaccacgtggtgctcgtcggtggttccactcgtatgcccgccgtcaaggacctggtcaaggaactcaccggtggtaaggaagcgaaccagtccgtgaacccggatgaggttgtggctgtcggtgccgccgtgcagtccggcgtcatcaagggcgaccgtaaggacgtcctgcttatcgacgtgacccctctgtccctcggtatcgagaccaagggtggcatcatgaccaagctcatcgatcgcaacaccgccatcccgaccaagcgttccgaggtcttctccaccgctgaagacaaccagccgtccgtgctgattcaggtctaccagggtgaacgtgagttcgctcgcgacaacaagccgctgggcaccttcgagctgaccggcatcgctccggctccgcgtggtgtcccgcagatcgaggtcaccttcgacatcgacgccaacggcatcgtgcacgtgtccgctaaggacaagggcaccggcaaggagcagtccatgaccatcaccggtggttccggcctgccgaaggacgagatcgaccgcatggtcaaggaagccgaggctcacgaggctgaggataagcagcgcaaggaagacgccgagacccgcaaccaggctgaggccttcgcctactccaccgagaagctcgtcaacgacaacaaggacaagctctccgacgacatcgtcaaggaagtcaccgacaaggtcaacgctctgaaggaagccctgaagggtgacgacaccgagaaggtcaagactgctcagaccgagctgatgaccgccgctcagaagatcggccaggtcctctacgcccagcagggtgccgagggtgccgcggctggtgccggtgcggctggcgctgccggtgccggcgcttccgctggctccgcctccggttccgacggcgacaccgtcgaggccgaggtcgtggacgacgatgacgacaaggacaacaagtgatgtccgagttcaacaaggacgactacctgaacgacctgccggatccctcagatgctgaggctgccggccaggccgctcaggcctcttcaggggctgacgcctccgccgagtccgactctgcgcaggattcggctgcccaggctccttccaatgaaggagccgacgcggctcctgccgcagctgagggagagaagtcggatgccggagagaagactggcgaaggccagtccgattccgaagacaccctcacccccctcggcaaggccaagaaggaagccgcagactacctcgaagccctgcaacgcgaacgtgcggagttcatcaactaccgcaatcgcacgcagaaggagcaggagcgcttccgccagcacggcatcatcgacgtgctgaccgcgctgctgcccgccctcgacgacatcgaccgcattcgcgaacacagcgagatggacgactcgttcaaggccgttgccgccaagatcgacaaggctttcgagaagttcggcgtcgagaagttcggcgaaaagggcgaggacttcgaccccaccaagcatgaggcaatcctgcacaagccggatgccgatgccgacaaggaaaccgtcgacaccgtggtggaagccggctaccgtatcggcgaccgcgtaatccgcgccgcccgagtagtagtagcctccccgcaaaactgataacggccagctcgttaacgagctgacattaccttggctcccgctggcgggagctggcagccgaaggctgactgagggtggtcaaacactgaatataaaccaccctcagtctcgcttcgctcgacagctcccgatgttttatgcgacgtgcgcaattgcgcactgctatgaacagcccactgggctgttcatccagcgggagccaaccataaagacttttcaagaaaggagacatgaatggctgaaaacgaatggctcagtaaagacttctacaaagtccttggtgtctccaaggacgcttcggacgacgacatcaaaaaagcgtaccgcaagctcgcccgcaagtaccaccctgacgtcaacaagaccaaggaagccgaggagaagttcaaggacatctccgaagcctacgacgtgctgagcaagaaggaagatcgccaaaagtacgacgcgattcgccagttcggcatgggcggcgcccgcttcgcaggcggttccggcgcgggtggcttcgacgcttccggtttctctgatatcttcggctccatgtttggccagggtgccggtggcaacggttcgcgtatccgcttctccacctcaggtggcggcaatcccaatctcaacgatatcttctcgatgttcggtggggccgcgggccagggtgccggtggctacggccagcaggcatacggtaacgccggtggctacggctatgaggaggccccgcgccccgaaaacggcgaggaccgcaactccaagatcagcctgaccctgcgtcaggcggtcaagggcgctaccgtgtccctgtccgtggacggcaagaagttcaaggcccacgtgcctgcgggcgtcaaggacggccagaaaatcaagcttgccggcaagggcaagccgggcatcaacggcggcaaggccggcgatttgtacctgcacgtcaccgtcaagcccgatgccgcgttctcgatgcgcggccacgacatcgtcatggacctgcccgtaactgtgggccaggccgtggccggtggcaaggtcgaggccaaggatatcgacggcaatcccgtcaccttcaaggtgccggcaggctccagctccggtgccgaggtcaagctcgcgggacttggcgtccagcgcggcaaccagccgggcgacctgatcggccgcgtgcagatcatggtccccgccaagccgggtctggccgtcaagcacgccgccaaagaattcgacgaaaaagccggcgactatctcagcctgtaatcaggaggtgaacaatggcgcggttagccaaccaaatgaagcagttgtacgcgatgtgcgcaaccgcgctggtgatgggcagggccgatctcgacggagccgatgacgtcggcttcgacatcgaactgcccatcttcaccgtcggccaggcagccgaactgggcaacatccacccccagaccctccgccagtacgaccggctgggtctggtccgtccgcagcgcaccgatggcggcgcacgccgctactgcctgcgcgacatcgcccgcctgactcgagctcagcgcctaagtcaggatgagggcatcaatctttccggtatcgcgcgtatcctcgagctcgaagaagagaatcgacagttgcgccgtgaagtcaaacgcatgcaaaccggcgaccaggagagcgttttcgccgcaggccgtgacggcaatatcgtggaggtacaacgctccaaccgcgcccgcctctggcgtaacgccatccgccgcgaaacccgcgaactgcccggccgcgataccgccgccgataccgctgccggtgccaccggcgactccaactacattcccgccgactccaagtccatggtcctgtggggttggtgagtctggccgcattgcttcgattccttctccattcgtaaaactgtttgttatctcacatcgggcagctgccgaaaagagcacgaattttcttgacggagatgtcaaggtttgttacggtgacgtgcgaaaaccgattcgtaaggggtgctttaggctgagacggtatgtgccgaacccttcgaacctgtgagctaacactcgcgtagggaatgcgacggttgaactcctctgttcggctcggcatcccatatgcgcgttgagagagaggaagcgtatgtcgatacgcaaggagctgaccgcccagaacgtactgctgggtttccagcatgtgtttgtttccaacgtctggcttgatccggtgtttgtggccggagcaatcggcttacctattgccctgtcgtcgaacatgattaacgccatcttcatcgtctctggtctggtcactttgattcaggccactcggctggttcgcctgccggtggtgcaggggccgtcagccgcgtttgacgcgttgatgatcgcggcaggtacggccggcatgctgggggcggcgagttcgtccattctcatcgcttcgcttgtgttcctgttgctgtgcctgaccggtgtgatagagcggatgaggttcctgttctctccgatgatctcgggcgtggtcatctttatggtcggtgtctcgctgtctggattcacgctgagcgagtttctaggcggggctcccggcgacaagacgttcgccgatccgcacatcctgaccgtgtcgatcctgaccacggcgattgtgcttgtcctgtcgttgctcggcaagggcctgctcaagtcgttctcattcctcattgcgctcgtcgtcggcaccgtggtcgccgcagcatttggcatggtggacttctctcctgtggcatccaagggatggttgggcctgccgaccttcctgccctacggtccgttcacatttgactggaagatcttcatcccgttcttcatcgcctacatggttgccgtcatggaagctctcggcgtctatcaggcggcttctgagattcagggcacgcccctcgaacgcaagcaggtgcgctacggtcttgccggcgaggcggcaggttcggccatttcctcgctgattggtggattcaccaccaccgcctacccgcaaaatgtcggcctgctcaacctgaccggcgaaggcaagttgcgcacgcgcacgcctgtaatcatcgccgctgtgctgttgctgattctgggcttcgtgccaaaggcgggcgcgttgctgtccgtcattccctcggcagtcgtcggaggcattttcctgccggctgcggccagcctaatcgtgaccggtctgcgagccttgcgcaaggtcgctgatgacgagcgccgtcaaacggtcatcggcatgtctctgttgctcggcatcgccctgcccaaggcgctctccggcctgaccggcggcgcaagcgtgttctttggcaacaacatcatggtcggtgtattcagcgccatcattctcaatgcgcttttcgtcgctcttccggatttgatggcgaagcatcgtgcgccggcgtccgtggatgttccagcagccgatccggcggatgggactggcgctgcggcgcacgatgaacgataatgctggttgatattggatattgacaggagcgatgcaatgactgatgtgatggatgacgcgcgtcgtatcaagcgcgggattctggattttatccatacctatggctgtgagcaggccccggaagaggcgtttggtgcgttggcgcgcgacgtgttcatttatcagtacacgtatgatctgccgtaccgtcgttactgcgcggctaaacgcgtcacccccgcaacgctcaaggattggcgggagattccgccgatgccggtggacgggttcaagcaccttgacctttcgaccataccggccgagcagtgcaaagccgtattcatgacgagcggaaccacgcatggcggcaagatgcgtgggcgcaacttccaccccgatcttgaggtgtgggatgaatcaatgattgtgccgttccgtcatttcatcatgccggatcgagagcgtatccgcattgccgtgatttcgccggcatgggacatgaaccagaactcctccctgtcgcgctaccttaccaaggccgtggagtgctgcggcagcgaaggcagcggtgtgttcttcgacgagcatggactcaagttcgatgaaatcatcgccttccttaaccgtgcggtgtctgacggtgaaccggtgatgctgatgggtgtctcgtcgtcctatctgtatctgctcgattacctgcatgagcatgatctgacgttcgcgctggcccccgatagccggttgttcgacactggcggcttcaagagcactaagcgcgacatcaccgaagaccagatgcttgatgagctggaacagacactgggggtgccgcgccaccactgcgtcaacatgtatggcatgaccgagttgagctcgcagatctatgaccaaaatattctgtcgtggtatacggatggcaccagcaactatctcaaggcgaaccccgcctgggtgcgcacggtcttcctcgatccggaaacgctgactcccgtcaaggatggtgaaaccggtgtgatagcccattacgaccttgccaattggaattcatgcatcggtattctgaccgaggatctcggccatcgggccccggccggattcctgctgcagggcagggcgaagggagccgaggctcgtgggtgctcaatcgcggtagacgaggtcatcagtgccaaccgctgacgaatccgtgagtcaggccattgatgtcttccacctgccctcgggagcggatgtttcggattacgaaatctatgaagtcgccacatcagatggggtgaaacgtttgcgctatccgcgactggatggcccaaaggtgacttcccttgccaagcagcttgccgatgctcgcaaccgcacgcttgccgcgatgagtgtcaacgatattctcgacatcgtggccgacgcggcccaactatgggccgatccggattttgagctgcggcgtcaggctgaactgctgattcccgcaatcaccggatatgagcctgacatggtgcggattgagctcaaacggtatatgcgccagttcaggcgtcgtgaactgctccggttccttgactccgaaatcggtcagccgtctatgctcgacgaattccggccgaacaaggcggggggatactctaaatatgtgggcccagcgctcacctatcaggtgttctccagcaatgtgccggggattcccgtgtggagcatggcgatgactctgctggtcaaaggcgcgattcttggcaaatcttcattttccgagccggtgatgcctgcgttctttgctcgcagcattgcgatggtcaattccgacctcgctgatgccattgcggtggttccatggaagggcggctcgcagcagctcgaggattcagccatcgatgtggccgatgccgtgattgtttacggttcttcgcagactaccaaattgattgcgggcaaagtcgccggatccaagccctgtctaggttacggagcaaaagtcgggttggcgttcattgggcgagaggctttgcgtcctgatacctatgccgataccgtgcatcgtgtggctgttgacatcgccacatatgaccagcaaagctgcctggctccgcagaccgtgttcgtggagactgatggagccctcacccctcgtgaagtggctcagctgctcggtggcgagcttgagaatcagcagcgcaaatatccgcgctccgtattgagtgacgccgagaacgtggccattcagcgggcacgcaccgacgctgagatgagagccttgatgggagggaaggccgcggtgttcgccagtggccatagcacggcatggtcggtgctgtatcgagaacttgacggtagcggtgccgacgaggatgttgcttcgctgatgtcgccgttgaaccgcaccgtcaacgtggtggcggtgccagatttgttggatgctgccagaagactgacttcctgccgcggctggctgcagagctgcggtgtcgctgtggattcaaccagactgtttggtcttgcagatacattggccgaggtcggtgtgaatcgcatctgtccgctcggtgagatggatcgggcgaaatccggctggcatcatgatgggggcttcaacctcatcgatctgttgcgcgcggtggatgtcgaacgcggcagcgacgcgtacagcgattcgttcgatatggatatggaataggcctgtgctgttgcgggcagcagaggctggtagcagggcgaaaggcaagggtaatgacagagcaaagcgatatggcacggcgtccaatggtgaatctggatggcagaacagcgatcatcaccggttccggcaagggcataggagcggccgtggcgaaatgcctggcatcgcacggagccgctgtcgtcatcaattacgtacatgacgccgccagcgcgcagcgcactgttgaggacatccactcgctgggaggcttggctatagctgtacaggcggatgtttgcgatgaatcgcaatcttccaagctggtgggtaccgctgtcgactcattcggcggcgtggacatcttagtgaataatgctttcggacgcttctcctttgacccgcgtcgccgttccacttttgctggaggcgattgggatgagtttagcgcacagatcgagggatgcctgcatggtgcatatctgatgtgctcacatgtggtgccgctgatgcgagcccagacctccgggcgtatcatcaacatctccagcaatctggtcgattcgcccatcgtgccctaccattcgtatatcactgccaaaggcggcttggtcggcatgacccgctctctggcccaggagctgggcggcttcggcattaccgttaatgccattgccgcaggtttgacggccggaaccgcatccagcgcagccaccaccgaggatgttcgtgaacgaatcattgccatgacgcctcttggccgccttgcccgtcccgatgacatcgccggaggggtcgcgttgttggcgtccgacatggccggcttcattaccgggcaatgtctgcacgtcgatggtgggctgaccatgcgctgaggcgcaggggcggtgcgctgacgcgctatggttgtcgcatccggttggtgcaatggaatgcagcaagagtaaaggcgccaattggcgtgcgggcatgcggacggaggtaactatgctgctcaaagccgtgttctgggatttggacggtactctcatcgattctgagccgctctggcatgacggtgagattgagatcgcgcacaacaatggcggcgagtggaacgaggacctcggttgggagtgctccggcactccggtgccacacgtggcagaggtcatgattgcgcatggctgcacattgagcgttcccgaaatcgacaaacagctcaaggattatgtgttcaaggcggaggtcgaacgtctgccgtggattcctggtgtgcaagacgtgctgcggtcgctcaaggaggccggcattccgtccatgctggtcaccacgtcgccgcgccgtatggcggagaacatcatgaagcagtccgagggactgttcgccggctacgtctgtggcgacgatccgtacgaacacaagccgaaccctgcgccctatctggccgcagccgacaagcttggcatcgcccgtgaagacatggccaagtgcgtggtgctcgaggattcctcggttggacttcaggccggtgcggcatcgggcgcgactctgatcgcgcagaccggctggattcgcacggatacttccggcctgggccagttcgtgtccatcgaatcgtatgacggtatcgatacggccgcgctggacggtttcgtgcgccagcgtcttggcgagtgactgattgcatcaccgcgcatatgatgctcatcgtgcgcggtgaaatgcatggacgataccagcgaagcacgccatatttgtgaagaagatggcagtaatggctgctatgaggttccggtggtccctcttgtatcggggcgactggtagggtggttgacggttttcagacaaatgtctggttattggacagattgttcacacatatagacgtataggactcataggaaacacatgggcttcgttaatttcatcctcgaactgctgaaggatccgcgtgccgcgattgccggttggattgccatgggcgtggcgccgaccctcggcttcatcttcctcatcgtatttatcgaaacgggtgtggtgttcttcccattcctgccgggcgactccctgctgttcgccgccggtgtgttcgccgctcccgatgccgcgaccggcaaggccgcgctgccgctgttctggctgctgccggtggtctggtgcgccccgattatcggcgaccagtgcaattacttcattggtcatttcttcggccgtcgcatcatccagtccggcaaggtgaaggccttgactccggagcgtttggccaaaaccgagcacatgattgagaagtggggcccgctggccgtgttcctgggccgtttcttcccgttcattcgtacgttcatgccgttcatctccggtatttccggtatgcgttggagccgtttcacgccgttctcagtgctcggcggcctgtgctggtccacgttgttcacgctgctgggctacttcttcggtaacattccggcagtacaggaccacttcgagctggtgatcgtgttgattctgctggtctcgctcgccccgaccatcatcggtctgctcaaggccaagttcggcaagaagaagccggccaaggtgaccgatgctcagttggatgctatggaagacggcattaagaacctcgataagtaagcaagaaatgtagattaccgcataaggaatcgtcgtgaaaatgaaggccctgactgtgcatgtgaggtcagggccttttctgcatgagatgggcgtgaaacagcagcgtggttatccacatttgtcgtggacgacatgccggggtgtggataactcagcaagctagaaccacaatggtcgattcgtgttgagcattgaactcggacacgtttcaatcggcttatgaatagcaacaccacaccccgcgtggcgcgtaggatcacctcgccagcggtagcacctccgggcattccgctgcccacggacgatgcgccaattccagcgcatcgctactacactccgccgcccaggccgttggcctcatgcgaacggcagagatcgggcgaggctccggcactcgccctaactacagacaccagcttccataacattgtaacgatgacgtcaggtcatggaggcgtggggttgagtgtcatggcttccatgcttgcatggacattggcgagacgtgaacacagctgcgttctcatagacgctgatttcgtggccggatgccttgacctgctgctcggtgtggaacgagagccgggcttgcgattcagccaagtcgacgcgcccctcggtcgtatcgagggtgaggcgatgaaccatgagctgatgatgtgggagggcgtgcgagtacttccctatgacccttggagcgtgcgccagcctgactggtgggaagtccaagcggccattcgggctttggcggaagcgaacgatgttgtcatcgtagatgccgggcagggtggactcattgagaccgtgcccgatctgcgcagcggcgtgcaggtgattgccgcggaattgtcggtgatgggattggccagagccaaatcgcaccggtccagattggattcatggggctgtgaagcgccacatatcgtaggtgtggaaccacgtggcgctccacgtgggagaggccacgtgggtattggcgaggcgcaggactatttgactgccacggtattggggccc

SEQ ID NO: 3126 - DNA, 26759 bp, Unknown
  R215_18m  MAG No. k141_28590
ccgaagcctcactagaccacgcccgagaactgttgaaggaaagtgtcctatgaccaaagccgccatattcgacctcgatggcaccctcctagactccatgggagtctgggaccaagtcgacatcgacttcctgaacaagcgcggaatcgaagtgccgcccgactacatgaccaaagtctccgccatgcaattccgccagatcgccgaatacaccatcgcacgcttcggccttacagacacgcccgaagagctcatgcaggaatgggacgacatggccagcgtcgcctattccaccacggtcgaagccaaacccggcgcgcttgactatctgcgcgatctgaaagcctccggtgtcaaactgggtgtcgccacctcgctgcccccgcatctgcgtgagccggcgctacgccacgtcggcatgttcgatctgttcaacgatatcgtctccgtcgatgacgcgaacgacgtcggcaaggaccagcccgacgtctacctgctcgccgccaagcgcctgggtgctgcaccggccgactgcacggtgttcgaagacctgctggtcggcatgaagtcggccaaatcagtcggcatgaaggtctgggccatgcacgacgactcctccgcctccgactggcccgaaatctgccacctggccgacggtgttctcttcgacttccatgacgccccgcgcgtgctgtgataaaaaagttacacccccgctggcggggctgtcggcgtaacggcgttgtttggcataggtgccccttcccgaggccattgtaggcgcggcccatgtttcgacactgtatgttggcaaggtgtttgttcactgtttagctgttatgtaacacaccttgacagttaagcagaacagttatactgtgttgtataacagctaaacagctggggtgctagtcaaccacaatcgaaaggggcataggtgaaactgatcatctcatccgtgtccggtgaacccatctacgagcaaatcaaaacccaaatccattcggcggtgctcagtggcgagttgaaggcgggcgaggccctgccttccttgaggaaactcgccaaggagctgcgcatctccgtactcaccgtcaccagggcgtacaacgaactggccgatgagggcgtggtgcagaacatccaaggcaaaggcactttcgtgatggacaagggcaacgaactgatgcaacgtcagctcaaaacccggattcgcgaaagcctggccgaggcaagccggggcgccaaagccgccggcattccgctggacgcattggaccgcatgctcgaagaggaataccgcaagaaataacctcaagaaaggaccatggccatgaccgccatatccgaatccgacgcgatggcgttgcaggtcaccgacgtcaccaaacactatgattccggcttcacgctggacgacgtgaccttcgacctgcccaagggctacatcatgggactgatcggcccgaacggcgccggcaaatccaccctcatcaaactcatcctcaacatgatccaccgcgacgccggttcgattcacgtgctcggcctcgacaacatcgccaacgaggagcccgtcaaagaacaactcggcgtggtgttcgacttcagctacatgcatgaacagtggcaagtcaagaacattgaacgtattgtcgcgccactgtatccatcatgggacggtggatgctatcgcaagtatctggatactttcggtcttggtggtgcacagaacggcaagaaacatatcaaggatctttcccgcggcatgcagatgaagctgatgctcgccatcgcattgagccatgacgccaaactgctgattctcgacgagccgaccagcggactcgatgtgcttgcccgcgacgaactcatggatatcctgcatgcctacattgaggatggcgaacattcggtactgttcagcacccatatcactgccgacctcgaacgtgctgctgacttcattacctacatcaccgatggccgtctctactacaccggtccgaaagacgagtttgaggaatcgttccgcctgattaagggcggtccagacgaactggcacaactgcctgcggacgtggtgctgggctcacatacgtatgccaccggattcgatgcgctggtccggtcagacaggcttgatgctgttgcgtcggtggtttcggggcttgtcgttgaatcggcttccattgatgacatcattcgactgaccaatgcccatgattccaatcgtgacttgagcgggaggtgagcggccatggaggcaatactgagggtgtcgcggtctcggcaacatgcattggccactgcattgcgcgtcgatatggcctacctgtgcgtcggcgaacggactgtgttctcgttgttgttggcaccgttgttctccgtcatctttcaaggtgaagcttatggtgatggcttcggctatcgcatgggtgtcatcatgacggtattcacctgcgccatgtgggtgctaaccatggcggttgctgacttacagaacggatatcgacttcgtggcattattccggcttcgaggaagagtcaggtggccgcgcgatatgtggttggattggtgatttccgtattgtcgatagcgatgattgttctgattgacgggttgcaagtgctggtcaatccggattggtcattcgcgggcaatctgtgggcggctccgttgggaggtttctgcaccgcgctgatggtcgcgcttatcgtgcccacgggttatctgtggaccaaactaggcggtcttcaagtcacgatgatggtgatttatgtcgttgtattggctggattcatactgctatctattttgcctgcttcggtgaccaaaggattggcccatgccgcgaatgccatcatcgcgcaacgattgtggctggttattgcggtattggcaacgacggttgtggcatatggaatctcgtatgtaattgcctctcgcatatttgcttcaagggaatggtgacgatgagctggaaatccgtagtaaagcaatgtcgattcgattgtgtcgggacgggtctgttcagcgtggcgaatatggtatttctgctggttttcccggtgctgtctatcgtggtatcgctggtgatgatatcgacccacgtcgatgaacacgttgttagtggtctgatgggcggactcggaggtttggcatcggcgatggcatgtatgagtgcattggggcctgcgtcatccgaggaatctgcagggcacagtgccatgcgagggctgattcctgtttcacgcactgcacaagttgtaggtcggtacctttttctgttggtggttggcctgctctgggctttggacgtggtgatatgcggcggcgtcttcattgtctttggcgatatagcagatatggggtggatcggtaccttggcagcaggtgctttcatcttcgctttggctatcattcttgggtcggtgctgctggcctgtgcataccggttcaccttccgcaagatgatggtggcctctggcgtggtcctggttggcttgtatgccgtcattgcgctgctggcccgattgcctgttgactggcaatggcttttgctgaatattaccgatttcctgacgatctggtggcatacggcgcttgttctcgccgtgttgtgtctgctcgcatattttggctccatgcttatagccatccgcatctaccgagccaaagaactctagccgcgcatttgtccgaccgcgatgatcttcagccacatgtcgatcggcagcggcacggtgcggaacatcgctccgccgaactgcaccaccagcacctgaagtgcgaacatcagcgcgaacacgccgatcatcaccttattgcgtagcagattggcgaacaggctggcgttgcccagctcgcggctgttgaaggcgttgaacagctggaatactacgaacagcgtgaacagaatggtcgactgctgaacagctggaataccacgaacagcgtgaacagaatggtcgactgctgttcggcggtgccgcccatgaagttcgtccagcttcgcgagcttctcctgcagcggcgtcataccggtgttggcggctttggcgctcggcacgctttattgcggtttgggccgagcccttcgccgcaatgctgtctactccctcatgggactattcagttgcaggaacagaatctgacaagccacatggattttcccattcgccggcagcatggcgattcccgccttcctagaaaattcaagcaacacgccgttggcccattgccggatgttcaaccgagattcgcatatcttgactcatacggcaaaactgttatatttgatgtagaacaaatagaacagttcttgagaggggtggaattgaccgtgattgtggaaatcgatcagcgcagtgacgtgccgatttacgagcagctgcacaggcagctcatcgcagccatcgcgggcgatgagctgtcgccaggtgactcgttaccgtccgtgcgctcgctggccgtggaccttggcatcaacctgcacacggtgaacaaggcctatgcgctgttgcgtgacgagggatacatcgttatgcgtcgtggtgccggtgcaaccgtcgccgagcatgacggcgggggagaagcaccgaaccgaactgccgaagcacaggatgagcggatgggcgaggaactctatcgccttgccttggcctacagggcgcgcggcggtgattcggccgcattcctcgatgccaccaaacggcaatgcgaacgggcatacggcgtgcgctcctcgcagagcgttactgacggtgcgacaaaaggaaatcaggggagataacgatgaataatacagtcgtgtcgatgaacatcgcgttgtgtgcgtttttactgttgccggtgatagtgaccgccggcctggcaggggttccatgggttaccgaccggcatgaggtgttcggtgtcacagtgccggccgccgcccatgtcaatacgcgcattcgcggatttaaagtcgcgttttcgggaattacggtggcgcttggcgtatgcgccatactggtctcgctggccgtttggcaactctgcggagtcgacgcggcgttctggactgtgtccatcgcagcggtggcgattgcgatatgtggtttcgtgctgcagcagatgtttcgccgcaaagtactatccatcaaagtcgatcagggatgggaggcgtccagtgcccgccgtgcagcattgataggtgagcgggacaatcccgacccgatgagcttgaagtgggaattgctgcaagtcgtttgtctcgctgtcaccattgctgtcgggttgctgggctatgaccggatgccggagcgggtgccgattcatgcggatatcgccggcaatgtgaacggttgggccgagaagagtccgatggtgatttggtacgccgtgctcgcgcaggtggtgctggcagcggtgatggtggccagccatgccgcgatcatctacgccaagcacccgattgatcccgaccaccccgccgccaccgggtatgcctatggtgtgttctcgcgggtctggagcatctacgtgctggtcaccggactgctggcagccggtggattgggcctaggcgttcagcttgtcaccattggcgtgctggatatcaatctaatcggcatcatcggcatgttcatcgccgtggcggctctggtcggcgcgctgatgatcggcgtgtattacgggcagaacggggcgcgcgtctatgccggtgttcggcacagtgacggcggtgacatttcggacgataatgccatgccgtatgacgatgacctgcactggattggcggcatcatctacatcaaccgtgacgatcctgccatcatgatccccaaacgtttcggcgtcggctggaccgtcaacctcgcacgccccagcgtgatcatcggcactatcgtgctgttggcaatcgccataggactgccagtcgccgcgatactgatgtaaacgcaattctgatgtaaaaaatggctccccgctctgaggggagccaatgtgctggtatgttttacagcgcctgggcggccttctccacgtagtcctccatgtcgtcgatggccacgacgtccttgaaccgcacgtcggcggtctcaagaccacgcagggcggccggggcggtggtgccggtctcgtgggccagcacatccatgcactcgaagtcggtgccggtggcgtcgaagcccaatgcctcgttcaccacgcgcgggaacttgtaggggctggcggtggagagcagcacgcgcggggtcagcgggtcgcgcggcatctgctcaagtaggtagtagccgcaggcggtgtgcggatcgatcacgtagtggttctcgtcccagcagtgtttgatggactcgcgtacctgatcctcatcggcccaaccggtgccgaagatctgacgaatcttggccagcagttcttccgggatctcgtacgtgccccacttgttgaggtcgttcatcagcatggagatcagacgggtgtcgccctcggacaagtagtacagcatgcgctccaggttggaggagatgaggatgtccatcgagggggagatggtctggaagaacgggcgctggcggttgtaggtaccggtggtcaggaagtcgaacagcacgttgttcttgtcggaagccaccacgaggtgcttgaccggcagaccgagcagcttggcatagtagccggcgaggatatcgccgaagttgccggtcgggaccacgaactcgacctcatcgccgacgttgatcacctggtcggcgagcagctgggcgtaagcggagaagtagtagacgacctgcggcaccagacggcccacgttgatggagttggcggaggaaagcaccacgtgcgaattgccggcgagacgctcggccagggcacggtcgccgaagatgcgcttgaccgcggactgggcgtcgtcgaagttgccttccacggcggccacctgcacgttggagccggcctgcgtggtcatctgcagttcctggacctgggagaccttgccttccgggtagaagacggtgatcgcggtgcccggggcgtccgcgaagccggccagcgcggccttgccggtgtcgccggaggtggcggtgaggatcatgatcttctcgtccgcgtcgccatcggccggcgtggtgtgcgccatgaagcgcggcaggatctgcagcgccacgtccttgaacgcggaagtcggaccgttgaacagttcgagcacgtaatcgtcacccaggggcttgagtggggtgatgcgctcatcggaccactgttcgccgtaggcgtcggcgatgcactggcccagctcctcggccgtgaagtccggcagcagcgcgcccagcacctcggcggcgatctgctggtacgacttgcccggcagggaggccacgtccaccttggtcttgcccaacgcgtccgaaacgaacaggccgccgtcatcggcgatgcccttacgaatcgcctgcttggcggtcagcgaatcggtggtgctacgggtggaatggaaggtggttgtcacgatgaatccttctgcctgaaagggatgatgaatccacaccagtctagcgtgggccgtgggcagaagggccgtccgtctcgcatagccgaccggtcaaaccggcgaaaatcaccattgccatcgaacggggaccggccatatcatgaaacaggccggctacaaaccggccatacagtaaggcggcaacggcgaatcaattgtcgcccataccaaaaaggagcacccatgaccgcttcaccccttgcgcagaaagcgaccgatgctttcaacgcgccgatctgcgaaaccgatcctgagatcgccgaactgctggactccgaactgggccgccagcgcaatggccttgagatgatcgcctctgagaacttcgtgccgcgagcggtactgcaatgccagggctccgtgctgaccaacaaatacgccgaaggctaccccggccgccgctactatggcggctgcgaatacgtggaccaagtcgaaaccatcgcccgcgaacgcgccaaggccctgttcggcgccgaatacgccaacgtccagccgcactccggcgcccaggccaacgccgccgtctaccaggcgctcgtcaagcccggcgacaccgtgctcggcctggccctcgaccacggcggccacctgacccacggcatgaaaatcaacttctccggccgcttctaccatgccgaggcttatggcgtgaaccccgagaccttccgcatcgacccggaaatcatccgccagcgtgcgctcgaaacccacccggccatgatcatcggcggttggtccgcctacccgcgcatcgaggacttcaaggccatgaaggagatcgccgacgaggtcggcgccaaattctgggtcgacatggcccacttcgccggactcgtagccgcgggcctgcacccgagtcctgtgccgtacgccgacgtagtctcttccaccgcgcacaagaccttcggcggcccgcgctccggcttcatcctcgccaagcaggaatacgccaagaagctcaactcctccgtgttccccggccagcagggcggtccgctcatgcatgtgatcgcgggcaaggccgtgagcttcaaggtggccggcacccccgaattcaaggaccgtatgcagcgcacgctcgacggcgccaagattctcgctgaacgtctactggccgatgacgtcaaggccaacggcatcagcgtgctgaccggcggcactgacgtgcacctggtgatggtcgacctgcgcaacagcgagatggacggccagcagggcgaggatctgcttgccgcctgcggcatcaccatcaaccgcaacaccgtgcccttcgacccgcgcccggcctcggtggcctcgggcctgagaatcggcacgtccgccctggccacgcgcggtttcggcccgaaggaatatgaggaggtggccgacatcatcggcaccgcgctcgccgccggaccgtccgccgacgtgaccgcgctgaaggctcgcgtcgacaagctcgccgaagacttcccgctctaccccgacctggaccagatccactgatttgctgattcgctaatccaccgtggtgtaccggttagtgatgattcgctgaccggagcgcatcacgtcaccggcttcccgcctgagacggaggggagccggttctgtttgcgattcaaaacgtcagacatcccataacaagcgggtcggagtaagcaatcagtcgcgttgtgagttacgcttgactgttatgagcgatgaattgagtcctgaggtgttcgacgcggtgtgccgccaggccgatcaggccgcacgcgcacaggagcgtcttgcacaggcaaataccgaagccaaaaacgaactgctgctcgccattgcggacgcgctggacgagcacgccgcggacatcgaagccgccaacgcgctggacatgctcgaatccaaggaaaacggcatggatgcgggcaagcttgaccgcctgctgttcgacgtgccgcgcgtggccgccgccgcccaaggcgtgcgtcatgtggccaccttgcctgatccggtcggcgaaatcgtgcgcggatacaatctgcccaacggtctgcgccttacccagacgcgcgtaccgatgggcgtcatcggcatgatttatgaggcccggccgaacgtcactgtggacgtggccagcctgtgccttaaatctggcaatgccgcgttgctgcgaggcggtcacgccgccgaacgcaccaatgctgccacgctgggcgtcatcgccccggtgcttgaagcacacggtttcgaatccgcactggtgcagtccgtcgaccagtacggacgcgccggtgccaccgccatgatggaggcgcgaggccatatcgacgtgctcgtgccgcgaggaggagcgggtctgatccaagccgtcgtgcgcaactccaaagtgccggtcatcgaaaccggcgccggcaacgtgcatatctacatcgacaagtccggtgatctcgccaaggccatcctgatcatcatcaacgccaaaacccagcgcgtgggtgtgtgcaatgccgccgagaagctattggttcataaggatgtcgccgccgaattcctgccgcagatcgccgccgctctggccgaggcgaacgttgtactgcaggccgacaccacgtcgtatgacatcatctccggcgcggcgatcgagggccttgacctcaaccgcgccaccgaggaggattgggacactgaatatctggccctcaagatgggcatcaaggtggtgccggatctgggcgcggccatcgaccacatcaacacgcattccacgggccacaccgaatccatcatcgccgaggattatgcggccatcgaggaattcgccaagcgcatcgactcggccgtggtcatggtcaacgcctccactcgcttcaccgatggcggcgtgtttggctttggtgctgagcttggcatttctacgcagaagatgcacgcacgcggtcccatgggattgcgggagatgaccaccaccaagtggatcggttacggaacaggccaggtgcgcgcatgaacgaggacggcaacatgaacactacggctgacacggcaaacaaggcaagcgaactgcggcccgacatcgacctcaacgatcccaagctcggcctgaagatcgcggccgaacggctcagcatcgtccgctatgtgttcctcgtgcagattgaggacggcatcgcctccgccgcccagcgtgcgtcgctcgaatacgcggacgccgtgctcatcggctggcccgagaccgattcacccgaagtcgtggacctcaacgatgcccagctcaagatcgtgcgcgaacacatggaactcatggaaggctacatcggcaaatacagccagatggagcacgacggcgacctcgacggcatgaccgacacgctcatccgcatcaccgagcgcgtggccgaggtccgccgcctctaccagccggacttcccgctgcccaccttcgccgagattcgtcgcgtggtccaagacgaatgggatgaagacatgggcaagatcgatcccaaggaagacaatccctccgccggcgaaatcgaagaggaaaccgaatcagccgatgacgccgccggcgagggcggccaggcatgagtggtgttaccggcagccacaaaacggctgcgtcagttcagtccgaaaaaacagtggaatccgccgagcccgccgaaatcattgccgtcacccaaggcgaaaccgaacggcgcatgtccgacctgtccgtaccggccggggccagcagccacggcaaaggcaggctttccgcacgcggcaactggcatacacgcctgcgcgtcggcatcatgggcggcacgttcgacccgatccacaacggccacttggtcgccgcctctgaagtcgcctgggtgtatgacctcgatgaggtgattttcgtgcccaccggccgacctgtgttcaagctggacaagcacgtcaccaacgccgaggatcggtatctgatgactgtgatcgccaccgcatccaaccccaaattcaccgtctcgcgtgtcgacatcgaccgtccgggcgtcacctacaccatcgacactctgcgcgatatccgcgcccaacatcccgacgccgagctgttcttcatcaccggcgcagacgccgtggccgaaatcatgcagtggaaggacgccgacctcatgtgggacctcgctcacttcgtggccgtcacgcgccccggctactccagcccggacggcgtgaccttgcccgaaggcaaggtcgatacgcttgagatcccggccttggccatctcctcgaccgatgtacgccgccgcgccgaacacgacgagccggtctggtatctggtgcccgacggcgtggtgcaatacatcggcaagcatggtctgtattcgtacgaggactgacgattcgtacgaggactagtgtgcatttgtacgagggctggtgaggattagcgcgaatcagcgcgcatcaatcctcgccagtgcaaggatgaacggtcaggccagtcccatcttgattttcaatgtcattacgcgagtcgccgccgccgtcaccttcgaagcgaaagccggatcggacttcgcccgttcgttgaggccgtccacaattggctttacataatccgtctgaccgatgcagggcatgtcgccgcccgcctcgacaagatttactcccaattggcttacatcgtagctgctcaacgcttcggcagacatcgaatccgaaatcaccacgcccgtgtacttcaggacgttgcgaatatgaccgtcgataatcgtagaagaaaacaccgccggattattcgggtcgatggattgatacgtggctaacgacatcatcaccattgcaggatcggccttggtaatcgcctggtcaaaggcacctgcctcggccccgtccaacgtggtggtcgtatccagaatgccttcggtggtgaagtcggtattgccgcttaccgcgcccaacccaggataatgtttgaccgccgcaccgacttgagcgtctcgcaaaccttcaataacggcgatgccatgttcggcgttgccggccgcatccaatccgaaatcacgatccagcgcgccaatcggagcatttgaggcacgattgccaaccactgtgccaagcaccggtgccaaatcgacatttatgccagcagtggctaattgcgaaccccacgtgcctgccgattgacgcaatgcgtcagcggacattgtgccctgctcaacggcactgggcattgtgtcgaaaccggtaccagtcagatgctgtacctgaccaccctcctgatcggtggcgatgatgagacgattgccggccggcgcatatccttggagttgcgcggtcgcggtcttgaccgtatcgacgccggtattccaattgccaatgagaatggccgagccaatgtgctcgtcggcgattgttgaagccaacgaggagggttcggaaccggcgaacaacggcaccatcactaactgtcccacacgttcctcaagcgtcatggcggataccgcacgttgggcttgtgccgccggatcgtcgttcttcttcggggaaggaacgtcggtgcgcggtaacgcactcgtctgggaggtctggggagtggtggtgttgccgtttgatgtggatttggcgaaccatccgacatgccatccgtagactgccacaccggccaacaccaccgccaaagcacatattgccgccacgattggaatgctcctgtgccgaagttggcgtgtggcgtgtgctgagggacgcatatgttgtggccgttgtctgtccataccggcaagcgtagaacagagcgtagaacaggatgttgcctcattctgtgctcagggcataaccgacctcccgccctttcgataggcttgagttatgtcttttaacgatcctttctcagtactgttcggcaatggcggcgattcacgacgcaacaatgcgaacaatgacgatccgatcatcctcgatgtcgaggccgatggggacggtccggcccacaacaccaacgctggcccctccgggtcatcccgccctccacgtggtccggccaatccgcgtatcacccgtaagccagcgtccggtggctcaggagccagccgtggcagcaagattctgatcggcgtggtgctggccttggccatcatcgtcggtctgttcttcggcctgtcccgattcatcaccgatctgatgtggtacggccagctcggcttccagtccgtggtctggacccagctcggggtgaaaatcggtctgtgggtggcctacgcgctgctcatggccctgaccggcttcgtttccgcctggctggccattcgagcacgccctgattcggccgacggttccaccattcgcattaacggcgatgtggtcgaggtcggcaaatccgtcagctcgaaaaccgctcgccgcgtggccgtggtgatttcgctgatcgtcggcgtcatcttcggttcccagtttaacgcgaactggagcgagattctgctcatgttcaacgcgcagtcgttcggcaccaccgatccgcagttcggtctggacaacggcttctacgtgttcgtgctgccgggcctgaagctcgtgctcgccgccgtggccatgctgctgggcgtgggccttgtgttttccgtggtcacgcatgtgctgatgggcggtatccgcattaccatgccggttaacggacgcggcctgttctccattaccaagcgttgccgtcgccagcttggcatctggctgatgctcaacatgttcgcttgggcagtgcgccagatgattggcgtcttcgaccagctcaccgtgcagggttcacgcatcaccggtgcctcctacaccgccgtacatgccaacatccccgtcaccttcatcatggccgtgctgaccgccatcctcggcgtggtgctgggcatctggctcatgcgctcccacacgctcgaaggccaggcgtccatcggcgtgcgcgcttccgccgcgctcaaggcctggcgtgtgccggtgacctccattgccgtcgtggtcgtggtgggtcttgtgctcaccgtggcatggccggtgctgttgcaacgcttccgcgtcaacccgaacgcacaggagatggaatccacctacatccagcgcaacatcgacgccacccgcgccgcctacggtcttgacaagctcaagaccgagcaatacaaggtgaccgacaagggtgagcagggcgctctggccaaggaggccgacaccaccgcgcagatccgtctgctcgacccgcaggtcgtcagccccacgttcaaacagttgcagcagtccaagcagtactacaccttcgccgacaccctggcggtcgacaagtacgagattgacggcgtctcccaggacaccgtgattgccgcccgcgagctcgatctggccggcaatgacaaccgcaactgggtcaatgaccacaccgtgtacacccacggttacggcgtggtggccgcctacggcaacaaggtgaccgccgacggccagcccgaattcttcgaatccggcatccccacccagggcaagctcaccgaatccgaaaagtacgagcctcgcatctacttctcgccgaacaccaccgaatactcgattgtcggtgcccctgaaggcacgcaggcttgggagttcgactacccgaccggttcggaaggtgctctgaccacgttcaagggcgacggcggcccttcggtcggcaacctgttctccaggattctctacgctatccgcttcggctccgatcagattctcttctccgaccgtgtgaccagcgaatcgcagattctctacgatcgttcccccaaggagcgcgtggccaaggtggcaccgtacctgacgcttgacggccgcgtgtatccggccgtggtcgatggccgcgtcaagtggatcgtcgacggctacaccacctccgacgcctacccgtactcgcaaataaccgacctcggctccgccaccaaggattccaccaccgtctcttccgcaacggtctcgtccctgggctctcagaaggccaactacatccgcaactcggtcaaggccaccgtggacgcctacgacggttccgtggacctgtacgtgtgggatcaatccgatccggtgatcaaggcatgggagaagatcttccctggccagtaccaccagctctccgatatctccggcgacctgatgagccacatgcgctacccggaaagcctgttcaaggtacagcgcgagctgctctccaagtaccacgtgacctctgccagccagtactactcaggcgaagacttctggcagacgccggtcgatccgaccgaatcccagtcccagcaggaccaggacatcctgcagccgccgtactacctgaccttgcagaccggtggcaccgaggaaccggtgttctcgctgacctccacctacattccggctggccagtccacccgtgagatcctgaccggcttcctgtcggtcgactcggatgccggcaatgagaagggcaagataggctcgaactacggcaccatccgattgcaggagctgcccaaggattcgaacgtaccgggccccggccaggcgcagaacaacttcaacgccaacgccgatgtatccaaggaactgaacctgctgcaatccggcgacacgcaagtggtgcgcggcaacctgctcaccctgccgctcggtggcggactggtgtacgtgcagcccgtgtacgtcaagtcttcgggcgtgacctcattcccgttgctcaagaagacgctggtcgcattcggtgatcaggttggattcgcggatacgttggatgaggccttggatcaggtgttcggtggcaattccggtgcggccgcgggcgatgccgagaacgtgtccggtgaccaatctggttccgataccaatggtggtcagtccggcaccacggacggaaagtcggattccggctcgtcttccgaccgcagccccgaactccagcaggcgttgaacgatgccgcccaagccatgaaggacagccagtccgccatgaagaacggcgactggaccgcctacggcaaggcgcagcaggagcttgaagacgccctcaacaaggccatcgagctcgacaagtaacttggcttccctcagggtgaggggagctatcgccgaaggcgactgaagggagtcggttacctcaactgacatagcccgtccttatcataaggacgggctatttgcgtattcaaaggaacttcatgccatacaccttccatccggccgtcgaatccgacatccaagccatcaccgacatctacaacgctgcggtggtggcgggtggggccaccgccgacctcaccccgcgcaccctcgaccaacgccgcgcctgggtcgaatcccatacgccgccctacggcgtttttgttgtggaatcggaagacggttcaatcatcggcttcggtgcgctctccgtgttctacgatcgtgccgggtatgacggcgtcaccgatttggcctattacatcgatccggcatggcaaggcaggggagtgggcacgttcatgcttgacaggctgctcaccgaggcgcgggcccgccacatgcgcaaggcctgtggcatcattttcgccgataacgtcggctccattgccctcatgcgccgcttcggcttcacccaattcggcctcatgcccgccgctgccaccgactccaccggcaccatgcgggacatgtcctactggtatttggacctgtaggcccgaggcggtttacccttgctctccatggattccggtgtcctataacactaaaaagttgtatcggatcagctcttttcctcgaacgccatatatcggacgcgcttatcccagataacggcaaactgcgggacagcacgcgattttcgtccgttttgacgtggcatcccgcaatcacgtgggatgccacacacgtcaaacgatgcacatagctagcgtcccgcaactctgcccgcgaaatcattggaattctgccattcttatgattcggtgcagataacgtgcgataacgcttgcgggatgccacgccagaaacgcccaaaatccgctgccgtcccgcaatatgtcatccgattgcagggaagcgtgaggcgttgcacaatcaaggctcgtcaccgatgcccgatatacggcattggtggacatatcagtccaactgtttgccgcagtttgggcagaatcgtgcggagactcggcaaggcgtgccgcaattggtgcaatagcgctttgcaatatgttcaggtgacggcgcaggcaggggagatacggctgatgtcgcgttgaattcatcgctagttggttgcgcaggtgaagacaccatcgggcatcctctataacctgtccgcagccacgctcggcaatatcctcggcggccctgttcgtggcgctggcctactggtacctcaacggcaaacagcgcgaaaaggtcgctggcgacaccgcctaatagacgcgattcactcgtctccatctcttgtaatactggtattacaaggaggtgcgatatgactatggccatggtgacggcgcgcgtcaatgccgaacggaagcgcgacgcggagaaagtgcttaagcgtaatgggcgcacctattcggacctgattcgtgatctgaccgactaccttgcggatacgggggaactgccggaattcgagcgtctgacgctctccctgattcaggagcgggagcgtaggaaaaagcaggagttgattcaacgtttcgccgaccggaatttgccggaggcggaaggcgatctttcggatgaggagattctcgcgcaggcacgtatggaacgatttgggggacgggatgaaactgctgtttgacacgaatattctgctcgatttgtgcaatgacaaacgagcgcctttccataaacaatgtgttgatttgctcatggaagccgttgcacagccaaacattgagatcatggcgccggtatcgtcattgaatgacgtgtattgcgtgttgcgcaagcattatggcgaggagcgggcggcgcgagacgatatcggtggactgatggaattgttcgacatccgtccacttatggaacgccatgcgtgtatgtcgtaccgatccgatgagcccgacttcgaggacgggctcatccgtgccgttgccgaggacaatgacgccgacgtcatcgtgactcgtgacgtcgaagcgtttcaccattcatcggtccgatcgatggatgccgagcaatgccgtgccctgctgcttgccgattccaaggcttgacggcggcgttgagtacaatcttgacggttgaatccggccgggcatgggccagtgcgcgaggcgaacgcgcgcatgacgtacggaacgtacagaacgtgcatacgggaatataggaagacggacgaggagtggattatggcatcggatttctggctgattgcgggactgggcaaccccggcaaaaaatatgaggacacgcggcacaacatgggcttcatgaccgccgacgtgctcgccgaacgttggacggtgaacttcgccgaccacaaaggtctggccatgctcggtaaaagcgtgatgaacctggacggccgcaccgtcaagttctttctggccaagccgctgacttatatgaatgattccggcaatgcggtggcttccattagcgcctattaccagatcgagcccgaccatatcgtggtgattcacgatgacatggacttggaattcggtcgtatcaaggtcaaggcaggcggctccgcagggggccacaacggcatcaagtcgattgaccgttccctcggcacgccgaaatacgcgcgtgtgcgcatgggcgtcggtcactccaagcgcggtgcgaacgcgcatgacaacacggtgaactgggtgctgggcggattcggtccggaccagcgcaagcagctgcccgaattcctggctgacggcgccgacgccgccgaggacatcatcttccgcggtcttgccaagacccaggagaagttcaatggccggtgaggcgacgcacccggacctgatcaacggctcactggtaggcatcctgtctgagctggaacaggacaagaccttccttagactcgccactggtgacatcgaggtttcggacgacatcgacaattccgttctggccggtgtttccgaaggcttgcgcccggctttggccgccgccatcgggcagggtgtgaccggcaaacccggcaagccggtcgtgctggtcgtggcctccggccgcgaagccgaagagaccgtgggctcgctgcgctcctggtatgacggcgacccggacgacatcgcccagctcgaagcctgggaaaccctgccgcacgagcgtctgagcccgcgcgcggacaccgtggccagccgcatggccgtgttccgcagactcaagcatccgagcgataccgatccgatgttcggcccgattcgcattctcgtcatgccgatccgctcgctcatccagccggtcgtccaaggactgggcgacgtcgagccgctcgtgttcaccgtgggggaggacctgcccctcgacgaagccgccaaacgtctgatcgaaaacgcctacacgcgcgtggacctggtcatggaccgtggcgagttcgcggtgcgcggaggcatcctcgacgtgttcccgcccaccgcaccgcacccggtgcgtatcgaattcttcggcgacgaaattgacaccatcaaggaattccacgcctccgaccagcgtacctacggcgacggcctcaagaccatctgggccaccgcatgccgtgaactgcagctgaccgacgccgtgcgcgcccgcgccaaagccttggtcggttcgattcccaatgctgaggacatgctcgaatccatcgccaacgccattccggtcgaaggcatggaatccctgatgcccgcgctcgtggaccatctggaaccggtgggctccatgctgcccaagcacgccgtgatcctcctgagcgacccggagaaactgcgccgttccgccgaagacttggcaaaaaccgcgaacgagttcctggccgccagctggcatgtggccgcttccggccacggcgccggcgcgcccatcagcttcgacaaagccagcttcctcgactatgcggaaaccatcagctccctcgaatactccgaacatccggtgattcgcctcaccagtttcggcgtggacaccacgctgaccggccatgtgcagctcgacgcccagaacccggccgaattccgaggggatgaggccaaggcctcccaaggcatcgaaggcctgctcgacgccggcttccacgtcaccatcaccgccgctgcggccggcaccttggccaggctcaggcgcgcgatcaacactaccggcatcgccaatttcgacgtcatccgctctcaggccatcgacggcttcgtggacaaagccgccaaaatcgccctgctcaccgaacgcgacctgaccggccgcacttcggccgtggccgtggccaaaacgccgaaacgccggcgcaaggccatcgacttggtggaactcaaaaaaggcgattacgtggtgcacgagcagcacggcattggccggttcatcgaaatgcgccagcgcaccatcggcaccggcgccaacaaaaccactcgcgaatacctggtcatcgaatatgcgccttccaagcgcggcgccccggcggacaaactgttcatccccaccgaccagctcgaccagatcagcaaatacatcggtgccgaagcccccaagctcaacaagctcggcggctccgactgggcggccaccaaggccaaggcccgcaaacacgtccacgagatcgccgacgacctgatcaagctgtactccgcccgccagcgcgccaggggcttcgcgttcagcccggacaccccatggcagaaagagctggaagatgccttcccctatcaggagaccgccgaccagctcaccaccatcgacgaagttaaatccgacatggaaaagcccgtgccgatggatcgcctgatctgcggcgatgtggggttcggcaaaaccgagatcgcgctgcgcgcggccttcaaggccgtgcaggacggcaagcaggtggccgtgctcgtgcccaccacgctgttggtccagcagcattacgagaccttcagcgaacggttcgaagggttcccggtcaatgtggcggccatgagccggttccagaccaccaaggagatcaacgggaccgtcgagggcctgcggtccggcacggtggacgtggtcatcggcacgcacaaactgctgaaccccaagatcacgttcaaggatctggggctcgtcatcatcgacgaggagcagcgtttcggcgtggaacacaaggaaacgctgaaggcactgcgcaccaatgtggacgtgctgtccctgtccgcgacgcctatcccgcgcacgctggagatggccgtgaccggcatccgcgaaatgtccacgctggccaccccgcccgaagaccggttgccggtgctgacctatgtgggagcctacgaggacgcgcaggtcaccgcggcggtgcgccgtgaactgttgcgcggcggccaggtgttctacgtgcacaatcgcgtgcaggacatcgcgtccatcgccgacaagatccatatgctggtgcccgaagcgcacgtcggcatcgcccacggcaagatgggtgagaagcagcttgaccagatcatccgcgacttctggcatcgtgacatcgacgtgctcgtgtgcaccacgatcatcgaaacgggtcttgacatatccaacgcgaacacgctgatcgtcgaccatgccgaccgtttcggcctgagccagcttcatcagctgcgcggccgtgtcggccgtggacgtgaacgcgcgtacgcctacttcctgtacgacccgtccaagccgatgaccgagcaatcccacgacaggctcgccacgatcgcgcagaacacggcgctcggctccggtttcgacgtggccatgaaggatctggagctgcgtggcaccggaaaccttctgggcgacgagcagtccggccatatcgagggcgtgggcttcgacctgtacgtacgcatggtgtccgaagccgtggagaagtacaaggagcccgaagagaacgtcgagccggtggccgtgtccatcgacctgcccatcgaagcgtcgattccgatcgagtacatcgattcggacaagctgcgtctggaagcgtaccgcaagctcgcctccgctcgcaacgaggccgatttgaaggatctggaagaggagcttaccgaccgttacggcaagccgccggtcgaattcgagaccctgttcgacgtggcccgtctgaagttcaaggcccgcaagctcggcatttcggagattctcgcgcaatccaaccgcgtgcggatcggccgtatcgacccgcccgaatccatccagatgcgtatgggccgtatttacaaaggcgcccaataccgcccggtcacccaccagctcatcgtacccaccccgttcaccggttccctgggccaaggccccatgagctccgaccaggtagtcctctggactaaccaactcctcgatgacttggcatggaggccacaacgatgaaaaaccaacacgcggcaacacttgccggctatgagattccccgcctcggcatgggcacaatggcgctcgccatcgaggggcgcccctccaaccgtgatcaggcgatcgagaccatccatgccgcgctcgatgccggagtccgttatttggacacggcttggtcctattatctgcccagcgcacccggcaccggcgaaccggaggatatgggctatggcgaatatctggtccgcgatgctctgcactcgtggcatggccccaaagatcaggtgctcgtagccaccaaaaccggctggctgcgcacgcttgacggcaacggcaactacggctggcaggccgacgcccgacctgaaaccatgatcgccaatgccaaggaatcagcccgccgcctcggtgtcgatacgctcgatctgctctactcgcactgcaacgatccgcaggtgccgtacgaagaccagatgggcgcactcaagcagctcgtggacgaaggtgtggccaaagcggtcggtatctccagaatcgacaacgcggacatcgaagccgcccacaacattttgggcgatcgtctcgtggccgtccagaaccagttctccccggttcaccgcgaccccgaacacacgttggagacctgcgaaaaactcggtttggctttcgtctgctggtcgccgctcggtggattccttgacccgttcaacgagcatctgttcgaccggttccgcgaagtcgcgaagtcccacgactgctcctaccagcgcgtcacgctcgcgtgggaacttgcgcaataccaatatctgttcacgattccctcggccagaaacccgcaggagattcaggactcgttcaaagccggcgaactgaaattgtccgacagtgaaatcgactacctcaatggcaaggacgtcgactgagcgatttcgtccgtactgccttgcaatcaggcggcgcatcggcattgtgagcgctaacactaaattttgggcgtgttgttcacaacgtccacaaatcgcactactcttaagaatgtcattcaagatacacaaccgttttaaggagtagttgtggcagtaattgaaagcgtgtacgcgcgtcagattctggattcccgtggcaacccgaccgttgaggtctacctggagaccgaagacggcgctcagggcaagggtctggttccgtccggcgcctccaccggtgaagctgaggcttgggagcgtcgcgatggcgacaagtccgtctacggcggcaagggcgttcttaacgcggtcaaggccgtgaacgaggtcatcgctccgaaggtcatcggcatggacgctgctgaccagcgcgctctggacgacctgatgatcgagctcgacggcaccccgaacaagggcaagctgggcgccaacgccatcctgggtgtctccctggctgctctgtacgcttccgccgagtccgccggcctgccgctgtaccgctacatcggcggcaccaacggtcacatcctgccggtcccgaacatgaacatcatgaacggtggcgctcacgctgacttcgccaccgacattcaggagtacatgatctccccgtacggcttcgacacctactccgaggctctgcgcgctggcgttgaggtttaccacaccctgaagaacgttctgaagaaggaaggcctgaataccggcctcggcgacgagggtggcttcgccccgaagatgaagtccaacgaggactccctcaagtacatcatggacgccatctccgccgccggctacgagcctggcaagcagatcggcatctgcctggatgtcgcctcctccgagttctacaacaaggagaccggcaagtaccgcttcgacggtgaagagcgcgactccgcctacatgctcgactactacgagaacctcatcaacgagtacccgatcgtctccatcgaggacccgttcaatgaggaaggctgggaagactgggctgccatcaccgctcgcctcggcgatcgtctgcagttcgtcggcgacgacctgctggtcaccaacccggctcgtctgcagaaggccatcgacctcggcgccgccaactccctgctggtcaagctgaaccagatcggttccgtcaccgagaccctcgacgccatcgagctggccaccgccaacggctacacctccatggtttcccaccgctccggcgagaccccggacaccaccatctccgacctggctgttgctaagaacacccgccagatcaagaccggtgccccggcccgtggcgagcgcgttgccaagtacaaccgcctgctcgagatcgaggaggagctcggctccaccgctcagtacgccggctacagcgccttcaaggcctgcaagaagtacttggccaagtgagctgaaacgcccgtaaaggcgtgagtttccactgaagctcgatacccgtcgtgttcgtcaagtcgaatgcggcgggtattttcatgtgacatgagcaagtcgtcccgtaccggcaaacctggcaaaaccggcaaagcacaagtcaggaaaaaagggtcggcggggcccatagcgttcttcgtctccctgttcatcatcgcactcggcaccatccagctggtctccaccttccacacttatgccctgaacctggccgagctcaatggcctcaagcgtgaggaagcctcgctgatcgcccaaaagcaggagttggagaacgatatcaagcgttgggatgacaaggcctacatcaccgcccaggcccgtgaacgcctcggcttcgtattccccggcgaacaggccgtgcgtgtgctgcatcccgaagccgtgaccggctccgatcgcgaatcccagaaaacggaagattccaataccagcaacaaaaaagtcctgccatggtacagcgaactgtcttactcgctcaaaaaggccgatgagcctgtgaccgatagcgagtccggcaaatccgatacttccggttcctctgactcgtcatccaacgactcatccaagcagtccgataagtcagaccagaacacccaatccgatcagaacacccagcaaaacacaggggagggaacccaacagtgaccatcgatatcgccgccaaggccaaggcccttgtcgacaccatgcttgccgagcccgccaacgaccatgacatcgacctggtgcagcgtcagctcggccgatacccgcgcggcatggtcgccgtgggggcgcgatgcgtctgcggtaggccacttgccgtaatcacccgtccggtgttgcccggcggaatccctttccccaccacgtgctatctgaccggtccggaagccgtcaaggccgcctcccatgtcgaggccgccggcgtgatgcagcaatacaacgatatgctggccgctgatgaggagctcaaggccgcatatgagcaggcccataatctgtatctggcattccgccacgaactggcaggacgtcttggcgacagcgaggagcatattgaaggcacttcggccggcggcatgccggtgcgcgtcaagtgcctgcacgccctgctggcccagtccctggttatgggaccgggtgccaaccccattggcgatttggtgctggaacgtgtcaaagacgagttcgatccgaccgtctgccgttgcacgctggatgattgatcaacagatgagccaccgcgaacagcccattcatacgcactaagggatacgaggagaaggcaatgagcaaggaatccgtaaccgtcgccggcattgattgcggcacgaactccattcgactgaagatcgcacgtgtcgatgccgatggcatgcatgaggtggtgccg

SEQ ID NO: 3127 - DNA, 23517 bp, Unknown
  R215_18m  MAG No. k141_30221
agtgatcgagggcatcatcagcgggattgtgacttggaacagggtctggcgcggattggcgccgtccacggctgcggcctccatcacgtcggtgggtagggcctgcaggccggcgatgtagatgatcatcatgtagccgatttgctgccagcacaccaagatcgtgatgccccagaatccgtaggttcccgagtaggtgatcgacctaccccagtgagccaggatgccgttgaggagtagctgccagatgtagcccaggatgatgccgccgatgaggttcggcatgaagaacaccgagcggaacaggttcgcgcccttcatcttcttggtgaacatgtaggcgatgaagaacgccgcgatgttgatgatgagggtggtcacgatggtgaacgccacggtgaaccacagcgagtggaggaagaccttgtccgtgaagacaccggagtagttcttcaggcccacccattcggcgtcggtcacggtggtgaagtccgtgaagctcagatagatgccgatgatgaacggcacaacgaagccgatggcgaatgccgcgcaggtaggcaacgcaaacagcgcccaccatttgcggatcgatttaccaaccatcgaaatcatgatgaccctttcttaggatggaatattgctggggatgcacggcgacgatgccgtgcatgtgtggccggtaggttcccgctgacggggccggcccctgtgattagtccgtgagtcgcagccagacggtgacgtcctgcggtagcctgccgtcctcggtgagcgaggcggaagccagaacgatgtcgccggccggcagcgcaaccgggtcctcgccgaagttggtgatgctggcccagccattggaacggcggtaggcgatcacgccgccaggctgcccgtcggcaccatccttgcgggtggaggcggtgtcctcgtcgagccaggtcagttcggtgtcgaccggcattagcttgtggcgcagggcgagtgcagtgcggtacaagctgagcatggaagcggggtccgtggcctcgctatcggccgcgaaatccttgtaccatgcgggttgcggcagatgcggtcgttcggatggggtgccggactgtgcgtcttcgactcctgctccagcggttttgacggccggtgagaatccgaatgccgtgctaccggtgtcgtccgcggtccatggcagcggcacgcggcatccgtcgcggcccttctccagtcgggtgcgaacggtgtggaaggcggtcgggtcctcgagctgatcccacgggatgtccgccacctcgaacaggccgagctcctcgccttgatagatgtaggcggagccgggcagcgcgagctccatcatgatggcggcgcgggcacggcgggtgccgagttcgcggttctcgatatagctggcgccatcgcgcagaatccagtccttggccacctgatgatggccggtggccggcatctgcgggagggcgtaacgcgaggcatgacgtgggatgtcgtggttgctcatcacccatgtggaggtggagccggactgttcggcagcctccagaccctcttcgatggccagatggaattcgtcgcgaatccagttcttcttggcgaattcgaagttgaacacctgaccgagctcgtcggggctggcgtacaggtactggcgggccgggttgacccaggcttcggccacggcaaaggcgggcgggtcgtattcgttgaacaccttgcgccattcgcggtagatttcatgcacgtcatcgcggtcgtacaacgggtggctgccatcggcgggcaaggaggggcaggtgatggcccattcgtcgaggtcggtgcggtcgaggtccttggccaggccatgggccacgtccacgcggaaaccatcggcaccatgatcgagccagaagcgcagcgtagtgatgaattcctcgcgcacttcggggttgttccagttccaatcgggctgttccacggtaaacatgtgcaggtaccactggccgtcaggcacgcgggtccatgcggagccgccgaagctggcgatccagtcggtcggcggcagttcgccgttctcgccgcggccgtcacggaagatgtagcgatcgcgctcgggtgagccgggttccgcggccagcgcggccttgaaccaggcgtgcaggttggaggagtggttgggcacgatgtccacgacgattttcaggccggctgcatgtgcggtggcggcgagctcgtcgaagtcgtccatggtgccgagtttcgggtcgacgttgcggtagtcatccacgtcatagccgccgtccgccagctggctggggtagaacgggctgagccagatggcgtccacgccgaggtccttgaggtagccgatcttttcggtgacgcccttgatatcgcccaggccggaaccggtggtgtctttgaacgatcgcgggtatacctgatacaccacggcttgcttccaccacagtgccgggtcggatgccgtgaaggcggagcgagtctcgtcgctgtgcatgcaatctccttttctacttccttgtcgtaccaattaagacagcgctttcatttgtgtccgttggctgcaaatacggcaagacatggcgatatgttgcatttacttgtgggtttattggtgtctcgtcggttttgcgaggaggttcggataacttcttcgttgtcgtttggtaggaaaaatgataacgcttacattttgatggcgcaaatatgctgatttcacggcgtgttcgttgatattccgccctcgtggccatacgttaacacggtgttgaaaagttataaaacagcagttattgtaagagcaatgcaagttgtatggcagtagtgtaagcgttaacattattgctggaatcgtggtctgctcgtcatcggcggtgctgatgatggcggggctgaccaaaaccgtgttatcgttgagcggcggggcggaaatggagggggtgcactatgggtcgatctacgatcagcgacgtggcgcttatggcgggtgtctcggaggcgacggtgtcccgtgcgttgcgtggggtggacaaggtctcggaccgtacgcgccaaaaagtggtaaaggcggcggaaaacctgaacttcaccctgtccaaaagcgcgtcggcattggcgtcgggcaagactaagcgcgtgcagctggtggtgtcgggggagctcaaggcatggttcaacgcctcggtattgcagggcatatacgaggtgctatctcctgcgggctatgacgtgattcccgcgttcatcatggacaagtcggagctcgacagcctgttcgccaagctgcccgccaatcgcaatatggacgcgctgatcgtcgcgtcattccggttcgatgtgcagttgcatgaccacatgcagaagatgggaatccctaccatcggcctgaattcgccctccttggacggcttcgatgcctcagtgggcattgatgacgccgccggcatgaagctgggcgtgcagctgctcaagtcgcttggccatcagcgcatcgccttcgtgtgcgattacgtgccgcatgacctgttctacagcaccaccttgcgttccgatctgttctgccgggcggcgttagacgccggatacgacgaacacagcatgatggtcgtgcgtgcttccgagcatggccgtggcgtctcttatgagcaccttgccgcggaggtggcggccaaaatactggcttcgccgctgcggcccacgggcgtatgcgtggagaccgacgagttcgcggtcccgctgctcaaggaactgcgtcggcagcatatccagattccgggggatctgtcggtcgtcggatttgatgatgcctacatcgcgcaggtatctgacctgaccaccgttcgccaggatccggttgggctgggccataaggcggcgattaaggcgctgggccttatgcgtggcgagacgctggggcatccgcatgagagcatcgcccctgaattggtgttgcgcgagaccaccggtcgccccagatagagcattcgctgcgcacggctgtccatactccaatagtgacctagctcacgttgtggactccaacggggctgcggcggcgttctcggtaggattgatttcggtttgaaggacacaatcctcgcaaaacaggacttatctgcacaccgtagataccccggcgcccagcggcgccacaccccactactgaaaaggagtgccaataatggcagcacagatctggtatgagaacgacggtgatctctctgttctcgaaggcaagaaggtcgcaatcatcggttacggctcccagggtcacgcccacgcactgaacctgcgcgattccggtgtcgacgtggtcgtcggcctgcgtccgacctccaagtcggtcgatttcgccaaggagcagggcctcgaggtcaagtccgtggccgaggcttccgccgaagccgacgtgatcatgattctggcccccgaccagtaccagcgcaccatctggaccaacgacatcgagcccaacatcaagccgggtgccgccgtcgccttcgcccacggcttcaacattcactacggctacatcaagcccaccgaggatcacccggtgttcatggttgccccgaagggcccgggccacatcgttcgtcgtgagtacgccgctggccgtggcgtcccggtcgtcgtggccgtcgagcaggacccgcgcggcgacggctgggctctgaccctcgcctacgccaaggccctcggtgccctgcgcgccggcgccatcaagaccaccttcaaggaagagaccgagaccgatctcttcggtgagcagaacgtgctcatgggtggcgtgaacaagctcgtcgagatgggcttcgaggtcctcaccgacgccggctaccagccggaaatcgcctacttcgaggtctgccacgagctcaagatgctcgtcgacctgatgaacgagggtggtctgaacaaggctcgttggtcctgctctgacaccgctcagtacggcgactacaccaacaccgtcatcaacgaggactgccgcaagcgcatggaataccacctgcagcgcatccaggacggctccttcgccaaggagttcatcgacgatcaggatgccggcgccccgcacttcaaggaactgcaggagaagtactccaacgagcgcatcgagaccgtcggcccgaagctgcgcgccatgttctcctggaacaaggatggcgtcaaggatgccgacgaggccaactccttcaccggcaagatcgcccgcgcccaggttcagtgagcccctgtagctcccgctggcgcataagcgcctgaggggagtacccagcacgtaccaaaaggccgccgctccgattcattcggaacggcggcctttcgtatggtccccaccacgtagtcaaacctccatcgcgaggtgaaatccccacgacgtagcgaactgcccaccacgcggtgacgcaaaacggttctattccacggaatgcaaaattacgctgacatcgtggtgaaccacaaagttacttaataacccacacagacgtgtcggtggggagctggccttcgggggtcagcgggccggacgccagcaccacggagccatcgggcagcgcgaccggagcgtcgccgaaattggtgatcgaggtgaacacccgcccgccaaccgccgcgcgggtgtacgccaccacatcgtcgcccatgtccacctgctcggccgtggtgtcgcgcgtggcggtcagcgactcctggcgaatcgccagtgcggcgcgatacagcgcgagcatcgagtccgggtcggcttgctccacgtccaccgcgtaatccttgaaccacagcggttgcggcaggtgcgggtcggcggccggcgtcacgccctcagcgcgcgtagccggcgagaagccgaaggaagcgcccgtgccgaactggccggcggcgcacagcggcacatggttctcgccggtaccgtcatcggccggagtcggacggctgaaatcggccaaggccggctcatcggcggcggtccacggcagcggcacgcggcagccgtcgcggcccttgtccatcgtggcctgagcagtgtggaaagcggtcggatcctccaagtgatcccacggaatatcggccacctcaaacaggcccagctcctcgccctgatagatataggcggcgccgggcaggccgagctccatcaaagcggcggcgcgggcgcggcgggtgccaagctcgcgatcctcgggataggtagtgccgttgcgcagcagccagtcgtgcggcagctggtggtagggcgcgcccttgatctgcggcaggccgtaacgggaggggctgcgcggcacgtcgtgattgttcatgacccacgtggtggtggaaccgccggtttcggccgccgccttgagtccggcggcgatggcctcgcggaactcgtcggcataccagttggcttgcgcgaagtcgaagttgaaggactggcccagctcgtccatcgaagcgtacaggtgctggtgctcgggcaccacccacgcctcggccacggcaaagcgcggcgggttgtactcgttgaacaccttgcgccattcgcggtagatatcgtgcacctcgcgacggtcgaacagcgggtggctgaagtcatgattcagcacgccgaccacgctgtattcgcggccgagctcttccaacggcttggattcgaggtccttggccaggccgtgcgccacgtcgatgcggaagccgtcggtgccgtggtcggaccagaaacgcagggtcttcttgaactcctcgtggatgtccggattcttccagttgacgtccggctgcgccttatcgaacaggtgcagataccactggccgtcggccacgcgcgcccaggccgggccgccgaagaaggattgccagtcgttcgggggcagttcgccatgctcgccgcggccgtcgcggaagatgtagcggtcgcgcgccggggagccgggctcggcggcgagggcctcctggaagaacacgtgcttgtcggcggtgtgattgggcacgatgtccacgattaccttgatgccggcctcatgcgcggccttggccatcgcgtcgaagtcgtccatggtgcctaggcgcgggtcgacgttgcggtagtcgattacgtcgtagccgccgtccgccagatcggaggggtaaaacggggaaagccagatggcgtccacgccgaggctcttcaggtagtccatcttctcggtgacgccggcgatgtcgccgatgccgtcgccgttaacgtccttgaagctacgcgggtaaatctggtaaacgacggcctgcttccaccagtcgtcattgaggttatttgcggtcatgccgattccctcctgttccgggtgcgttgtggttgggttgttccggtcgcgcccgaactgctgtgtgaaggcccaaccgttgtattgatgatgacaacgatatcatatgaattacgcatgcaaaaatcgatttatcggcgttttgcggtggtaacgtggtcacgactgcgcgggcgctgctgtcgcggcaggcggcgcggtggtttcgcgcagtattagcggagtgtccggacgtacgaatgccggttcgattgacttgccggcaatggcatccaataccatgtgcccggcagtcgcgcccattgcgaacgggtcctgatgcagcgtggtcagtcccacggcggcggacagggtggaatcgtcgaagccgatgatggaaatgtcctgaggtacccgccgcccgtattgacgcaggcgatacagcacgggcgcggccatttcatcatcctcaaaacagaaggcggtgatgctgggggaggcgttcagtacggcgttcaatgccgcgttgctttcgccaagaccgcgttgaatgctcaggggcgttagctcgatccccggatgggcggcagcggcatcaatgacgccctgcaaacgagcctcggtactgtagcgcatattggtttcggtcggtgcgctgccgacgaacgcgatatgccggtggccgagtgcaatcaggtgctcgatagccgaacgtgtggcggcgtaatcatcaatgctcacgcctgcgtcgaacccatcggtggaggggatgttgatgccgacaatcggcacgtgcatatgcttcagtcgctccacttcagccggttcgatgtcgaaggagctgacaatcaccgcatccgcattgcgccgcacgggcaaatccgcaaagaagtcgtggcgctcggcggcgttgcgcatggggtagggcacagtgtcgtagccggaggggcgcagcgccgagtcaagaccggcgaagatgttcgaattgaaccaactggcgatggtctcgctggcaagtagtgcgatacggaacgattggccggattttagggcggcggccgagcgtgagactgagtagtcgagcttttcggccgcggccatcactcggtctcgagtctcgggaagcaccagatccggcttggcgaaggtccgggacaccgtggatacggaaacgccggcctcgcgggccactgcctgaatgcttgccttggtcatatgccgtcgctccttcgccgtcgcgaacaatcattgtcatgacaacgataacatgcccataacaagtcgtcgtcttcggctatctcgattacgaggggctgatttagggtgtcccggacatctacttccgtttcaaggggctccttgccggtgaaaccacaagtgcaaacgactttgtgccaacgtcattccgccgttctcgcgctgggtctacttgggcgccagccccttgaagcggaagtggatgtccgggaaaggccaaatcagcccctcgaagccgatttagaccaatttcccattgcggaatcgatcaccgcttctctcggcgcatcacggcggctagggactgcacgcgtggcaggtcgaagacctcgtcggtatgcaccacgtggcctgagctgtccgccagcggcacgcgccagttcgaatactcgctggaagtgcccggctgattctgggaacggcattcgcccacgccgtccaccagcgctgcctgcagcagcagcgacggcgtatcggtgagcatggcgtgcatcgcttccacgatctcctgcacatggccttccacatcatccgccacggtctgtgagatatagccgttctccaccagacggttcatcatggccgtgcgttcggccatcgccgaggcggcgaacgcctccaccggctcgctcaggagatgcagctcctcgcgcagcttgacgtgttcgaagttcaggtagccggcggtgggtggcagatcgtgcgtggtcaccgaggccaatgcctgtttgcgatagtccttgggtgcacggtacgggtcgccggcgttcggcgaatcgtccacgcggttgaaccattccacgtcagtgccgagcacgccgtgatcggacagaatgcggcgcacgtaatccggcacggtgcccagatcctcgccaaccaccatgcctccggcgcgcgtggcttcgatggccagtactcccagcatcgcttcgtggttgtacgttacgtatgcgccgttgagggcgccgagcccctgcggaatccaccacaggcggaacaggcccagcacatggtcgatgcgcaccgcgcccgcgtgctcgtacatcgaatgcaccatctcgcggtacacctggtagccggtggcctccagatagcgtgggttgaacggcggctggccccaatcctggccctgctggttatagaagtccggcgggcagccgaccgtgacgccgccggaggcgaagcgttccggattggcccaggcatccgcgccgagcccgtgcacgcccacggccatgtcttgcatcagacccagtgtcatgccgtggtccagcgcctcctgctgcgcggcgttcacctgctcggcggcaatccactgcagccagcggttgaactcgaacaggtcgtggtgctcctcgacgagctggcgcacggccgggtcgtcgatggtcttctcgaagaaccaacggttctcgccccacggcgcgccccatacctcgaagcacaggcaccaggtggcgaaggaatcgaggtctgggccggcggtggtcttgaaatgctcgaattcgagctcgcgcttgttgttgcggcccgcgtcgaagatcaggcgcagcgccgggcgtttggccgcccacgccgcgttgatgtccatcgggttcggttcgtcgttgcgtgcggccaccgaatcatgcagcgcatccacctgcgctcggatatcggccggcagcgtgccgtattcggggatgtcctgcgggcggatgtacgtcacgttgaggaatcggcgcgattccggtagatacggcgatggctcaagcggcggaatcggcgcgccggcgtgaatcgggttgatgagcatgaagtcggccttggacttgtcggccgcgtccgccagcagcagcttcagatcgccgtaatcgccgatgccccacgattcgcgagaccgcacggaatacatctgcgtcatccagccccaccgctggtgctcggcgaccgcctccggcacgggaatgcgcgcgggggcggcgatgatggccgccttgccctcgcgcccgtccaccgtgatggtcagtgtgtggtagcccatcggcagatcgggggcgatggtcaagtccggcttgccggaattgaggttcggcagcagggcaaagtggccaaacgcggtgctgtcctccagctcgatggaggcggtgatgtccgcatccgacgggcaattcagggtcaggcttgtcggcttgccggtggtggccatgatggtgggtggtagcaaacgtttgctgttttcggcctcaagttcggtcatggaacgttttatggcctcgtcgctggaggcgtccacatcgagggccttgagcacggcgaccaaggcctcgtcgctgatttcggtgtaggtaccgagctggtcgatgaacgaggtggaaagcccgcatgctttggccagcttgaccagcggacgggcgagtcgttccgcgctttccgcgcgctgcggggcaccggaagcggcgtcgttggtggtgtctgcgatggtgccggttctggtcgctgcgtcgttgccgtacgcgtcagtcatgatgactccttgcttgcagatcgggtactgctagtcgtttgcattgctgttcgagggccgctctgcgttgaggttccggcaatctgacagaccaatgttcgagctgttctgtctttaccgtaactcatattgacaacgattgcaatatggtcggtgagttgggtggccggcgggctatccgagcacggcgaacgactgcggggagagcgtcagctgcccgtcgcccacggccggctcgccgaggccgagcagcatgacggcatcgggggagagcgtgtccggcaggcccacggtttcgctgtggcggcccggattcatggcgatgaggagaggcccggccgccgtgccgtcgccgctgtcgtcgttcggcgcggccgtgcgtagataggcgaacgcgcggccgtccgcgggcgcggcgaccacgctgaacccggcgccggcggccagtgccggctgggcggcgcgcaacgccagtactgagcggatccagttgaacagcgaatgcggtcgcgaagcctcgccggtcaccgtcggcgcatcgtcggccggatcggtcggcagatacagcgcgtccgccggggccgtggagaagccgagattcggagcgtcggacgcccattgcatcggcgtgcggctgccggtgcgcacgtagccgccttccttggtgggcagcgcgcggtagcgcatgccgatttcgtcgccgtagtagaggaacgggcagccgggcatggtcagcagcatgccgtacgccaccttgagctcgcgttcggcgaggcgctgggccgtgcgcaaggtgtcgtggttgcaggtgatgaggttgaaatggccgcccgccgcgcggcaatcggcgagttgcggcaggtattccgcgaggaatggggcgattgaggcacctgaatcggcgttgaaataactggaatcgccttcgtgttccataggcgtatcagtattgcgcagcagcaggttgtagccattcgggtggccgtcccagcgccagtcgaggtagaagtccatgtcgaacccggcctgcatcgattcgttcggtcggccccattcggcgacaaacgccgcctcggggaattcagggcggattttcgagaacatgtactgccaggtgcggattgtgtatggtttgccggcgtcgtcgtgcttgacgaggctgtcggccatgtccactcggaaaccgtccgcgccgcgggccagccagaagcgcatcacgtcgatcatcgcgtcgcacgtggccagggcatccgggccgagcgccggtttctgccatgcctggtgcgggtgtgcgaaaccgtaattgagggccggctggcatttgaagaagttgaggatgtaggtgccgtctcgctcagtctcgccgccgatgaagggcagaccgtcgccgccggcgatccaggagtcggtccagatgtagcggttggagacattggtgggctggtctctcccccagtcggcttcgccgacagccccctcctcagagggggctgtcggcgggtctccggtgttttctttacggctcggcccatcggaggaggcgacaatagtgcgctcagcagggttcgggcgggagctggcttggaaccaggggtgttcttcgctggtgtggccggggaccaggtcgagcagcacgtgcatgccgcgccggtgggcggcttcgaacagcgcgatcaggtcgtcattggtgccgtaacgcggcgcgacttgtgtatagtcgcgcacgtcatagccggcgtccttgaacggcgagtcgaaacaggggttgatccacagcgcgttgcaccccaaagcggcgatgtagtcgagcttgccggtgatgccgggaatatcgccgatgccgtcaccattcgagtcagcgaacgattgcggatagacctcgtagaatcgggcgttttccagccaggctggcttggggtaagtctggggctgttgcgtcatcgtggtccttccttcaggtgtgatggatctggcttctctgccgggtccgaataacggttgtttttacagattcttgcgggatgttgcttaatgatactgcatgattgcgaacgctgtcaatctagagaaacgcgggataaacgttgaaatatcaaggatttaagactctgcaattatggctgattgcaattggcttgcatacgttcgcaatttcagttacactgaactcaagcaacaacgacgtaccccccaatcttccgcgattcccctgtatcaggccgaaaacggaaacgtagtacccaagggtgtgcgtggcaggagccgatactggagtcggcgtccgaagaaaggaaaatcaacgatgatggcacgatggaagaaagccctagcggcgatttccgcctgtgcgctgttcgtcacgggcctgtccgcctgcgggtccgcaagcgcgggcggagacgcggagcatatcacgcttgtggtgtgggcctcccaagaggaccaagccaacacggattcgtggctgcagaccatggaggccgcattcgaacagcagcaccccgaatacagcatcacgtggaaaaaccagaacgtggcctcggcagacgccgccggcatagccaagcaggatccgaccgtagccgcagatgtttacacgttcgccagcgaccagctgggcaccctgctcgatgccggcgccgtcggccaagtgagcgacccgacgatgaaacagctcgccaagcagaccaaaggcaatgccacgatgctacagaccgtcaccggcgaggacggcaacgtctacggtgtgccgctggccggcaacacctggttcatgtactaccgcaaaagcaagttcaccgagcaagacatcacctcgctggacgccatgctcgccaaaggcaaggtctcattcccgctgaccaactcctggtatctgcccgccttctatatcggtgccggcggcacactgttcggcaaagacggcaccgacgccaagtcgggcgtgcagttcggcggtgcaatcggcgccgccgtcaccgattacctcgtcgacttgcgcaacaacccgaacttcgtcaacgacaagaacggctccggcctggccgggctgaaaagcggcaaggtcgacgtggtcttcaccggcaactgggacgccgccacggtccgtgagaatctcggcgacgactggggcgtggccaagctgcccagcttcacgctcaacggcaagcaagtgcagatgaaggccttcgccggctccaccatctacggctggaacccgtacaccaagcatccggtggccgccgaccagttcgccgcattcctgtccggcaccgaatcacagcgcaagcactataagatgcgttcggtgattccctcggacagcgagcttgcctccgatccggccatcgagaaagacgccgtggcccaggcccagatggacaccatcgccgagacgtccgtggtgcagccgtccatcgccgagatgaacaacttctgggtaccgtgcgagaacttcggcaattccatctacaacaaggaagtcacccacgccaactcggccaaactcaccgagcagtggatggcctcataccagagcctcctgtagaacgcgagaagaaagaccaatcatggaaaccacagccatgccgcgcgcagcgaaacgcgcaccacgccgccgcaaggcggactacattcctccgtcgcactacacgttgcgcgcggcggccacccaaggcgatgccctgacccgactgtcgttcctggtattgggcgcaggcaacctggcccgtaagcaggtggccaagggactggtgttcctggccatcgaagtggcgtatatcgcctacatggtgacggctggcgggccggcgctcgcaatgctgggctcgctcggctcccgcacccagaccaaacagaagatcgatggttattggcattacgatgccggtgacaattcggtgctgctgatggtctatggtgtggccgccgtgttcatcaccgtactgttccttgtgttctggtcgtatgccgtgcgcagcgcgtacaaggcacaggtgctcgcccgagagaccggcaaggcgccgaccttcatcgaagacctgaagaacatcaccgatcgcaacgcgcaggtcatgttcatggcgttgccggtggccggcatccttgtattcaccgtcctgccgacgctgattatgatgtgcatcgcgttcaccaactacgatcccgatcacgtgctgctgttcgactgggtcggcttcaagaacttcacccagctgttcagcgccaccggcgagattaatgccgcccagtttggcagtgtgttggcctggaccctgatttgggcgttcttcgcgacgttcctgaacttcttcctaggcctgttcctcgcgatgatcatcaatcgtcgtactacccgactcaagggcttctggcgtgcggcgttctcgctgtcgatcgccgtgccgcagttcgtctcgctgctggtcattaaccagatgctccagccggaaggtgccatcaaccgcctgctgatgtcttgggggtgggtcgacagcccgctgccgttcttcaccgacaccatgtgggcccgcgtgaccgtgatcgtcgtcaacctgtggatcggcatcccgttcaccatcatgcagatcaccggcatcctgcagaacatccccgccgaacagtacgaagccgccaccatcgacggcgcgaactggtggcagaccttcacccgcatcacgatgccctacctggtcttcgtgctcaccccgtacctgattaccacgttcaccggcaatgtgaacaacttcaacgtcatctacctgctgtccggcggcaatccgaccccggtgggcgatacggccggcaagaccgacctgcttatcacctggctgtacaagctcacggtggaccgtggagactacaacctgggtgccgtcatcggcatcttcacgttcgtcaccttggcagtggtctccctgattacctaccgcagcagcgcttcctacaagaatgaaggaggattccgatgagcagcaacgcgcagaccgcgacccctcgtaccgacatcgcaacccctaagtccgccagcaatccgttctggcatgaccagcgcaagcgccgcatcgtgggcgatgtcctaagccatctgttgctcgccgtgcttgcggtgatctgggtgattccgattgtgtgggtggtgctggagagcttcaacaagaatcccggcccctacaacgagacctttttccccaccgaatacacgttggagaattacaccaagctattcaccgacacccacatcctgaacttcccgcgcatgttcatgcatacgctggtgatttccatcgtggtgtgtctgatcagcgtgttcttcgtactgtgcgtggcgttctgcatgagccgcatgcgcttccgtttccgcaagtcgttcatgaacattgtgctggtgctgggcatgttcccgggcatcatgtccgtggtagtgatctacttcattctgaagtcgttgggcctgacccagggcgtgggcgtcaccgtggcgttgattctcgtctactcggctggtgccggcgcgggcttctacgtgatgaagggctacatggacacgattccgatgtcgcttgatgaggccgcctaccttgacggatgcactcgctggcaggtgttcaccaagatcatcatcccggtgtgcaagccaatgctcgtctatcaggccctcacctcgttcttgggcccgtggctcgacttcgtgatggccaaggccatcgcccgcacacaggataactacaccgtggcgctcggcctctaccagatgctcagccgtgagtatctcaacgattggttcgcccgcttcgccgccgccgcggtaatcatctcagtcccgattgccatcctgttcatcgtcatgcagcgcttctaccaggagtcgatgggcggagctgtcaagggctgacgctggcgcgtctgcccttgcggggaagcccagtgggcttccccgaggctccgcctgagtgaggcgggagccgaacgaaggtgatactgagcctcgccgcaggcgagcccgtaattgcaggggccgcaggcgagctgtcgcgcaggcaagatttgaacaaaggagaacccccatggaacagcagatctccgcgttggcggtagccgattggacgccagccgaactggcgatgccctgccccgattatcccgtctatcaggatgacgacctcggtgcgttcccggatgccaaaggcaccaccttccgcgtctgggcacccacggccagcggtgtcaccctgcgcctgttcacggctggatcgccggagacggctcccgagcctgaaacgcaggccgacctcactccgggcgcggacggcacctggctggtgcgctgcgacggcatcggccacggcacctactacgactatctggtccgattcgcggacggcaccgtcaatcgcaccgccgacccgtgggcccgcgcggccggcgtgaacggccggcgcagcatggtcgtcgacctcgaccaaaccaacccggcaggctgggccgaggaccgccgcccgcacatccccagccgcgacctggtgatttgggaaacccacatcggcgacttcagcaacgacgaacacagcggcattccggaagagcatcgcggcacctatctggccttcacccacccggacaccagcgtggacggtgccggcgagttccccacctgcatggcctacctcaaacgtctcggcatcaccgccgtgcagctcatgccgttctacgactacggttccatcgacgaatcgatcccacgcaccgaccccgcccgcggcttcaactggggctacgatccgctcaactacaacgttcccgaaggctcgtacagcaccaatccgtatgacggcgccgtacgcatccgcgaatgcaaacagatgatccagtcgctgcataatgccggcatcaaggtgatcatggacgtggtctacaaccacatgttctccaccgacaactggttcgaacgtatgattcccggctacgcgctgcgccgccgcgccgacggcaccttcgccgacggctcggcctgcaccaacgacgtggccaccgaacacccgatgatgcgcaagtacatcgtcgattccgtggtctactgggcgcgcgaataccatatcgacggcttccgattcgacctcatgggcctgatcgacgtggacacgatgaacgccgtgcgcaccgcactcgaccagctgcctggcggtgccacgatctccatgcacggcgaaccgtgggcggcccgcgaaaccgcgctgttgcccggcgcgattctggccgacaagcgcggcatgccctacctgagcccacgcatcggcgcgttctgcgactccacccgtgacgcggtgcgcggccatgtgttctaccagtgggtgcccggctacctgaccggtgcggccgccgattacgctgacgacatccgtcatgccgaagacggctggcgcggcaccttgcgcgagaccgccagcgtggggcaggtcatccaatacgtttccgcccacgacgacctgacattgtgggacaagctgtgcgcggccatgcgccgcatccccaccgatacggactattcggccgaaggcgaggcgtgcgaggacctgatgcgcgccaaccgactggcggccggcatcgtattcgcctccgccggcgtgccgttcatgctgtccggcgaggaattcgcccgcaccaaacacggcgtctccgattcgttcagcagtccggccgcgttgaaccagctggattggcgccgggcgcaacgcatgggcgatctggtcgaccattacgccgcgctgatccaactgcggcgcggcaacccggcctacttcggcggcgctcgcatgatcgtgccgcgcgacgacgagaccgtggtgttccgcgtcggcgacgattgcgtggccatcaatcctaccggcagcccgcagacccagctcaccaccgatctggagatacccggcccgtacggcgaggtctcgaaaatcgcgcccaacgaatggcggtgcatctattgctccggcagcgatatgccgggcgcggtggaacagcgactgctgcccctgcccccgtacaccttcaccgtctggcgccgcaatcgtggctgacggcgatgctcgctcccgccggcggcgcacaccgcataccccggaaaggtggcgtgatgactgaccgtttcgctcccgactcccgctccctccggcgggagctgtccggcaacgccggactgagggtggtcgatgaggccgacaccgtaccgaccgtggatgcggtgtttttcgatctatacggcactctggtggatattcgtaccgatgagacatcggctgccgcctgggatgcgttgcgttcggccttgtctgactgcggcgtgacgtacgccggcaacgccgagctccagcggcgattcgaaaccttggcacagccgattcgcgatgccgccgtcgccgcgcacggcgagtgggccgagcccgatttgctgccggtatacgcggcgttggcgggggagtgccggaatgacgacgctatggcacgatcgttggcatggacgtttcggcaggcgagtaccagcctgctgcgggtgtatccgggcgcgccggaactgctggcgcgattgcgagtcgcaggaaagcgcgttgtgcttgtcagcaacgcgcaatcctgctatacgcggccggaactggccgcgcttgggttggatcgggcgttcgatcgcatcgtcatttccagtgaggtgggcgtgcgcaaaccatcacccgcaatctttcgtcgggcgcttgagaccgagcatctgacgcctgaccgcgtgctcatggtcggcaacgacgaacgtgcggatatcctgggcgccgcgtcggcgggcatcgccggcgtctatctgcgcaccgagatctcgcccgccagcgactcgcaggtcagtgcgcatgccgccttgtcgctggccggccccgattatgctgaactattgcaatacctgacatagcctaataaagcccccgctggcgggggctgtcggcaaagccgactgggagtggccgccggggcgccacacaactcccacagcccaaatgatcacaacaacggaggaacacatgaacgaagtcgaaatggagaagacgcggcgcggcgagcagcgccgtcgcaagggactgtccgtgttccgtctcaaggtgattggcgtgatattcatggcgctcaacgtggcgagcgtcgcgatactgcctgcgctggtgggcgacccgagccaagacatgacagcgctgaccgcgatcgtactgtgcgcggcggcttcctggatcgccgtgccgatttattcgtggctgttgttcgatggctaccgtcatacgcataacgcatgggcgtacgggctgcgactgctcgtcgtggccgtgatcagcgaggtgccatacgacctgattatgaccggcgagcccttcagcctgagcgtgcagaacccggtgttcggactgctcatcgccctggtcgtgctggcgctggtggactggctggcaaaaaatacccacggcgccttccgttggacgctgactgtgctggtcattatcgcgggcctgctgtgggatttgctgctgcatgtgggcgtagatcagcgcgtgctgtacacgggcgtgctcacgctgtcgttcgtgatggtgttctacttcctcaacgcacgcgagaattcgatgatgttcaccgccgggctgttgggcgcggtgatgtgcatcacgcccgccatcggcgtggccttcctgcactaccgcaacggcgagcagggtttcaagcaaccatggaccaagtgggcgttctatgtgatctacccggtactgctggtgtttggcgcgttggtggcggcgtagtctcggaatcggccggagggagagctctgaacgggccggcggcccgcggaagatacagcatcggcccttggccgattccgttggtcgattcctcccctacgccatctccccaaacggcatatccgtgctgcgtggcacgagttgcgcctcgatcacctcatgcggggtgtccggcgtctcgccggcgatgagtttgagcgctttttcggccgccgtgcgtcccatcgcatacgggtcctgcctcatggtggtcaggttgatggtgtcggcgtacgggctgtcgtcaaagccgacgatcgagtagtcgcgcggtgtgcggtgcccgtatcgctccagcttgagcaccagcggaatcgccatcatatccatctggcagcagatggcgtccgggaacttgtccaacgccagcagcgcggacagcgcggagtcggcgaaggccgggccgcgcggcaccgaaagcacctgccagttgatgtcgtggcggccttcggcgtcctcgcaggcgcggatgaagccgcgggcgcgcgcgtcgatcgaggaatcgagcccggccgcctcggagcaggggtagacgatgtgccggtgcccgaggttgatgagatgctgcgtggccgtgtacatgcctttttcgtcgtcgatgctgatggtggcgtcaaagccctcggaagacggcgtattgatgccgatgatcggcacatggatgcgctgcagctgctccacctcgtgcgggtcgatggcaaacgaggccacgaacacggcgtccacattgcgccggatgggcagctcggtgaagaactcatgtcggttggccgcggtgtcgatgtgctggaacagggagatgtcatagccggccgggtgcatcaccgattcgatgccggcgaacgtctgggtgttgaaccagctggtgatctcctcgttcatcagcatcgccacgcggtaggtctggccggacttcagtgccgtggcggagcgggagatgttgaaatcgagcttgtcggccacttccagcaccttgtgccgcgtcttccgggagacgagctcggggcgggtgaacgcgcgcgacaccgtggaaatggatacgccggccgccttcgccacctgatagatgtctgccttgcccatgtgtcctcctcgcatgaatcgtcgggtggagtgctgccagtccccagtgcctggcgatattactggcccttcgcatttgggtgtgtatgggccgtgcggttttattcggtgtgtgatcgaaaaagtgaagaaaaccgcgcggcttggttccgagtctagcgcgttcgacggccgggtgctgctcggtctggacagactcgggttgaacccggtctcgcaacgccacgtcacgtcgggctcgggcaccgccggcaacacctacgactccgccggcaatttccccgccgtcggatacaccaagggcgacttccacacctgcgccaagaacatcgccgactattccaacgccgacgaagtgcagaactgccgcctgagcggcctgcaagacctcgacaccagccaggaccatgtgcaagacaccatcgccgactatctggccacgctgctggacatgggcgtctacggattccgcgtggacgcggtcaagcacatcgccgcgcaagacgtggccgccatcaaagccaagctcgccgcaaagaccggccgggacgtggacggcatcttcttcgaacaggaggtcatcggcaacggcagcgaagtggcgtcgatccagccagtcaactacctcgccaccggcaaagtctccgaatccacttataacaaacgcctgcctgccgtgttcggcggcagcatcaccgtcgcggcgggcggcctggacgccatcggcggaccgacttgggtagattccgataaggcggccgtatgggtgaccaactgggacaccgagcgcaacggctcctcgctcaccacccgtgacggcaccagctacctgctcgccaacgccttcatgctcgcctacgattacggccagccgcacatcttctccggctactactacgccagcgtcgacgacggcgctcccggcgcccccgcacctccgtgccggacatgacctgcccgactgacggcaccttcaccgccaccgtggccaagggctcggccgtcgccctatacgccggcgcgacgcccgcaaactggaccggcacccggaaatacgatccgtccgaccccgcctggttcaccggcgaaacaccgcataagggcgatgacaccgccgccaagtccgccgattccgcagcgtccgccaagtcaggcgacgccaagtccggaaaggcaacgtccgatgccatccgtcgcgccgcaacgctcgccgccatcctcctgcccgtcatcgcctgcgtcacgttcatggcgatagctcgcaggaacggcaaagcccagtccgacaacagcggcccgaataacgactgatccggccccactcagccgcgcatccgcggcgcggtggcgctgcgcttcatgcggaaccgccactgaccaaggccctgatgcctatgcctgccatcggctggttgccggctgacgggcatgctaagtcttccgccggtcccctcatcgggaatcgacggaagactttttgtcgttgcgatgccgtgccttccgattccctgagagggggtgcggggcggtgtcaggagcg

SEQ ID NO: 3128 - DNA, 6628 bp, Unknown
  R215_18m  MAG No. k141_30337
acgcgtcggctatgaaggcgtcggccaggccaaggccgtcgtgttcttcctgatcgtcgccgcagtggctctcattcagaacagactcaccacgagcaaggaggtgacggcatgaacggcgacaagatgaagcacggcgcactgtggaccatcatcttcaccatcgtctcgctggcgtggatcttcccgatcgcgctggtggtgctcaactccttcaagaacaaggcgtatatcagccgctataccttcgccctgccaaattccaagtccttcgccggacttgagaactacgcgcgcggcgtcgagcgcacggatctgatcgccagcttcggctggacgctgctggtcaccatcggcgccgtactgctgatcctggtgtgcaccgcaatgtgcgcatggtggatcgtccgcgtgaacaactgggtggcgaagttcatctacgtgctgttcctgttcaacatgatcgtgcccttccagatggtcatgttcccgctttccaagatcgcggacatgatgaaactcaacaccccttggggcctgtggatcatctatctgggcttcggcgcgggcttggcggtgttcatgttcaccggcgtggtgaagggcattccggccgagattgaggaagccgccatgatcgacggcgcctccgtgccgcgaaccttcttcaccatcgtggtacccatgatgaagccctcgatcgtctccgtggcgattctgcagaccatgtggatctggaacgacttcctcctgccctacctgactctcgacttgagaaagtacaagaccatgtccatcgcggtccagtacctcaagggaggctacggctctgtggacatgggcgccatgatgggctgcctggtgctgtccatcatcccgatcgtggtcttctacatgttctgccagaagcacatcatcgccggcgttaccgcaggcgcggtcaagggctgacctgccctagccgcccctcccccactacttcacccacataactgaatacgttccccaataacccataggaataatcactggaaagaaagaagatcaccatgatcaccaccaagaaggcattcgcgactgccgccgtgctggccatctgcgtttccggactgtccgcctgcggcggctcctccgcagaccccagcaagggccacgtgtactttatgaacagcaagtccgagatcgtggaccagttggatgagctcgccgccacctacaccaaggagaccggcgtgcaggtcgacgtgcagaccgccaccgccggcacctacgactccacgatgtcgtccgagctggccaagtccaacgcgcccaccatgttcaacatctccggctacgaccagttcgccaagtacacggactacctcgagccgctgcaggacaccgaggtgtacaaactgctcaacgacgagggcaaggcctactcctacaccgctgacggcaactcctacacactgccgtacgcggccgaatggtatggcatcatctataacaagaagatcctcaacgactacgcctccaaggattacgcggtcatcaagtcggccgacgacatcaaggactacgacaccctgaagaaggtggcggaaagcattcaggagcacaaggacgacctcggcctcgacggcgcgttcgccacgcccggcctcgacgcttctgacacctaccgcttcaccgcgcacatggcccgcctgccgctgtacttcgagtacaaggacaaggacaccaccttctccaagaccatcgatggcacctatcttgacaactacaaggatctgttcgacctcgagctgaagaacagcccgaccgagcctggcctaatcagctccaagacctacgacgactgcacctccgagttcgcgctcggcaccgtggcgttctacccgaacggagtgtgggcctactcgcagatcaaggacaacgaggttgccgacgaagacctcggcatgctgccgtacttcatgggcatcaatggcgaagaggactacggcccggccggcgtgtacgacgcctcctgggcagtgaacaagaacgccagcgatctcgacaagcaggccacgctcgacttcatcaagtggctggtcaccgatgatgaggccaagaaggtgctctctcaggacatgggcttctccgtgccgttcaccacgttcggcgacgacgaccagccgaacaacccgctgaccaccgccgccaaggcctacgccgccgaaggcaagaccgaagtccgcagcttcaccgtgcctgatcagaagtggcaggacgacatcgcttccgcgctgatcgaatacgcgcagggcaccggcaagtgggatgccgtgcagacggcattcgttgacggctggtccaccgagtgggacaacaacgagtcctccctcggcaccctgcccgaagcccagcccttcgagtcctgattttttccctcccctaatcccccgccatgatgacgggacccaagccacaagccgccgccggctcttcccctttttcttcccaagcggcgactcgtggctttttgcgtgtcaggcaacgccacgccccgccatgcaacggatatgagcgatgagaccgggacggcatatagtggcaaacatggttacgatcaatgatgtggcgcgcgaggcgggggtgtccaagaccaccgtttcgtatgtgatatcgcataatccgcgcattccacatgacacccaggaacgtgtgcggcgggccatgaagaagctcggctacagcgtgaaccacaccgcccgggcgctgtccacatcgaagaccatgacgctggggctattggtcagcggccagaatgatggcatgccgctctccctcacacgcggcgcatacctttgcgagctttcgaaattcgcacgccagcacggctacgatctgttgctcatcagcaatcccgatggcgtgcaggccatccgcgagcttgccggcacccgcaaggtggatggcttgattctcatggacctgcagcgcaacgatgtgcgcgttgcggccgcagttgaatccaaactgcctacggtgctgctcggcgtaccctacgatccgctgggactggacgtggtggataccgatttcgagagagccgcgcatgaactcatccggcgtttcgtcaaccagggacaccgcgatattgcgttggtgcacacatcagaatcgccaaaagacgacggcgcgaactacgcggtgcgattccggcaggccgccctcaccgaggcacgaacggccggtatcacgctgcgtgtgccgccgatggatgtctgggacctcaatccggccgagcatatacgcacggtattgaaccgtttcccaacggcctccgggctgcttattgacgatgacaatgcggtgatcgcggcacctcaggccctgttagaactcggcattcacgtgccggaagacctctcggtggccgtggtggttcctgacgtaatccatcaacgcatgagcattccctacaccgcggtcaatatcaatttgtccgccgtggccgaggagactatagacacgcttattcggcggatttccaagcctgatagcccatcagtgacacgtctggttagccagcctctcaacgactgcgggtccatcatccggtgcgacgcgccatgagaacgctcacataatttattgatttgacgaatctgagtcatgtgcggtattctcattttagtgaatcggttcaccaaagtatcgaagatactgccggcatgaacccacacactacacgttctcaacccagccaatgaaggcaagagaggaggcatacatggccttccattccgacggccgatccatccgatggcgcggcgaaggcgagaccctgcttattgagccgtggggcgccaatagcgtacgcgtacgggcatcgaaaaagatgcccatagaccccggcctgaactggggcctgcttgatgagcaccacgagccggagggctcgatcagcatcagcatcgacgaagccgcaggcatcgccacgctcaccaacggcgagctggtcgtcaccgcccacgcttggaaggagcccaatcccggcgctggccacaccgaaggcctgtgcgagctgagcttcgccaaggctgacggcactgcactgttcaaggagatgccacaaagcggcgcgctcaaactgcacgcccgccactactgcccggcggacggcggcagccagatgatcgaagccacgttcgtggccccggagcacgagcgactgtacggcatgggcgaataccagcagcagtacatggatctcaaaggatgttcctttgaactggctcatcgcaattcgcaagcgtcaatcccgttcgttgtgtcctccgccggctatgggttcctgtggaacaacccggcaatcggctccgcggaattcgccaagaaccgcacccgttgggtggcccagtccacccgtcagctcgattattgggtcactgtcggcgacgagccaaaggacatcgagcggcaatatgccgacgccaccggtcatgcaccggcgatgcccgaatggggtctcggtttctggcagtgcaagctgcgctactggaatcaggagcaggtgctgaacgtggcacgcgagttcaagcgccgcggcattcccatcgatgtcatcgtcattgatttcttccactggccgcgcatgggtgacttccgcttcgaggaagagttttggccggacccgagcgccatgtgccgcgaactgcacgatatgggcattcgcgtgatggtatccgtatggccgcaaatcgccatcacctccgaaaactacgagcacatgctcgacgaaggcctactggtgaacgccgagcgcggtatcgatgtggcgaacatgtaccaagaacccaatcagttctatgacgccaccaaccccgaggcccgcgcctttgtgtgggagcaatgccgcgagcactacgtctctcatggcgtcgacgccttctggctggacgaggccgaacccgaatacggcacctacgatttcggcaactaccgttactggtccggcccgaacatcgccaccggcaacatctacccgcgcgaatacaaccgcggcttctacgaaggccagctggccgagggacgcgagggagacatcgtgaacctcacccgctgcgcgtgggtgggctcccagcgttacggctccttggtctggagcggcgacgtgagctccacgttcgacgacctcaaggcgcagatcacctgcggcatccatatgggcatgaccggcatcccctggttcaccaccgacatgggcggcttccagaagggagacgtcaatgacccgatcttcaaggaactgctcgtacgttggtgccagttctcctgcttctcgccggtgatgcgcaaccacgggtaccgcctaggactccagcctgacggcagcatggatgagaccatcaccacctcggccggcgactggcgcgacccctccggcgtggacaacgaaccgtggagcttcggcgaggatgtggagcgcatgctcgtcaagtacatcaatctgcgcgagaccctgcgtccgtatgtgcgcgagctgttcgacgaggcccaccgcgacggacagccgctcatccgcggcctgttctatgaattcccgcaagatccggccgccgcggacatcgccgacgagtatatgttcggcccggacctgctggtggctccggtcaccgacgccggcgcgacgagccgttcggtctatctgcccggcgatgcgggcacgacatggaccgaaatcggcagtggacgccaatacaccggcggcagcaccgtgcaggccgattgcccgctggacgtcatccccgtgtttgcgcgggatggcaggacccacggtcttgaatctctgatgtgaggcaaggtgcccgtctgcggcccgtaccataacatgcacagccgcagacggcctctcctcgcttataggtgaactgtttcctttttacagcccctgcatggttgcattcggttggcgaatcggttcacctctcagtagtatcccatgttctcactgatcgctccaaggaaggagattcacatgatcagtatggctggcaaggcgattcgtcgctggtggtggctgttcgcgctaccgacattcgcggcgttcgtaataggctttctagcgccgttcgtaatcggcatattcctgagtttctgcgagttcaccacggtgaccgatgcctcattcgtcggactcaagaactacgcgggcgtgttctcggacggtacgttcctgcattccctgtggttcacggtcgcgtttacggtggtcaccaccgtggtgatcaatgtggccgcgttcttcgtggcatacatgttcaccaaaaagatgaagggcgcgaacctgttccgctcggtattcttcatgccgaacctcatcggcggcatcatcctgggctacatctggcagctactcctcaacggtgtgctgggtcatttcaagcgttcgatcacatattcgggcgtatacggcttctggggcctggtgattctgctgtgctggcagcagatcggctacatgatgatcatctacatcgccggcctgcaggccctacccaccgacgtgatggaggccgcagccgtggacggcgccaatccgcgccagaccctgttccaagtcacaatcccgctgatgatgccctcgatcact

SEQ ID NO: 3129 - DNA, 7042 bp, Unknown
  R215_18m  MAG No. k141_34731
gggcgagtgcgggcaggacgatgaggccgagccatttgaggatgtcgtagacgcggctggggatgagccagtcgggcacgtcatgggtgacgtcggctgactcgagccagtcgctcacatcggcgccgggaagcgtttcgccggtgtcggtcgtgtttttgctgtcggtcatgtttgctccgatcaataagtgatgatgatggggtgatgccgtcacccggtcaagcgggtggcggcatctgttgagtctcagcggcaggtcaccacgtcgcccacatagtagacgttgatgttgccggatggtacggtgcagcggctgacgctgtagccgtgggacgtggcgaactcccacacggtgtcgccccactggaggaccttggagaccccggtggacgatgcgggggcggtgccgccgccgtaggtgacgacatcgcccacgtagtagcggttgatatcaccgcttggcgtgtgccatgcggacaggggccaagcatcataggcgacggcgagtccccagatggtctcgccccactgcatggtatgggtgatgccgcccgtgctggtctgggggttgcccggctgcacgggcgcggccggtgtggccggtggcgtggagccgccggtcgggttggcgtacagatcccactgccatgcctcgccgcggaacaggttgaggtcgatgggactccacgtgttgacgacaccggtgccgctgtactggcgcatggcctcgccgtacgcgccgatcatccacggattggcctgatagccggtcgggctcatgttcgcgtactgggcgatccacaggccgtaccggttgcggatgtcctgcgggatggtgccggcgaccgggccggtgtacagcaatgggcgcacaccgccgctcaaccgttcgcactccgccatgaatcggcgtacccaatcccaatcgccccatgcggggttgtcgtccatctcccagtcgagcgccacgatgccgtgacgccaatagttcgacgtattcgtgtagaagaaccgggcctcggcctccgggttgcctcccatggcgtaatggtacaggccgaatttcttgccggattcctgcgcttgggcgatcatgcggttggcgtccgtgttgacgccggacaccaagcagttgttgttgacttgcccggtgccccatgtggtgccgacgatcacgaagtctgcctgcgtgttggcgatgtcgatgccgcactgccagttggacacgtcgatgccctgcatgtcggccatcgccgccggggcgaacgccatggagaccgcggcggcgagcgcggtcagcgtcatgcccacgcgccggtgcaggcgtccgtgtttatgcttgcttttgtcgaggatcttcacatcctctccttcccgccccgagtcaagggggcaataaaaaagccatcccggaatgggatggctttgaaaaccagtgtgaaaatcaatgcctgcgcgcaccatgattgaatatgatgatgagcgcgagcagtagcaggcatatgcagcctgcgatcatgggtcgcgtcattgcctgtcctcctgtatgtgcgcgtcgatgatgtcgttgcgcatttccgtgccgacgccattacctcccagaccgctgtaggcgcggtatatgcgttcagcggtccgtttcgtctcgacggtgcatatgccgccgttgtccaccatctgccgatgcaacagttcaagcttgcagaacagcagttccttcacgccctcgtgcagcgggtcgcgcctgttgtcgatcctgttgagcacccacggtacgagcgctccgaaaccaccggaaccgatgatggcgacgatgatggtgattgcttcctgattcacctatgccttcttacgtcagaaccacgggtcgagaaggttctgctgcacctccgtgcggtattcctccggaacttcgtccagcgtcttgcgtccggccttgaccagacgggtgtacatgcggaccgctgcggcatgattgaacttagccattgtcttcactccttgttcttgctgtcggcggaatcgtcggcagcgttcttgccggtgtcggaatcggtggaatccgtcgcatccccgttctcgcccgccatcaggtcggccagaagttgcgcgttgtccaggcttgcctgttccaatgcgctcacacggtcgagcaccggcctggaactggtggcgtcaccctcgaacaggacatccgcccgttcgacggcctcctgttccatgagcggcagaatctgataggattcgaccgccgtgtactccacgtattccggctgattgtcggtcgcttcatgggtgacggtcctgatgttgcggcggatgcggatgtcggccagtccgtcatcgcggagatggtagtccaccttttccaacggggttgcggaagagacgttctgaatcatctgttatcctttctttcggcttgccgcgacggtgtttctggcgcggcggacgatttgatcgacgttgtttcgacgccggtattggatggaatcgctgtttttgagccagccgtagtagctggcgcaacggtatgcgagccgaagactcgtagggttccgcgcgtatcggcggaatgagcggcgtgcgcgcaggaagatgcccgccctgacgccggtatggtccgggtagaaggtgaagcccaccatgtcgattggctccacgccgacatgcttgatgttccatgtcggatgaatctcaagacggagcgtgtcatgcaggtaggcgcgtatgcgtttgacggcgatggtcagatcacgcttcgatctgccgaccaggagaatgtcgtccatgtagaacagcacgtgcgtcacgagccgtctggtggcggtttcgcctgtcctgcggttcacgcgctccttggaaagatgccgttcgcaatagtggtaggcgtatgagaggtaatagttggcgagccactggcttagataggagccgatgttcaatccgtcatcgcccgcgtaccggtcgatgagatggaacgtcaaatccagtagccgcctgtcccccacgtcacgtgagagcaggcgtttcagcacttcacggctgatgcttggatagcatttgcgcacgtccagtttcacgaagaccctgctggatggttcgcgcgcccatcgtttgatcgcgcgtcgcgcgtcggctatgcccctgccggggatgctcgccgtctgccatctgccgaccttcgcgcggaacaatggcatcaacgccgtgccgcagacgtaatcgtagatctgatggcggatgctttcgcgtccgatgatgcgtatcttgcctgaaatcggttccacacggcggaagtagcggatgggcgcgaatctgtattcgccgcgccctatctcgtcggctatctgccgtgaaagcgaatccaagtctggatggcggctgaggaattcgttcacgtccctgcgggagcgtttgcctttgaggaaccgttcgatgctttcgcgcacgaacgcgggttcggtgatgcgactgtgtttgcaatatgttttcataaaagctataaggggaatgttggcggcgttcggccatgtggcctaccggtcgcgtgcttgattcgattttcggcgtggccgaggcttgccctctcgcatatccccgaaagtggagggtagtcgtgacggaaagtggttaacccttatgtgcgaccgccgtagttccaccaagcgttcgagaggtcgttcctgccgttcgcgctgaacaacccgcagtgggagccgtcccagagattgccgccgcgcagcaagagacgggaggaacccggcgaagccgtcacgaatccctgaaatattatcaagagtcatacgagggtgattagggggctttcgccccctcgctggcgctcacccccaaccgcccgcactaggcgtgcgtgcggccaagaatggataggcgaccgccgaagatccaccaagcggccgagaggtcgaccctgccggtcgcgcagaacaacccgcagcgggagccgtcccagagatcgccgccgcgcagcaactcatgcagtcccggagaggtgatcgggttgatgagaagcgcgtcggtcaggccgctggtgcttgtcgcgccgacaccggtgggcagcaggaatccgtgcttttcggtgaagtcggtctgccattgccactggttgttggtcttgtcgttgacggctggatagtcgcccacatgcgtgtagtcggcggtgatggcggtgccgctcgccttggtggtgtcgaacaccttccacacttcggtatggccggaagtgtccgagtccttcacgttcttcaggatgatgtcgccttcggtctcgtagactccggcgaacagttcgatgccctggagcttgatcggctgatgggttttggacacatcctcgcgggggatgccgtcgttgccgagcacgccgtccgtcgccccggtcatgtacggcatttgggtgacatgcatggccgtcgtggtcgtgaaggccgcgccggacacgttgatcgcggtggtggccgcgtccacgacggtcttggaaatgaccttgcggtatgccgccgcctcgccggtcttattgtccccacggtcggtgccggtgccaatggaaacgtaggagccgaggtcgatgcttgccgcgtcagtggtcttgaccagcgcgcgcgtgacgttggtttcggccttgctgacgccgatctgaccggcaccgttgaagtcgccacccaggtggcgttcgatgtccttggccgcgtatttgagcatgtgcatcaactgggtgtagaacgtgtcggcggaagtctttccactgtagcccttgcctttgctggtgggtacggccacggagccttgttcgctcatggaggccggaatctgacccgagacggacgcggccttgccgccgtaattggacagtggatatttcgcgtacgccatgcacggtcggagagacccgtccggcagcagcgcgcccggcatcggcgaatagccgtcgtactgggtgtccgaataccagatggtgcagtggttcgtgtcgaactcgaaccggtagaagccgggagtggtgatgacgaacacgtcgccattcgacccgtccttcgcgtaattgccagccaagcccttgatggccttcaccaccggagtgccatcgtcggccacagtaacgttagcgtcgaacacacggaacgcgctcagacccgcgtagtcgtcacggcccgcacgataattcgtggacggcacgacggtcagacccgcattatccccgaccttcacgccatccggcgagttggaaaacgagtagagcgggaaacgcacgccatacgtgcgtccgtcacggtgcgcgtcgaaatactcgcgcacattcgacacgacgtgtttcgcaccgtcgtagttgaacttggtgccatccacgacaccattcttctgcgcacgctccaaacgagcgtaatcgcgcagacgcaaaaacttgtcaggattagccaaaacaaacctccttgaaatcaggcgttaatcgtggacacggcccaatccacatcggactggtcaatgtcggccaacggattaccggtagtggttggcgtgagcgtggtagaatcgacctcgaccaaatcggagaaattcaaaaccgaagtcgaatccggcacctggacgcaacggacgaaacgccatgtatcctcactctcgccgacggtcacctcataggcgaacgtgctgtcggtcggcggaacggtgacggtcgcggtgccatgctcgtccaaacgcacctcgaacgaatcgcgcacgacgatacgcttgccgttcctgaaccgttcggtcggaaccacatgaatcttctcgccaaccaagtcagctatgccatcggcgcttggatggccgaaatcgaatttgatctgagtcaaaacatcctccttaaaagaagcgttaaaaacaaaacccgtcgaaatcgacgggtttaaaaacatgaacggagaatcatggatgtggaacaataagaaacccacacgcatgtcaggccaacggcaacacgacaatgtgtgggattattcaacaagaatcgggaaggaaccaatgcttttcgacacattcgcaaccaccgtttggaaaccctcatgcgcgaaactccgcgaatgcactctagtgggatatgaaagcgccctgaactgccatatcctcccgcaatggagcggaagggacatggactcgatcagcatggcggacatcgaatcatggttggactccttcgataagccgggagcggcacgcaaagcctacgcggtgttccgctcgatactgcgactcgcgttcaaacgcggtttgaccgacaacgacgtgaccagaagggagatacgcctgccgcacctacggcactacgagccgcaagtactgtcagcgccggaagtccgacgcctgttgaaaggcttctacgggcatccgctcgaagcatggctattggtgtccgtgtgcgccggattgcgccggtgcgaaagcgtgggcgtcgaatgggccgacttggacttgcgacgcggcaccgtcacggtgaaaaggtcggtgcaatgggtggcaggccatgagaccgtcaccgaaccgaagaccgatctgagccgacgaaccgtcgcattgccgcgtttcgcggtcaaacgattggcggaactacgccacggcacgaagaccggacgactggtcggcagcctgaacgcgaaccaagtcgcaaaccactaccgcagttggtgcaggcgcatgaacctgccctgcgtgccgccacgcaacctacgccacacgttcggcacgttggcgatcaaggccggaaccgacatcagcgtggtcgcacgacaactcggacactccgacatccaaaccaccgcacggtattacctcaagcccgatctgagcgtcctcaaggacatgcagaaagcatggcagaaactcatacttacctgctgaatagctttccgtaacccagacgcttatcaccagccagtatggcacggtgactggcgttaagaccggcaatgtcgctcaaatcaacgtggcttggaagagcgcgaacactgcatcatgggatagcggtaattttggcata

SEQ ID NO: 3130 - DNA, 38161 bp, Unknown
  R215_18m  MAG No. k141_35938
tcgacgatctcggggatgcggctgtgggacgcccggaacacccggcggtccagttcggtcccggcctggtcggccggtcgtttgggcatcgtccggaggggttccctgagccgtcatgaacggtagggccggcccttggggtccgtgtcccgcaggttcccggacgcctcggaccgtctgtcggtcagcttgccggggttcttcaggacggtgtatctgacgccgcgcatgcgcttgacggatttctcgtccccgtcgcggcgcgcctggttccacgggtgtctcctgactttgtcgggcgcgtcgctcgtccaactgacgatgtggaacccgtcgggcgcgcgttcggcgttcgggcaccactcatgcacgcatgagtcgatccaccgggccccgtccccggcgacgaccctgatggaggcgcgctgttcgggcgtcaacgtttggaagaacaggccgaacacgtccctgccgtacccgtcgtgcgcccatatcgcccgatgccgttcgtggtcgacgaccacggtgatgcacgtgtggcctttgcggtagccggtctcgtccacgccgatcgacgtgaggccgccgaacggagacggcatcgacgctttcaaccgttcggcgaccctatggacggcgtcttccggcggcgcgccacgcgacgtgcggaaaaccgcttacggtcttctggttcgcgacgctcatcggccacgcgcgttccgattcgaaatcgcgtgtggaccggctgcccggctcggcccacggcacggaagcgaccactacgccgcacgccgccgccctggtcatgcccgcggcgcctccttccgcatcgggagcatcggagcatacccgcacgtggacgcacccggatctcgagcacgggttcggaacgcggcggcgaatccgtgatccgcgcatcctctgcaaccgtgcctttgacgttcggcaatccggtgaatgggcttttgcccaggcgttcttcgtgattcatttctttggtcggaaaacagaatacgcgggaacgcccctcacgcttacgaaaccaacggctcgacgacgaaccgacatccacgaaaacagcaatagcgccatattttgcaatatggaagattcagggccttgaaatgacgaaccattacaatgagcggcgaacatacatcacacggcgtaggaaacgccaaggagggcatcatggccgagatcacatggaagtcgattctcaccaagctggtcgggggagaccaccttactgctgaggaatcggagtggttcgtggacgacctgatgcaaggtaacgccaatccggccgccgtgggtgccgcgctcgctatgcagcagcagctgggactgaccgccgacgaggtgcgtggtgccgccaaggccatggtctcccacgccgtgccgctgaacgtttccggtgggaccaccgacatcgtgggcaccggtggtgacggcttcgccaccgtgaacctgtccaccatgggctccgtggccgccgctgcagccggcgtgaagatcgtcaagcacggcaaccgcgctgcatcctcgaagtgcggtgccgccgatgtgctcgaagacctcggcctgccgctggatttgaagccggaggccgtcggcgaagtgggcgacgaggtgggcatcaccttcgcgttcgcccgcaccttccacccggccatgcgcttcgtgggcccgattcgtgccgcgctcggcattccgtgcgtcttcaacatcctgggaccgttgaccaaccccgccaacccggcacacgtggccatcggctgcgccaaccgcaaggtgagcccgatcatggctgccgtctacgccagccgtggtcagtccggcttggtctacacttcgcatgagggcatggatgagctcgcccccaccggcccggtttccgtctgggagattcgcgacggcaaggtcaccgaaaccgagttcgacccgaccgtggatctgggtctcgccaagattaccgtcgaccagctcaagggcggcgtgccggacgtcaacgccaacgcatttaaggacttcctggccggcaaggacattacgtcccgcaccaccgcgctgctcaacgctgcctccgccatcgtggctgacggcaatctggtcggcaacggcacactggccgagcgcttcgccgaggcctacaagctggccgaggatgctgtcgactccggcaaggctgaagccctgttcaacaagtggatcgagaccgccaagtccaaggcgtgatatggaatgggtttgctcgaatatgtttacctttccttcattatcaactatttcgagttgcaggagtccatcgacttcaattcgtgacctatcttggctcggccgcaattacggacgagctacgcctgtgatacattggttcgctatcgctcacacctcgcctacaaacagcccactgggctgtttgcttaacggctcggcctcagagaggggagccaaggactacacaacctacgcgaactacaccctcgcgccgtcgtcgtaatagccaccctgatcaccggggcggtctttgcggttgaggattttggccaccaatccgcccagacccaaaatgacgcccagcccgaagagaatattgagcagcgcgcctaagagaggaatcgcgttcaagccgggaacgaatatcatcaccgtttcgcctgcgagaccgatgatgagcaacgccgtcagcagtaccgtagatgctttgaccggaccaagatcagggttcgggggagtgaagccgccatcatcataggcgtccatcacattatcggtatccagccagctggagccggtgaaatcacgggggcctgactgcttgccttttttgccgccacggctcgggcgagcatcatcggtgaacgagccgatatccaagtcatctacggaaagcagtgcttccttctcgcgtttcttggcctgcttctcgaactttttggcctgcctggaggaagccacgtcatgcaagtcggcctgatgctcggcttcgaacgcggcccacgccgcatccaaatcgttcatgtcatgcgattgcggtgtatcggcaccattcgtggccggtccggcggcaccgggagtcgacgacttggacgaagtatcggaatcctgtccgttgcccggcgtgggggttggccgctctccgtcggcattgctattctggttctcagtcataactgtcactctaatcaggcgaccggccaatggctagttcgtctgcgggaggaatgccaagtgctctactggttcttcgtcaaaggtctcggccctattgctcatcatcgtttgagccctgctgtcagcggactgaataacgtgcctcgagagggtggcgcgattatcgcagccaaccatctggcggtgattgacgatgctttgattccgattacctgcccgcgcatggtgcacttcatgggcaaagccgaatacttcgagggcaagggattgaagggcaagttcaagaagtggtggttcacgtccgtgggcgtgttcccggttgatcgttccggtggcagcaagtcgcttggcgcactcgagcatgcacgcgagattatcgaggatgggcacctgttcggtatccacattgaaggcacgcgcagcccggacggtcgactgtacaagggacacaccggtgccgcacgacttgcgctcgagaccggttgcccgattgttccgaccgccatcatcggctcggacaagctgcagccgattggcacgtcgattcccaagaagggcaagaccaaggtgttgtatggcaagccgattgaggttgcgaagaagccggctgatgaaattacacatgatgatttgcgttcgctgaccgatcgtgtttccaccgcaatccagaaaatgagcggtcaggaattcgtgaacgaatacgcccagaaggtcaaggccgagctcaaggcccagcaggccgctgaagaagccgaaaagtaattaacaaatgaggctccctcgtctgaagacagagggagcctcattcaaatctcacacgatggtgagggtgatgacggtggggttgccgttggcgtcgcgcaagcgaatcttgccgccgttggagaggtccgtatcgccacttttcacggtacgtaccgtgccgaacaggccaccgagcaccttgtcggttttcacctcgaacccgagaccttcaagtgtcttggttacggcgctttcctgtttgccgacaaggccggacggtatcgtcgccatctccggacccttggaaatcaccacgtccacgctatcgccccacttcagctgggctccggcttcctgagacgcggaaatgacttgaccggcctcgaccttgtcatcgtactgttcggtgacattggccgtgagcttcaactcgccgagcgcggcttgcatctcatcctgggtcttaccgacgatgtcaggcatggtcaccggcatcggtcccttgctcaaagtaaccgtcacctcatcgttgtgcttggccgtggtaccgggaccaggggagatcgtcaatgccacaccctgcggcgtgtccatcgaatactcatccttcgactcgtcgtgcttgacattatcgaagccggccttcttgagcgcgttcaacgggtccttgccattggccgaattcgcgtcgagaatatccttcgggatggtggtcatccgcacgcccttggacaccaccaccgtaagctcctgattggctcgcttgcttatgcggctgttcacaacggccttggtcttgttcacggaagaagagatgatcttgccttccgccacgtcgtcgctgtattccttgtgcgtcttgtaggggatgccgagagccttcaacgtgctctcatacgtggcccaatccgcgccggccaacgagcattcggtgcttgcattcgcatcgcaggtcacgtcatccggcttgggcacactccaatagctgcccggtccggcaaaccaccaccagccggcggttccgccgattgcagccagtaccagcacgatcaccagtacgatgatgagcggttttttgctgcgctgcttctttggcccggtgccgttggaagcgacgtccggctcatcggaaagggcaagcgctcgggtgaaggcatcgccggcctgaggcagcacttgtgtctcgctgccggactgtgccatgatttgcgtcttatggggagccgaagcatcggctggcgtcgacgaatcaagtgccgtggtgggggcgaccggaggagccggaggattgacgtctgcggcgccaccggtatcggcggtattgcttgcgacatcatcggccaaaaacgctggtacggacggctcgaacgttgctgcaccggcaggtacgccggtcagcggggcctgctcggcgatattgcctaccagcgctgcagcggtggcatcggtatgatcacctccgatgggttcggcatgcaaacggtattgccacgcctccagcggcaatttggcggccaactggctcaattcctcagctgctgccgcgccatcggcggggcgagcatccacctgacgcgcggtcagatgggcgatgaacgccgccacggacggatcaatgccctgacagaccgtggccacggacggcacgtcctcatgaacatgcttgaaaacaagcgtcaccggattatccgaatcgaacggcaccttgccggtcagcatctcccatgccatgatgcccaccgaatacaggtcgccttgcgcggtggcctgattgttctcgatcatttcgggagccagataagcggcggtgcccaatagcatgccggtggagctcaatgtggcctggctggcggccttggccagaccgaaatcagtgatctgcacatggccgcgatcattgatcaaaatgttctcgggcttgatgtcacggtggaccacgccggcgcgatgtgcggaagccagaccatccagcgtctccgcgaccacgcgcagcgtctcacgtacggagaatgtgccttgggcgttcatctcatgccgcagattgacgccatgcacatattccatgaccagaaaatcaagtccattgaactcgccggtgtcatacacctgaacgatgtgcgggttggcgatggacgcggccgaattggcctcgcggcggaaccgttcgacgaactgctcccgatgcgggcctttggcgagttgtgtgtgcatgaccttaatcgccacggtgcgccccagacgctcatcgatggcctcatacacggtggccataccaccctcggcgatattgcgcacgatgcggtagcgtccctcaatcatctgcgcgggctcgttctcactcatgttgtatcgtacggttcctttaatcacgactaaacatgttcagtgtacatggccccggttacgcggccggagcatcggcgcatagttttcacgggttttcaccggtgttcatggtctcatgacccggcggctcgcattgtggactatcgcaaggattcggggacgaatcgcgcacaagcctcggtcagacggcgctgcgcttcggaattcagctcaagaccggcaatcgccttacgggactcaccccatagggcagcgatgcgctcgcgggatcgatcaagagcaccggtcgacgtgaacagttcaatggtgcgggctacctggtcgtcgttgcgacaatccgcttcgaagatggcaatcagatcggccttatcctccgtatctgccgcagacagagcatcagccaacagcactgtgcgtttgccttctcgaatgtctccgccaacgggtttcccggtattgcggcttgatccgacgacatccaacaggtcatcggccagttggaacgccagtccgagcggccggcctacggccaacgcgcaatgcctggcctgatccgggctctctcctgcggccagcagtgcaagcagcagtggggcgatggtggtgtaactggctgtcttccagcggaatacgttcaatgaggcgttcgccagagcttcgggatcagacaacggggtcatctcgacggccaagtccagtatctggccgatctccacctcgcgctgcatggtaagaaacgcctcgttcaaggcatcggtgttgggaagacggctggcggaccggcgtgtgatttcaatgcaggcggtggccagaatatcgccaagcatcaggcccaagccacggcctatggcaccgctgtgtacggcctgttccaaggcacggtgtgcggaaggcttgccccggcgcagatcggattcgtcgatgatgtcgtcatgcaccagtgcggccgtctgaaacacttcaatggcacaggctaggtcgatcatggcgtcacgccgatcaggagtcacgtcgccggcaagaatatcgaaggcgtccaatgcgagcaacgcacgcagtcgtttgcctccttggctggaggaggaggcttggtccacaacctgttccatcaccggtttcagggcgtcggcaacctcatcggtggcgggggcggcagtcagttcccgcaccaactgaatgatgcgtggctcgatgatttcgcggttgttagcagttgtacacatgcctaataacttatccacagggtttgaagaacacaagaacgttgggaatcaagggttttgaagctagaaccacaatggtcgttttttcctgcgtcatacggcgttttcagccatagtgggcacacaccccctcggcgcatgagctatccggctcggcgcgcaccacaacaccaatagattgcacaccattagtcaaggaggacatgatgaacaacaacacgccgcacaagccgcgtaagagccgacacgccaaacggcacgccgccgagcagacggagccctttggctttgatgagttggagacgagatcacaggaatttcgcaatgatcgccgacttcgaggcgcgcaacaggctaatgccgactgggtggccgaaccattggacgaatggctgtcttgtctcgatgccgggaacaccgacctaggccgagagacgatggccgcgtttgcggtgggcatgcgcgagaccttatcgattcgtgatgcgctgattctctcgttggttattgatgaaagccgttgccccaagtcatggctcatggaattcgcggcgcgaccgcatctggcacgtacgagaacacgaatgggcgagctgctgacctgcgcattcgaggatgaaggcatgatgccggataaggagcgttgccatgccggcatcggtatgttgctcgatatcgcggaagcctcaccggtgccgtactgcatacaaccattggccgtaatcgcctacaccttatggtggctgggcgatccgcgagcaatggtgttcgccttgcgatgcctgctgctcgatgaggattgttcgctggcggcgatgatattctcagccgccgatcgaggcgtggcaccggcatggtgctcgggctgaatgaacagaaacggcggatttccgaggttttatgcgcgatgcgcggaaggaaagcgtgtggtgatcggcaacacgtcgggcaacgatgtgggaataatcgtccgtggagggtggtttactcacatagttgacgatttgcccttgccagaagtgggcccgtgtggtatatgcacttcacggcgagagatcagaaggagcagttttggccacgaaggaaacgacggcaaccaagcagacagccgagtccagcgaggagaccgagaccaagaagaaggccagctctacgaccaccgcgcgcaagacttctgccaagaagtccaagtccgcagagccctcgaaaaagaccacgcgcaagtccgccgcgaagaaaaccgcgaagaaggccaaggacgatgagctcgtcaaagacgaggacactcaggtcgatgacgagcttgatgacgatgccgaggtcaacgatgacgatttggatgttgacctcggcgaggatcttgacgacgttgacgaaggcgatgccgacgacgaagacctcgatgaggacgatgccgacgacgacgatgtggaagacgacgaggacgaggaagaagccaagtccaaggcacccgagcagcccaaggaaaagggtgcctacgtggtctccgacacggatgatgaggaagagaacatcatcccttcgggcaatccgaagcgtcgtgtgatcgcggccggcgcaaccgccgacccggtcaaggactacctgaagcagatcggccgtgtgagcctgctgaacgccgaacaggaagttgacctgtccgagcgcatcgaggccggcctgtacgcccagcacctgctcgacaccgaaagtgaaggcatggagttcaagcgcaagcgtgaactcaagtgggccgccgccgacggcaagaaggctaaggaccatctgctggaagccaacctgcgacttgtggtctcgctcgccaagcgttacacgggtcgtggcatgctcttccttgatttgatccaggaaggcaaccttggtctgattcgtgccgtcgagaagttcgattggaagaagggcttcaagttctccacctacgccacgtggtggattcgtcaggccatcacccgtgccatggctgatcaggcccgcaccattcgcgtgcctgtgcacatggttgaagtgattaacaagctgtcccgtgtacagcgccagatgctgcaggatctggggcgtgaacctacgccggacgagctggcccgcgagctggacatgccggttgagaaggtgcaggaagtgcagaagtacggccgcgaaccgatttccctgcacaccccgcttggcgaggatggcgattccgagttcggcgacctcattgaggataccgacgccatcgctccgtccgacgccgtggccttctccctgctgcaggaacagttcaagcaggtgctggaaaccctgtctccgcgtgaggccggcgtcatcaagatgcgctatggccttgaagacggccagccgaagacgctggacgacatcggccgtgtgtatggcgtgacccgtgaacgcatccgtcagatcgagtccaagaccatgtccaagctgcgccacccgtcccgttcacagaccctgcgcgacttcctggatcaatgatcatctggctcccctctgtgaggggagccaagcatttgaagagaaaaataggactgtatgcccaaagaagaatacggcgccaaggacctagctgttcttgagggcttggatgcggtgcgcaagcgtccgggcatgtacatcggcaccaccgactcgcagggtcttatgcactgcctgtgggagatcatcgataactccgtggatgaggccttggccggcttctgcaacgatatcgtggtcaccctgcacaccgacggttccgtggaagtcgcggacaatggccgaggcattccggtggataaggaaccgaaaaccggcctgtccggcgtggaggtcgtactgaccaaactgcatgccggtgccaagttcggcaactcgtcttataacgccgtcggtggcctgcacggcgtgggctcctccgtggtcaatgccctgagctcccgactggacgtcgaagtggatcgtgacggcaagacgcaccacatgaccttccaccaaggtcaccctggcgtatacacggatgccgacccggccaatccgtctcccgattccccgttcaagcgcactcgcaagaaccgacccaccgagctggaaatcatcggcaaggtatctcccaaaaccactggtacccgtattcgctactggtatgatccggagattttcaacaaaaccgccgaattctcatacgaacagctcatcgaccgcgtgcgccagaccagcttcctggtgcccggcctcaaaatcaccattgttgacgaaaacgtaccggaaacggcgactgacaccgccgaagccattgatgccgacgcagtcgaacctgcgcaagaccaggccccggctttggatgtctcgtccaacgatgccgaactcttcgacgactccaccgaggctcaagccgacagtaccgagagcctgtccgaggaggacttctcgctgacggccggcgaccaggtcgtcgatggcgctttcggcgagcagcccgcgcacccgcgcgtcgtggaattcctgcacactggcggcgtcaaggacttcgtcgacttcctatccaaaggcgagccgatctccgacatctggcgcatccaaggcgagggcacctataaggaggagacccagaccgtgggcgaaggcggtgaactgcacgcccaggaaatcgaacgcacctgcggcgtggacatcgccctgcgatgggtcaacggctacgacaccacaatcatgagcttcgtgaacatcgtggagacgcccggcggcggtactcacgtggacggtttcatgaacgccatcaccaagcagattcgcaaggcggtggaagacaacgcccgcaagctcaaggtgaacatgaaggactccgccatgaaggtggagcgcgacgacatccaagccggactcgtggccgtggtcaccgcacgcgtggccgaacctcagttccaaggccagaccaaggacgtgcttggcaccgcgcaggtcaagccgatcgtcacccggctcaccgacaagcaattcggcgagatgatcaccggctccaaacgcggatacaaggaacaatccggccgcgtgctggagaagatcgtcggcgaaatgcacgcacgcatccagtcgcgcaaggccaaggaggtcacgcgccgcaagaacgcgctcgaatccgcctcgatgccggccaaactctccgactgccagccgggcaatgacgacgtggccgaactgttcatcgtcgagggtgattccgcactcggtaccgccaaggccgcccgcaacgccggtttccaagcgctgctgccgattcgaggcaagatcctgaacgtgcagaaggcgtcgattacgcagatgctctccaacaaggaatgcgcggccatcatccaggtggtgggcgccggctccggccagagctttgacatcgaacagtcgcgctaccacaagatcatcatgatgaccgatgccgatgtggacggcgcgcacatccgtatcctgttgctgacgctgttctaccggtacatgcggccgcttatcgaacacggctacgtgtatgccgcagtaccgccgctgcaccgcatcgcgttgaccggctcgcacaagggcgaatacatctacacgtattccgatgacgagctggccggcaaactggccgacctcgacaagaagcacatcggttacaacgacgacatccagcgatacaagggtctgggcgagatggatgccgaccagctggcggacaccaccatggacccgcgcacgcgtatgctgcgccgcatccgcatggaggacgccgcccaggcatccgagatcttcagcctgctgatgggcgacgacgtgccgccgcgcaagcagttcatcgtcgacaacgccgacgatttcgaccgctccaagatcgatacctgatcgaagacgtcgctgataatgacatcgtgcttaccgagaatttccgtaattggcgtttgaggtgagcacgttgtcatatgttttatgcgtgttgcccatgagtcattcgatagactgatgacatcgttatcacaaccggtgccgtactgtgaatgggagatggaacatggccagtctgttgcttgccgtcatctatgtggcgtttatcagtctggggttgccggattcgctactcgggtccgcatggcccaccatgagccaggatctgaacgtgccggtggcgtgggctggcggcatctccgcggtgatttccatgttcacgattgtctcggcgctgctttcggaccgaatgacattgaaattcggggcaggcaaggtcaccgccgtttcggtggcgttgactgcggcggccttggcaggtttctccgttgccccgaattactgggtgctgttggccatcgccataccgtacggccttggcgcgggtggcgtggatgcggcgctcaataactacgtagccattcactacgaaagccggcatatgagctggctgcactgcatgtggggcgtcggcgcatcggtcggcccctacatcatgggctatgcgctgtctcaaggccaaggctggccgtggggctatcggtacatcgcgatcctgcaggtgatgctgaccgtcatcctggtgctgagcctgccgctgtggaagaaacgtggcacgactgggggcggcgaatcgaccgatggtgccgcatcatctgacggcaatgccgagggatgtggtaatgctgaaggggcgtctgttgctgaacgcaaaccgctcggcgtggccggcgtgctcgccattcgcggtgccaaggaaatcctcgtgatgttcttctgctactgcgccatcgaatccacggcgggtctgtgggcctccagctacatggtgatgcacagcggcatcgacaagatcaccgccgccagctgggccagcctattctatgtaggcatcaccgtggggcgtgcgctttccggctttctgaccatgcgattcaaggacccggtcatgattcgcctcggccaagtgctggtgctcgccggtatcctcaccatgttcgtgccattgcctcaccaccttggcgtggtcgttgggctggtggtcatcggcttcgggtgcgcgccgatttatccatgcgtcatccactcgacgccggcctacttcggcgaagacaaatcgcaggccgtcgtcggcgtgcagatggcctgtgcctatgtgggctcactgctcatgccgccactgttcggcatcatcgcgcaatatgtgacaatcagtctctacccgtggtatttgctggtgctcttggtgctgatggtggccatgcacgagcgtcttcgtaagttgcgcggctgatcatgcgcgcatttgggcccgccgcctactatgcttggagcccatggtgataagtgaagaagaacataaacagatgcccgagcccgtacgggaacgattggaagcgctgaaggatgcgccgggctcggtaatcgtggtcggctcgatgaacgccgattacaccgtgaccaccaaacgactgcccaagccaggcgaaaccgtcaatggtggtgccatgaaagtgttgccgggcggcaaaggcgcgaatcaggcgtctgccgctgctcgcctcggtgtcaatgtccagttgctgggcgcggtgggcgaggactccaacgcggacttcctattaggcaagctggatgaggccggcgtcgacaccgccgatatcctgcacgttgaaggccccagcggcaccacggtaatcaccgtgagcgctgagggcgagaataccatcgtctattcgccgggttccaatgccaaggcaagtgccggctatgtgcaatcacatcgcacgaccatcgccgaatgcgcggtattgggactgtgtttggagagcccgatctccaccgttatcgccgccgcacagaccgcgcatgacgctggcgtgaccgtgctgctcaacgactcgccatttatggacgagctgcctcacgaactggtggaagccacggatattctgctggtcaaccagcatgaagtggctcagttactgggtctgccggacggcgatgtggaatcactcgactggtatgaggtcgccgaacgattcaccgattacggattcgaccgggcgatagtgacgcttggtgcgtcggggtcggtggtgatcgagaacggacgttggcatcgcgtatccgccgcgcaagtcaatgcggtggacaccaccggttgcggcgactcgttcatgggaactgtgctggctggcttggccgctggccatacgctgctgcaatccgcgcaaatcggctcctatgtctccgcctatgcggccaccaagcttggtgcccaaagcgcctacggcaccgccgaagaagtcatcgcctacttcagctgacctataatcgtacatatgtacgaaaccctgagcctgttttccgaacccaccaaggtgtggttcgagcatgccttcggtcagccgaccgaggcacaggctcaggcatggccggcaatccattccggtcgtaatgtcttggtcatcgcacctaccggctccggcaaaacattggctgcgtttctctcggccattgaccggctgatgaccatgccacgcacgcggcgtgccggtgtgcgtgtgctgtatatctcgccgttaaaggcgctcgcggccgatgtggccaagaacctagaacagcctttggagggcattgccgcacaatgcgaggcgcaagggctgcccgtgccgaagatcgcggtcgccactcgttcaggcgacaccaccgcacaggagcggcggcgcatagcctcccatccaccggatatcctcgttaccacgccagaatcgttgtatctgttgctcacttcgaaggcagggcggattctcggcactgtcgatacggtgatcgtcgatgagattcatgcagtggcgggcaccaagcgcggcgcacatctggcggtaagtctggaacggctggagaaccttgtcgcggaatcgcgcaagcgagatgcaatcgatgcggatgctgatgagggcagtgataccgccatcgatgctggcctcagtgaccttcatatgcagcgcattggtctatccgctacggtgaatccgcctgaagaggcggcgcgattcctgggcggcggacaaccggttaccatcgtgaatcccggtgggcggcctgcaatggatctgcgcatgattgagccgttggaaaacatgcgtgatttgcagtccgtgaatgccaagcagcgtgtcggtggcgtggaggctgaacggtccgctccgcatatcagcggtgtcacgccggccatgcagcgacttgccgaacgcaggggcattgtgccggtggatgatagagatgtttcttccacttctggggacgattctgatgcgagtgatgcgttcgattcctccgcgttggttggagcggcgggcgaccgtgcctccggctccatctggcccgtggtggaacgcggtattttggatgagattctcgcgcaccgcaccacattggtgttcgtcaattcgcgtggtgtggccgaaaagctcaccgcgcgcctcaatgatctctatgcgcagacccggcatggcaccaatcccgacactgtgcgggatccgggctctccggaaggccgcgaagggttctccacacattacgatgctgtggtcggttccaccactatgcttgtcggctcgcatgagggcgatgatgtcatcgccatggctcatcatgggtcggtctccaaagaccgtcgcaaaatgattgaggaacggctcaagcgtggtgaattgcgctgcgtggtggccacctccagtttggagctaggcattgatatgggctcggtcgacttgatgattcaagtcgatacaccgttgtcggtctcctccggattgcagcgtgtaggtcgtgccgatcatcaggtcggtggcgtctctcacgcattgttctacccgctcacccgtcagcaaatcgtcactggggccgcaagtctggaagccatgattgccggcgatatagaaccattggccgtgccgcgcaatccgctcgatattctcgcccagcagaccgtggccgctgcctcgatgcacgatttgaacgctgatgactggtatgccacggtgctccgtgctgcgccgtttgccgaactgccacgtgacatgttcgatgccgtaatcggcatgatgtccggcgaatacaacagcgaggaattctcggccttccggccgcgactggtatggaatcgggataatggcctgatttccgcccgtcccggttcgcagaaagtggccgttacctctggcggtacgattcccgatcgagggctgtacaccgtggtcctgcctgaggcggacgccggcaaaggccagcgtcgcgtcggcgagttggatgaggagatggtctacgaatcgcgcgtgggcgatgtcattacgctcggcacctccacatggcagattcaggaaatcacccgtgatcgtgtggtcgtgactccggctccgggccgcaccgcccgtctgccgttctggcacggtgaaggcgctggccgtgactacggtttcagccgtaccatagcccgcttcacccgagaaatcgccgccggattagacgtgaagcggactggggggagttctgccgcagaaggtccagctgtcccaaccttcatcccaacaatcctcacccgtctccaccgagacggcctagaccccaacgctatcaccaacctggcccgcctactctccgagcaacaagccatcaccggcacagttcccagcgaccaaaccctcatcgtggaacggacccgcgatgaagacggcggctggcgcatcgtactgttaagccccttcggccgccgcgttcacgaaccgtggtccatggccatcagccgcagactgcgccaacgctacggtttcgatgggcaggtatatgccgccgatgacggtatcgtcattcagctaccggacggtgacggacatattcctgctcaagacctgttccttttcgacccagaagacctcaaagcagatgtagaacgtcaagtgggcgagtccgtgctattcgccgcacgattccgcgaatgcgccgcccgatcactgttcatgccgcgatccgacccgggccgtcgcgtgcccctatggcagcagcgactgcgcgccgcacagctcctgcaagccgcacgtatggtcaagaacttcccgctgctgctggaaaccgcgcgcgaatgtttgcaagacgtatacgacatgcccgccctgaacgaggtgatgaccggattgcaagccggcaccattaccgtgaaggacgtggagaccgagccgccatcgccttttgccgagaacattctctttggcttcgtcggcgtggtgatgtaccagtatgaccaacctcaggccgagcgcagcgcgcaactgttgtctctcgatccgcacgtgctcgaacgcttgctcggcaccaccgacatggcacaagtgctcaacccggacgtgattcgcgaagtcgaacaggaactgggggagcgcactttctggaatgaacttgccgacgatgatgtgactggtcgcgtgacccgttacgccaaaacccatggtcctttcaccgccgatcagctcatggccgatctgcacctcgatgctacggatgccgtgcatactctggatgtgctggctgccaaaggcgagttgctgcaaggccactttgtagatgatgacaagcaaggccaacagtggctccataaggacgtattccgccgcattcggtctcgctcattggccaaggcgcgtaaagcagtcaagccagtagaaccagaggcgttccagatgtttcttatcgaccgacaaggtatcgggccggtcggcggcgaacgatatgaaggtgccgacgggctcatgcgcgttatcgagcagctggagggcatagcactgcccactgcactctgggagtcggcggtattccccgcacgagtacgagactaccaacctgcattgctggatgagttgctgaccagcggcgatgtggtctgggtcggctcaaaaaccgggggaaccagtgcgatggaccccggtgaggttgctttctatccggcggattcaatattgctcagcggtgtggaacatggtacgacatcgaacgcctcagacgccaccatgccggaagcgattctgaccgcactggactcagggggagcgttccatgcccgtcaactggtggatgccgccaaacgtgtgtggaatgaggccgcggagccggacatcaatccaaacaccggtgaaatcattccgcaagagtggagcgaacagcagttcaaggatgccttgtggagcttggtctggcaaggtaaggtcaccaattccagcttcgcgccggtacgtgcattaaccgcaggcgcagcaagcccgcgtaaatccactacatcacgtcgtcgtgggcgtgtcgctccgattcaccgagccactacggatatgacgttaggaggtttgtggtctgccgtaatcgggcaagctgaagccgaagacactgatcagaccgagcaggcgctcgcactggtcgagacgttgctggacaggtatggcgtcatcgcgcagccggtgatcgacaaggaaaatatcccgggtggctactcagcgttgtatccgatattgcagcgcatggaggagcatggtcgactggtacgaggcatgttcgtccgtggtttcggcgcggcccaatttgccgagcgcgacaccgtggatgcgttgcgtcatccgtcagagcatcgcggccagtccgtggtggcattgagtgtgctcgaccccgcaaatctcagtggctccgccatcgcgtggccggacgcgcctgccggtgcgggtaaaccggcacgccgtatcggagccacggtcgtgctcaatgcgcaaggtgcgctactatacgcggctgccaaagccaagcacttgacggcgttcgatcaatcggtcggccatgaacccgccgccaatgattccgacgaacaaatgcgcaaggccgccacagaactggcctacgctctcaaacgcaatggcaccggttccgtgacattcagcgacatcaatggcgaacccctcaacgcccgtcaccccttcgcccgcatcctccaccagtccggcttcaccccagttccccaaggcatgcggctgtactgattgagcccagctatcgaatgcggtagttggagccgcgttgggtcatgatgaggccggcgtgggtgagcttcttatccagtgtgtaaagggcgttcctgaggagcccttgttgctcgaagaatgggccaccgacgagcttgaccaattcgctggtgttgacaaactggccatcagccttgaccagtgcttcaagcaaactgtattccagacgggacagtgaaattgcggtgtgtgtggatgcgtagtaggctttgcgattcgtggtatccaacgtgagattgccacgaatgatcatggtgggggagtcggtggcaagcgagccgacgtatgagagcagttcgccatcggagaatggtttgctcagtacggcatccgggtgtcgtacattagctcgtgcgctagcggcagcattgtccgtgcactgttcggcttcggcatctgagttgtttgcgtgtgaatccgcgctgaaggagctgtagggcgtctcttcgatcggggcgtactcgtcaggcagcgctcgccagcggctgccttcgccgatggttttgctgagtggcgtcgaagtcagcagcagaaccttgacggaggcacgggcattgtgaagggattcgatgagttgctcggtggagatgccgagcagggattcatcgagaatcactgcgtcaaatagctccttggtgaccgcggcgagcgcgatactgccggtgcttgccaaggacacctcatgacgacaggcaagcagcgcaccacgaatggcgcgggccaacggttcattggatacggcaaccagtagtctcatcgccacctccttgatgcttagtgtaggtcgggtttagggtctcttctctatgtgtttggctcactatcgttcgctcctcgcctacaaacaccccactgggggtgtttgctttacggctcggcccatcagagggagcttaattgaggttacgcaatgaaggcgatgggggaggcgaggtccactccggagccgtctcggcgcatatcgggcttgggaagctcgaccggggagcctgcggatgtggaggcatgcaacgggtagagaccaacccaggcaagaatcagcgtgttctggcccttgaggaagcgctgggagcgtacgccaccggtagcgcggcccttggtggggtacatttccagcggggtgaccttggcggcgccgttttcggtgccgggtagtgcatcggagtcgccggccacggtgagcaccaccgcgccggagccggaagtcaaaccgttctcgccctcctcataggtccatgccaccttgccggcgggaaccacgttgaatgccgccacacgggcgccctcggccagcttgatgccggccataccgcccgcggtgcgaccctgcgggcgcacgttcttcgcctcaaaggtcagtagcgaggaatcggaggagatgaacaccagacggtcgtcatcctcggccacggcggcgaataccacttcgtcgccatctttcagatcaatgacgggccaggaatccatggtggtgggtgcctcacggttccaacgcttgatgacaccgttacgggtaccgatagccagcgacggcaacggcttggcctcggcggccccgccatcctcgctctcatccttggcactggccttgccggatgtcggctgctccatggcgatcgccgtaatcacgcgctcgccacgaatcggatcggtggattcggtcatgccgatcagttcgtcggcctgaactcctcccttcagcgacaatgtggcggcagcgggcaaggcaggcaaatcaaccacatgcgcgagcaccaggcggccggccgacgtgaccagcccgtacgtggcgcgcgtggaggtctcgaagattgtggtgatttgatcgtctcgcagacgttcatcggatgtggaccgtgcattgaacacgtccatcgcgcttggcgtggtacgggcaatcaaaccggtggcgctcatcatcaccacgcacggctcgtcctcgatcttcaaggctccggtcagcgcggactgttcgccggtcttcttgactgcggctgcggctgcggccacatcggcttcggcggaggaaatcgtggtggcggccttcaccgcttcgagcgcggacttggacacacccgaagccccggcaccctgcgccacgaccggcgtcaacgtgccatccgggtcggcgtccagcagcacggtgcgacgcggcgagccccacttggcgaccgcctcgtccatctcgtcggtgaccacctggtcgagcgcttcggcggaggccagaatgcgggtcagctcctcgatgcgcttcttcaggtcatcgcgttcggcctcaagttcgatgcggttcatcttggtcagacggcgcagacgcaggtcgaggatgtactgggcctggacctcgtccaggtcgaacacaaccatcaaacggcttttcgcggcatccgcatcatctgaggtgcggattacctggatcacctcgtcgatgtccagcatggccagcagcaggccctcgaccaggtgcaggcgctccaacgccttcttcttgcgatattcgctgcgacggcggatcaccacacggcggtggtcaacccacacctgaagcatctccttcaggcccatcgtgtgcgggcggccctccaccagcgccacgttgttcatggcaaaattgtcctgcaacggcgtgtgcttgaacagctgcaccagcaccgcatgcgggtcgaaaccggtcttgatctcgatgacgatacgcgtgccgttatgacgatcggtcagatcgaacgcgccggaaatcccctccagcttgcggttcttcacgccgtcggaaatacgctcgatcaccttctccgggcccaccatgtacggcagctcggtgaccacgatggcctgcttgcgggccgtgacatgttcgatatgcgtggcggcgcgcgtggtgagcgtaccacggccgttggcataggcctcacggatgccgtcgcggccgatgatcgtgccgccggtgggccagtcggggccgggcacgtaacgcatcagttgttccagggtggcgtccgaatgcgccatgaggaacttggcggcgttcaccacctcgcccagattgtgggtggccaggttcgtggccatgcccacggcgatgcccgagccgccgttgaccagcagatttgggatggcggccggcagcacggtcggttccttgagcttgttgtcatagttcggcgtgaagtcgacggtgtcctcatcgatatccgcgttcatgccgagggccgccgggccaagcctggcctcggtgtagcgggaggccgcagggccgtcatccagcgagccgaagttgccgtggccatctaccagcggcagacgcatcgcgaacggctgtgccaaacgcaccatggcctcgtagatcgcggaatcgccgtgcggatggagcttgcccatcacctcgcccaccacgcgggcggacttcatatacgggcggtcgggagtcaggttcatctcgcccatctggtagacgatacggcgctgcaccggcttcaagccatcgcgcgcatcgggcagtgcgcgtgcgtaaatcaccgaatacgcatactcgaggaaggatttgctcatctcctcgttcagcggcgtctcgacgatatgctccttgaccgtgcgcggatcgtaggtttgcgcggacggtttgcggtgtgatgccatgaaactccctttcgaacgcccccatattagcgggagggcgcgaaacagtgcgcagagaacggttctcaataacaactgtgcgctggtttcggtgcgccaatcgcacatgtttgccgataaaatggcgtgattccagtgtctcagtcgatgtgcgtttgtttgattatgtgcgttggggcgcacagttgggattgagtaccgttctctgcgcactgagccaaggggaggggtgctacttgaatgggcaactatgagtgttgagacgccggatatggacgagttgctgcggctggtgcccactgtgggctatggggatgacgccccggccgatcggcgtgggggagcactgcacctgtccgccgtgctgcccgccttgtccgccgcgattgggcatccgactcccaccaaggtccacgccgatcccaaggcctgccagcgcgcgttgggactgcccgacgccgaatcggccatcgtggtgctcgtggacggcctgggcttctggaacctcgccatgcgcctcggccacgcgccctatctgcgttcgctgatgaacgaacgcgccaatcagcgtcccatcgccacctgcgctccaagcaccactgtggcggccatggccgcattcggtaccggaacctgcccgggactgaccgcaatggcgggctatacgcagctcgaacccgccagccataagctcatccaactcatccagttcaaagacgcgctggcacccaaaccagccaatccgcacattcctgtgccacccatggtcgatccgctcgaccagcagcgcgagaagacggtgttcgagaaacttgcggctcaagaggtgcgcgtcacaagctcggggttgcccaagttctccagatcgccattgaccgaagccgcattgcgaggcaccgactatcaaggcaacgtcaccccacgcgatcgtgtgctggccgcctcacgcgcctcacgcacccccggcctgacctacctgtacatccgtgacgccgacaaagtcggccacaattacgggtgggattccgaacactgggtggccgcattcgaacatatcgacgcccagctcgcgctcctgaaacgcagcgcacccaaaggcacgctgatcgtcatcgtggccgaccacggcatggtgcaaaccgacatgggccagcggattgacatcgccgttgaaccgcagctcacccgaggcgtgtcactggtcgggggagagccgcgctcgctgatgctgtatgccgagccggatgaacgacctgaggatatagcttgccggtggcgcgattacctgcaagaccgagccttggtgcggaccagggatgaggccatcgcggacggattgtttggaccggtctgcgagcgagtccggccgatgctcggcgatgtggtcgtgcaggcagcgggagccgtgaccctcgtcgattcgcgtacgcaaggagacaaagccacccacctgccgagcgtgcatggctcccaaacggcattggaaatggatattccctgcctgatcgatatggcctgattcggaaattcagtctccgaacagaatctcgtcccagcttggtacggccgaacgtcctgatttacgcttggccggtttggctggtgcctcgtgtttggtggcggcggattcggccgcccgctcctgctcggtggctaccagctgtgcattggggccacgccgtacggtctcgtccgaaatattgtcagaaccctgctctggtgccgtggcaggcgattgctgcaatcctgcggcagatgacgaaacaggtccggcggtctgcgaagagaccgggctgggggccgtagcgtcatgagcctggttcgtggccggtgagatggacgtggataggtccaccgggggcatggaacctgtggaagtgacggagggccggatcgcggcaggccgtgcggccggaatcgaaggcgtaggcgccgcccaagcagacacggcgcgctcgatacgcgcggaacgtacggagtcgccgggcagttcaggaatcgttggcttgagtttggaatccgtggctgattccggattctgttcgccgagcagttttcgagcggcattgttcaggctcatcacggaattgtcgtgcatattccacgtccattcggcatggatctcacggcccgcggaagtgaatatcgccacgatgcgccaaggctcaagtccgcgccgggtggatttccaggtcactgattccatgccgattccagcagaggccagcgtgcgttccaccagttcgctgatggtgcgcaccctgctgtctttgggtgccgccacggcaaggaattgttcgatggcgtactgtttctcggtctccacggccatggagaaacgacgtaccagcgtttcgctcagatgatatttctccgcgacacgggccggatcggcaccggcgcgaatcagcgactgtatctgggaaatcggcaaagtggactgctgatgcggctggggggcctgtcgcatctcgcttctgacctgcttggcctcaagaatcgcccgttcgagcgtgtcgtccacgctcacggccatttccctgccgccaatggagaatacgaggtcccccgtcttgctcacgcgtacgaaacgggctttttcaagccgatcatctggcatattcgcaccactttccgtcgcaaagacattacttcttttaagtatgccccacgtgtcgaactttacgagtatttcaaatcgtgtatcctatgggcgagtacggcgctgaccgtgctatatatatcgacttacgaaccaaagacgacgaaaggaccatgatggctcaggattatgattccccccgcaataaggatgaggacgaggaatcgctgcaggcgctggggaagtcctcgcagaacgcctcgagcgacatcgacgacgatgagaacgccatcgccgaagactacgaactgccgggcgccgatttgagcaacgaggattcctcggtgaccgtcatccccatgcagggtgacgagttcatctgctcgcagtgcttcctggtcaagcatcgtagccagctcgcctacacggacgaggatggccagccggtgtgtgaggagtgcgccgcctgatggcgttcgacgagacctacaacgagcccgaatccaccgaggtcctggtcaagagcctcgaccccgaacatccggcccagctgcactatgcccacgcgggcgatgctggtgccgacctcatcaccaccgtcgatgtgacgctgaagccttttgaacgggtactggtgcccaccggcgtggccatcgccctacctgcgggctacgtggcgttggtgcatccgcgttccgggctggccgccaagcagggcgtcaccgtgctcaacgcgcctggcaccgttgatgccggctaccgtggcgagatcaaggtgccgctgatcaacctcgatccggaacgcaccgccgtcttccatccgggcgatcgcatcgctcaattggtgattcagcggtatgttgaggcccggttcatcccggccgaaaccctgcccggatccgatcgcgccgaacgtgggttcggttcgacgggagtggcgtcctgaccggattgggccggttgaatgaccaaggtgatgacggcaacgacggttgcggaaccaatgatggcgaacaggtgcatgcataaggctccggttcgcggttacaatgaacttcatgacgagggaggtgactggcatggcagagattgatggcgagcagtacgccgcccgtaagttgggttgtgagatcagtgccgatccgctcaatccgctggatccaatcaagaaagtgtgcaagtcccaccatcccggtgaggatttgtccatcctcgaccgcgcgtaccggcgcgccgtcatccagcattgcacgcaacggcgcaagtcgggcgaaccatacatcatccatccgttggccgtttcccagattctcgcggatctgggcatggggccgattgtggtggcggccggtctgctgcatgatacggtggaggacaccgactacacgttggatcaatgccgtgccgagttcggcgacaccgtggccggtctggtcgatggcgtcaccaagctcagccagcttgaagtgggcgactccgcccaagccgaaaccattcgcaaacttgtggtggccatgagccgcgacgtgcgcaccttggtggtcaagctcgccgaccgtgtacacaacgcccgcacctggcgctatgtgaagaccacgtccgcccagaagaaggcgcgtgaaaccctcgacgtgtacgcgcctttggccaaccgactcggtatgaacgccatcaagacggagctcgaggaactgagcttcaaggtgctctacccgaagatctacaacgagatcgtggtgctggtggctcgccgagccggccagcgcgatgtgtacctgaagcagattctggcggagatcaacgaggatctcgacgagcagaacatcaaggcatacgtcaccggacgcccgaaggactacttctcgatttatcagaagatgatcgtgcgcggccatgatttcgcgaacatctacgatttggtcggtgtgcgcatcatcgtcgacaccattcaggattgctatgcggcgcttggtgccgtgcatgcgcggtggaacccggttcccggccggttcaaggactacatcgccatgccgaagctcaacatgtaccagtcgctgcacaccacggtggtgggccccggtggcaagccggtggaaatccagattcgcacctgggacatgcaccgccgcgccgagttcggcatcgccgcgcactggaaatacaaggaaaacggccaggccggccgcgccctgagctcgccggacaagtccgaccgcaggcgtgacgagaagaaccaggagctttccgaagccgacaatctcaaatggattcagcagcttgccgattggaccagcgaaaccccagattccaacgaattcctcggttccctgaaggaagacctcggctcgtccgaagtctatgtcttcacgccgaagggcaagatcgtctctttgccggcccatgccacaccggtcgatttcgcctatgccgtgcataccgaagtgggccaccgtacgatgggcgcgcgcgtcaacgggcgtttggtgccgctcgacaccacgctcgacaacggcgacaccgtggagatcctgacttccaagtccgataccgccggtccttcgcgcgactggctgagcttcgtcaagagcccgaaggcacgaaacaagatccgccagtggttctcgaaggaacgtcgtaccgaggctattgaggaaggccgcgacgaactgacccgcgcgatgcgcaaacgtaacttgccggtcaatgcgctgctgaccaccgaggcattgatcggtgtggccgacgacctcaatttcccgaacgccgacgctgtgttcgccgccatcggtgatgggcagatctccacgcagaacgtcatctcgcatctggtcaaggatgccggggccgacgaggtcgatgaggaggtcgagcaggaggctctgccgctcaagcccgtggagcgcaagacttccagcagctccaccggggtatccgtcaagggcgtgggcgatgtgtggatcaagctggcccgttgctgcatgccggtgcccggtgacaatatcatcggcttcatcacccgtaatcagggcgtatccgtgcaccgcaccgactgccagaacatgatcgatctgaaaaacaagcagcctgagcgtgtggtcgaagtcgaatggaccagcaccaagggcctgttcatggtcaagattcaggtcgaggcgctggatcgacgaaacctgctttcggacgtgacacgtgtgctttccgaccatggcgtgaacatcatttccggtacgatcgccaccggttccgatcgcgtggccaccagccagttcagcttcgaaatggccgatccgcagcatctcaactcgttgctggcagccgtgcgcaagattgatggcgtgttcgacgtgtaccgcatcaccggtgccaaggaatccgccgaacctcgactgcgcaagatgaagtaggccgttgcttggctcccctccgggaggggctgtcagcgaagctgactgaggggagcagcgcaggcttgcggaactcccctcagacgtctgcggcgccagctcccctcagagagggagccaagaatacgaaaaggtcctgactggaataccaatcaggacctttgctgtatatgtgtcggtcttactcggccacgttcacggacagaattacggccggctcgagcgggcgatccatcggatcggtgtccagtgcttcgagcttatcgacgaccttcttggagtcgtcatcggcgacctcgccgaagatggtgtggtgaccgtccagccacggggtcggcacggtggtgatgaagaactgggagccgttggtgccatggaccttgccgtccatgccgcgacgcagaccggcgttggccatagccagcaggtatggcttgtcgaacttcaggctcgggtcgatctcatcgtcgaactcgtagccagggccgccggtaccggtgcccagcgggcaaccgccctgaatcatgaactgcttgatgatacggtggaaggtcaggccgttgtagaacttgccatgggaaggctggccggtgtacgggtccgcccattccttctcgccggtggcgaggcccaggaagttggccacggtgttcggggccttgtcgtcgaacaggttgatggtgatatcgccctcagaggtgcgcatgatgatggtagtcatggtcccaagtgtctcatgggcttgagaccggccggaaaccccaatcgcgtcatgcttcgaggggctggacggggaacccgagccggacgggaccccgaacggcacgaaaccggccaaggcacctttagccgcacccgagattccaccctcgaccggggcgtcggggttgaaggggctgacaaggaacctgggggagccggcacctaccagagcacctggtttctcggcaaacactccatactcggccgattttgcatatccagcctcggctttgctgagaattgtgtcatccattagagcgctcggcgtgacacctagaaaatcggcggtcgttacaagatcgcttactgaccatccaactttgccacacattttcatggacatagcactcttggtaatgcccaaagcttctccaagtgccttttgtgtttttccgcttagtcctagataaactctcacgttggtcgggatcgccgcttcagcacgctgtcctttatccaaaggtgtttctggtgagacttccgatgtggacatatgatcacttcccaaaatagttcagaatttcttaattaagagtctcatacgatttgcgttcagtcaaactgtacgctatagtgaagtacagtaaaaatgaaccaagtcagaaagaaagaactatgaatggagtgacccaaaggataagtgctctggtaaagagtgaggggcttacttgtgcccaacttggttcattgcttggtttatcgaaaacttcggcgaatggaaaactcttgggacgcattggctggacaacttcagacatcgttgtgttgtccgagcacttccgtgtgtctaccgactatttgctggggcttgatgctgatcatgaggaggttgcgtgatggctggtggaatctacgaacagtccgaatggccggacagccggtgggattgcgtcacggtgtgcgatggatgccacacagtggtctggggcacgttctgggacgactacgattcggccgcccgcgacgcttatttcgcccgtaacggctggcgcaactactgcgtgccgggcgacacggagattttggagctctgcccggcctgcgccgtgcgcgccctgcgccgcggcgagacccgcggactggccgacacctggctccgccccacgcatgcctacacgcatgccttccgggaggtcgatgcacagctcttcgcccgcgaacggatggtggcgggcctgctgctgaccgaggggagggcgtcatgagcaacgaagtgtcatgcgacagcgtggcccgccgcgtcaacggcgaaaacccactggatgtccttgtcggcgtttccacgccgtatggcccgttgctcaccgacgactatggtcggtccatacgttttgccgagtacggagacggaccatgccgcttcggggatcgtcccatccaggtcatgaagccatatgagtggctcgccgaccgtgtctacgtatttgatgacgaggccgtcgcaccgttcaaagacgatgtggcccgcttcgtggttgaggcctgccgctgcttcgttggtggtgacggagaccatgatcgcagcgtggtgctgtgccgcgaaggagtcgcagaacaacttgatctttcgtccgacgccttcacgccgatggtcgggtctgacggcaatgccgtcagtttcagctatcagccgtgcgaccgcctgcgctgcgtctgctcgaccaatccccaaaaaggccttggtgtgttccatgtatggactgagcgaggcaccacctgccaagcggttctgggaccatgcgcctatgagcgtcggcctgagaaagccttgaccctgccagacgaactctggtccaggaatgaatcctggatgcgcgatttcttcgagcaggagacttccgatttcctctgcctcggcgtggtttcgcgccggacgaatatcaggttcgttgagggaggtggtgcgatggtctgatctcatttggaattctctctttctctgcaatcgataaaaaatgcccgttcccgatgttggagcgtcggggacgggcggtgcaaccaatattccgagcggccgcggatcccgtatcttgccggatcccggtccgtggccgcccaatgcattgtcttggagtagtgatcacacatgaacgactttactaaagcattccgcatgtcttgctctgtgtttcccgagtgtaaccgggatttccaggcgccggtttggacgttcccggtcgtggtggcattcgcccgccacaacggtccgggctccgtcgattcccgtcgcctggcgtcgatgatggcgcacccgtccatggaagggagactcgcgtgaactggcttgcaatcgtattgatcgtgttcgtcgcgttctcatggctgatgacgctggccctgtgccgggcggcacgtctcggcgacgagatggccgccagattggccgacgaacgccgtgccgcccagcagcgtgaggaggagcggccgtgagcaacatcgcactgtcatgggccttcaaatgccatgtgggcaacgccgccgcgaaggccgtgctcgtctacctcgcggaccgcgcggacgacgacggcaccgcagcctatccgaagatcgcgaccatcgtcaacgtcaccgaactctcggaacggaccgtgcgcaccgcgttgaagactctccaggagcgcggcttcattcgccgtggcgaccaacggtacgcgcgcctcggcaagggcggcaggaaccgtctgccccagtactgccagatcgtgtgggacctcgcggtcgaatccgacccgtcgaccctcgaatggatcaaggagacgcacacggcggaacacgacccgaagaccatgggcaataccgtggaccccgccgcctccaccatcatggaaaacggcgaatccaaggacgtgactccggaaaacgctggaacgaagccgattcccagcactgcaaatctcgcagggctggaaaacgacccggaaccggcactgcaaatctcgcacctccagcactgcaagagctgcacccccagcactgcaaatgtcgcagggctgctatataaggataaaaccctccaggtaaaccctccgagcttcccctctgcccctacggggcatctccccgcaagcgacccgaccgccgccgaaaaaaataaaaccgaacaactcgacgaggacgacaccgagatcgccgaagcggccggacgggtcctcgcctcgctcggtgcgcagcgctcgatgctcggcctggccacgccctcaccgaccaaagccgaccgcagggccatcatcggcctgtaccgcaggctcgtcgaccagggagcgcaatggcccaccctcgtgatggtcgacgcgatcggcttcgccatgaacggcgattggtggcccaaacgcatccgcaccggccgggccctcgccagacactgggacgaactcaacgacgacatgatcctcgcagccggccgcacagacggcgacgcacacgcgcagacggttccggcggccgtgccggagccggatgctgcaccatggctgcccgactgggccgtgaagacgctggccgaattggacggccaggacgcgacggccggaggggaggcgacggcatgaccacgcgcatcgactgttccgaggcgggcttcagcgaattcctcatcgccaacccgcagctcgacgggcacgcggacctgatctggcagctgcacgccgtctactggcgcaacaagcgcctcggccatcccaaggccgtcggtctgctgatccaatacgcccgggcatgggccgcccgcaatcccggcgaaaccgccataggacgcctccagacccgcaagacgccgatgacgcaaggacggcggccatgaacgggcgggacatgatgccggcatgcgcgaggatcgccgcggtcgacccggacctcgccgaccgaatgtggaacaccgtgacggacccggacggctgggacctgatcgacgaacggatgcgctgcaagggccgcatgctgtgctccgcgtgccccatgcgcctcgactgcatcagccacgctctctccaacggctggaaggacaaggccgtgtacggcgggctcgactatccgagccgctggaccctcgcccggctgatcgcccgcgacctgcacatcgacatgtccggcctgcaccggatcacgccgcaccggatccgcgaatggctggccgccaacccggactggggcgaacgcatgcgccgggacggcagggactactggcggtccgtcaaacgccgccaacgctcccgccgcgaatacacgcacgacgacccgctcttcctcccgaccgaacccgtgccggacggcctggtccagggcagcctcttctgaccgccgccaccgcagtccgagtggactgcggcacaggccacgataccgaaaaaccaattaaccgatttaccgaaaacagtacaggccggaataccggaaccaacgaaccatgccacaggcaatcccatttaagcgttgcggcgcatataaccacaacgcttatgtgaggtattcaggtcgaagcgcaaggcaatgccttcaaccgactggataccgcgataccggaaccggtaaataccgaaaaaccgtaaaaccaaaataaggagaaaccgatgaacgacaagaagaaccgcgagccgatggtcatcgcattggcgacaggcaagggcggcagcatgaagaccacaagcgccgtgtttctggcctgcgccctcgtggaccagtcccggggcgagcagcacgtgctcgtcgtcgacgcggacgtgcagggcgacgcgaaggactggtggtacagggccgacgagctgggtgatccgttgccgttcgacgtgatgtccgccgcgccggccgacatcacgcacctgcgcgggatcaacgacaggctcgacgaccccgtcgactgggtgctgatcgactccgccccatacgggcgcgcattggacgaatcggtgaacaacgcggacctcgtggtcatcccgtcgagccccagccgcatcgatctcgaccaggcggtcggggtgaagaacctgtgcgaccggcgcggcgtcccctccgcgatcctcctgtgccgcaccgaggccaacacgacggccctgcgcgacgcgctggaatggatcgacgccgcgggcatcgcgtgcttcgagacgctgatcccgaagcgccaggacatcctcaacgcgaaatccacccggccccgcgggtcccgcctgcacgaataccgggacctggccggcgaactcaagcagaccatgcaacagctcaaggacaaggaggaggacctgtgaggaacatgaacctgacgccccggccgcgcgacctgaccgtgctgctcaacagcgaccggacggataccgcgataccggaaccggtagataccgaaaaaccgaataccgcaatgccgaataccgaaaaaacgaaaaaccggaaggacgaaaaaccggaatccggggagggctgggtgaagaccagcgtgagccttcgcgcctcgacccgacgccggctcaagacctgggccgccgcgcacgacatgcgcatccaggaggtattggaggacgctctggactcgtacctgtcctgacccatcgatccccgtgacgatccccgccacggggattcacgtttccgggtcagacagcggcggcgtgccgcgaatatcgatggcatcatcgccgctttcgccgaccatccggctggtttcgagggtttctgcgcggacatgttccgttcgctcggatacacgaccgaggtgacccctgcctccagggacggtggatacgacatcctgctgcggggccgggacggcgtcatgtccatcgttgaatgcaaatgctatgcacacggcgcgaccgcgtaaaatcgatccagagaagagatattaaagggggttggctatggacatgagcaatccgctgactgtagtcggaatcgtgttgacggcgttcatcgtgttgatggtcctgagcgtggttctggagttcctgtcgcatccgatacgtttcctggcaaagatcgtgctgaagatcgcgggcatactgttcgtgatactcgcgatgttccagatcgccgatctcatcaacaacaagggcgtgaagtgggacgccgtggcagtcatggtcggctgcgccctggtcggcgcactgtgcgagtggctgattgtgcgtccgagcatgctcgaacgccgcgccatggaacgagaggccatcgagagaaggcagaacgccgagcatgagaaatggaagcggtatcaggatgagcggcacgactgggaatgggagcgcgaccgcacgatatggaaagacggaaacgaggaatgagatgaacgaaaagaacgctgcgccggagccgggggagaggtcctgtctctcgcgcacgggcgtgatcctcgagattgaggagcgcgaataccgtcgacgcattaaccgtcgatccgaattgtgacgggaagtatttctatccaatcggctgattctttcgttttctttctgatccccgtaatggcttctccggtacggggatttttctatgtccaaactgatgcttgcggactgggacaccgattggagggtcctgtcctcgggtttccgccgatgtccaaaccggggtgtgtcggaagcgtgtttcatgggagttgtatgcccggaagggatccgggcgcttgaaaggaattcctatgaagcagaggaaatggttgagccggatggccgcgacggcggccgccatggcgaccctgttgaccggcggcgtcgccgccggcaccgcgttggccgccgacaccgacgagcccggcctgacggcatcgaagacggtgaccgcgactgacaagccgaacgtgttcgacgtgaacctgtcggcgacgggccgtgactacgcgaagaacaaggagcacgccctgttcgtcctggatcgtaccgggtcggtcggccagagcgagtacgacgaaatcgcgaacatggtccgcggcctgggcagacgattgatggcgacgggccaggtgcaggtgagcgtggtcctgttcgccggcggcgcgcaggagaaggaatcggtctggtacgacggatacgagaacgtggtgacgcacagcaccaacccggcggacctggacaggatcatggtgcccgtctctactactactactactactcataacggcgtcttctatggctccgagtatggcacgaactgggaggccgcgttcgacggtgcgtcgaacgtgatggcgcatgagcagctgcccacggacgtgttcttcttcagcgacggacaccccaacatatgggatggcgcggatggctacaaagaagaagaagaagcctattcccgcgcgctgtcccgcgcgagggagttcgccgcctcgtacggcgaccacatccagaacttcacatcgatcggtttgcagcgcgacggccaggacctgtcgaagctggagcatctgagcaaggacgtgttcggcgcgaaggcgaagaccgaattctcctccaccggcgaccaggtctccgaggacctggaatccaacgtcgaaaatgagctgatgaccggcggtttcgccaagggcgtgaccctgaccgaccagctgagcggcaacgtcaaaccggtctccaccgatacgaagggccgtcccggcctgagcgtgggcgtgagcacggacggcggcaaggcgacgaccctcgttgagggcaaggactacgagtacacgtacgcgaacaaccgcatcagcgtgagactgctgaaccagctgaagggctcccagaccgtcacggtcacgatccccgtcaaacccactgacaaggtcctccagcaggccgtcgccggacagcccggccccgacacgggagacccggacaccggcagcctgtccgccggcaagcacggctggtattccaacaccggaaccaacaccgtcacccacaccagcccaaacactggcgcgaccggcacaagcaccctgcccaagcccgtcatccccgtccaggtcgccagactccaatacgacaagaatgccgagaccgcgaccggcgatatgggcaaggacgcggtaaccgcgcccgccggcagcgagcaggccatcgccgcgaacaagttcgccaacgccaactacaccttccagggctggaacacccaggccgacggcaagggcatgacctaccagaagggcgacaagctgaccctgccggccggcaccaccgtcctgtacgcgcaatggaagcggatccccggcaccctgacttgggtgaa

SEQ ID NO: 3131 - DNA, 20184 bp, Unknown
  R215_18m  MAG No. k141_36110
gccggaactaccttccgaccagtactcaggtttgcggagccactgcaggatgagttgaccgatgctgtcctcataaaccgccacctgggtacccagagcggcaggggctttgtgacactcctgctcgggtgtcgccgccggtctgcagaacacgggctgatccgcggctgaccgaccgcttgacgagcagggaagttccgtgccgataagcgacgcgggcctccccgttcgcgtcgcacggccctagactggccggcgacggcgcgcatagaacgggcgcgctggccgagtgacagactcggatgatcgaaaggggacatatgaatgaggagaaggacacggacggaacgacggacgcgcacgagggggaccacacgcccgcggacggtgccgggacggagggcgaaggcggcaagccggacactaggccgggcgacagactcgcgaccatccgacgtaacccggggctgtccgtgtttacccacgccgcgacactgacagccatcgtggtcctatacaactggttcggtcagacttaccttctcagcagattaagcctagcctatattctctatttcttccccggcctgcttataaccccaatgacggcccttttggttacggctttccttcatgacaggctgtcttggaagaagattatctgcatcatagtcctgtcttactgtttgaccatattgggtgtattcctgaacgagttgtggtgttggcggaaagacgcagcactcgaaggtttgcggaatatttggctttttatcgatcagccaacaccggcgattaccttttatggattgcaaggatggcccaccatcatctatgggattgggctggcgctccgcagcctgatcaaacgaagcaccagtctctgatgatgaacgttagtattttccaagaacaaggttcctgatgccgggatgggaacgatagtcacatccccttgtccaaccaatgcctcacagacggcggcaaggtcagcaccgggattccattccatgacggtcttcatgttccccatagcggacgcaagatcgcccgcccacccggtccatacgtctgggatgagcaggccgttgagataaccaagcgtcgtgacgcacatatgagccaggtccacctgctctccggaagcatcggtcatagattgacgccatccggcgattctcgaaggacaagcacaacggacgatacggatacttggacgggatttacgatgtgtctgacgaaagttaacggcggtcccaaatcaagtcaccttgtcgaggagcgaacccgcgcagccgcactccccatgattttccaaagccattgaccggactaacttgagcgcatcgtgggcgacaagtggccgctgcagcaccgccacgtgctcggccaggccatccgcatccgctccccatacgtggacgcactgtccgtcactcaggtgctggcgctcaagtcgctgcgcaagaaggtggacaaggaagagctctcgcaaagccagcaggcaggattcatctatctgatcctctgcaccgtttcaagtgttgctgccggcctgcagaacacaggctgatctacacaccagcgcatatggggaagcctcgctcacatcgagcggggcttccccgttttgtgtgcatctttcatcatcttgcaataattcttacatgtaaacagagagttcttacatgaaagaattattgaaaggtgatgaaagaacttactttcacgcgcgccaatcatcccaacacgtatcgggatgacggcccattcccctcgcggcgcaacttgcccacatcttcgagcttcttcaacaaccggtatgcactgatatagctcaggccgaatagatccatgacatccgccgtagtgacgacaccatcatttttctcggcgaactccagaacaaggccactgcgccgggtggcatcgatgtcacgctgacgcacgtaagacgccaacccctctgaacgtttgtacacttgggcactcagcatatacgagcgagagctcccactgccgaccccctctaccaaaccagcttccaccagattctcaacagcagacacgatgcgtcgatgctccaaatgggagaagtcgcacaactggaccatagtaagcctacgatgctcgcgcagtagtgagagcacaatcagcgaccagactggcaacggtgctcctcgccgacgctcctcatctccaatcatggtcacgaatgcctcgtcaggcaccacacggcggaggaacagaatgacttcttcggcactggactgcgagtaatccgggaaagaaccgcctgccgcaatcgacccggcataaatggtatccacacctcgcccggtacgttcaacatatccggcagctttcaaaatcagggcaagctgcggattacgggaacgcggttgtgcagtaagcaggttatcttcggagataccctctatgaatcctccggggttggctatggtcaacccatcatcatcaaccaggaacctcaccgaacccattcgtgcataatcgcgatggcagaaagcgttaatcattgcctcacggaatgcccctcgatcgaagtctggcagatcgacacgaatcaagccgctcatgacttcgtggctgggattccacggctccatcagctcgcctacacgatcaaacatatccaccaagggcaacacgaacggatccatattgacctttggagacatgcctttcatcacttgaaaaacagccgatgcggctggaaccgatcgatgaatagcatcaaccgaaccaatggtgagcagaccagcaacagatggctgcaatccatacgggccatcaacaaccagctcaagtgcccgatcgaaatcctcatcagtaaaagacaacaacgagttttgcgcattggcactgcgaatatggcttctcaacttgttccgtgagtctggattcaaatcgtccaaccgagcctctggtgcaggttgcgcgctgaaatcgtagaaccgttgctgagataaacggctaatgaattgggaaacaaacagcggaacgacctcaggcgagccgtctgctttcagccggcgctgcaatgtcttcccctgactggtagacacgatttgctgactgttatccacctcaatactgactatcggcacctcgttctcatacaagagcgccacgcgagcgggaagctgcggaacagtcttattgaaaattagtaccgcaagtccattgatattgcgatgctcgtcacatacgccggtcacagtgccatcgtcttcaataccgagatacagtgtgccaccttcggtattggctagagccactacggtgtcaacaatttcatcatgcgattgaggacgcttctgctcgctcttgaactcaaccgtcaaactttctttggccggcaacatgagcatcccctttcaccatcttgcaataattcttacatgttaacagagagttcttacatgtaagaattattgtaagatggtgaaaggggtaaagagcaatccatcctgtcatctccagcaacttaaatccgatcatcgctgctttcggcatatctgatatcagccgctggtgccagtccaatcacccaattgaagctcaacacggccaaagactctacgccgcagtggattcgcgctcgatgagcttatagcccacattcacggtctgcgggaagaactcgtcgtccaggttctcgatacgccgcataagcaaggtcagcgcggtatccgccatgcccttgaaatcggtggccacggtggtcaaagtcggcacgctgtacatgctctggctcaggccgtcgaagccgataacgcgcacatcgcccggcacacttacgccatcgtccgccagaccacgcagaataccgagcgcaataccgtcgttcaggcagtacagaccgtcgtacttgcacttgcctttcttggccaagccacgcccggcctcgataccgccgtcaatcgaccacgaggatttgatgaaatcacggcgctcgtcaaacggcagtccggccgcgagaatcgtctccttggcggcccgcatacgaatatcacgcgagccgggaatgatgttgggattgttgggatcgtgattgtcgccgacgatgccgatgcgcgcacagccacgcgcgataaggtgttcgattgccgcccgtgagccggcgtcgctcggcgcgttcacggtgtcgatgggcaggctggtgtcgtagttttccagcatgacggccgggtgccgcttcaggatatcgaccgcacgtggcgcattgatggcgatgatgccgtccgaaaacgtgtacgacagatcgttgtcgtcggtaagataccgggacagttcgatgagcatgtgcgagtcgcgcttgtgcacttcctcagccacacacatggccagatgggagaaatagtcgccctcgaggcccgaggtaaggaaggtgatggtatcggaccgcccagaacgcagggaccggccagacaggttgattttgtagccgagtttgcgggcggcgtcacacacgcgttgcgtggtttcgggcttgacgtaatccttgcctcgcagggccgcggaggcggtggtggcggtcactccggccagttcgccgacatcctttaaggtcaccatcgttaccatctccgcatatcacgaaccttatcgataagaatccatagtaccgcccacatctcagccgaggatgagaccctcggtcgaggccctgcccggcgactcgaacgccgcggtcaccgtggtgagcaccgacgctgcaaacgaaaacatgtcaaaccaagaaatggacatgacggagtcattgttttccgagagggatatgccgcgtccacgggcagacgtcacgtatcaatcacgccgataccgtcatataactgttttcgatgtgagaaagctcatagcttccgaccacagaaaccagccacagcaaccccataacagcgttatagttctgtttgtcggcgtcgacaagagccagcagcgccgatgaaatgcacaccaaggatgtttagcgaattgttcgcagttcgcacgattcgatttgattcgattcgtgcagcccggatggttcacgggggcatgccgtcgtgatgtgcgtggatatgggcgatgcgactctcgttcgggtcggcaggtcatcgtacaccagttacgaaaggatccgtccatatatggcaaggtttaccgagaatcgttggaccagcgcgattattcccgcactgctgattcacatcccaatcggtaccgtctattgctggagcgtgttcaagcagcttatcgctgaccgtctccacgccagccccgcctccgtggaatggggcttctcactcgccatcttcttcctcggcatgtccgccgcgtttgccgggccaatggtggagaaaaacatcaagaaatccgcactcgtctccatggtctgcttcgtggtcggcttcgccggcacgggcgtgagcatcgccctgaacttcctgccgggcgtgttcatctgttatggcgcgatcatgggcatcggcctgggcgtcggttatctgactccggtcaagaacctgatgctttggttcgccgacaacaagggcctcgccaccggcatcgccgtcgccggcttcggcctggccaaggccattgccagcccactgatggaatatctcatcggcacggttggcctggtcagcatgttcttcatcctcgccgcggtctacgcggtgatgatgttcgtcggcttcctgctcatcaagcgtccggccggctgggtgtacgatcccgcgacctcacacgtcagccgcaagacaatcctcaagaagcccgtgttctggggcatctggatagccttctatatcaacatcacctgcggcctggccctcatcagccaagagaaggacatcctgcacgatgtgctcagggccttcccgcagtatgccaacctgagccccgccaagtttgccgccgccatctccggcatcatcggactggtgctcgccgtggactccgtgttcaacacggctggccgcgtgggcttctccacactctccgaccacctgaagcgccgcgagaccgtctatcaggtaatcttcatcatgtcgattgccgtgtgcttgctgcagatcttcaccaacagcatcggcaacgctctgctgtgggccgtgctggccatgctgttcctcgtcaacgcgggctatggtggcggtttctcgacgctgcccgtgctgcttgatcagcacttcggcaccaaaaccgtctccaccacgcacggtctgacgctgagcgcctgggcgttcgccggtctgtccggcaaccagttggcctcgttcgtagttgcccacgcgcctgatcaggcccaccgctacgccgcactcatcccggtgctcaccggcctgttcgttgtggccctgatcagcatcagcctggtcaagtacctcggcgacagaaacgtcacgaaggccgtcgaagaccgaggctgagctgccgcaaaacaacgattctgccggagtcgggcgcatcgatcgcatcaatcgatgtacgtcacgattttggcagaatcgttgttgttgctgttgagtacctgaggtcgtgcggcttacgcgccgaccagttcgagcatttgggggatgctctttttgccgaattcgacttgctgggtgccgtcggcgtgggtgatgatgatgcagggcacgctcatcgcgccgtactggtccttaagttcggggaagtgcgagacgtcgtaggcttcggcgcgcacggccgggctcagggaggcaatgcgctgggaagcaagcacggtttccgggcacatcgtgcaggtgagcgagacgaggatcatgatgttcagcgggtccgtgatggacttcgcgcgttcgaccaggtcatcacccagcggctggccgggaccggccgcattgtacaggccaagcacgaacgagttgaactcgtggccggaaggtacgccgtggaaggccagaccggtgaagaccagtgaaccattgccgtccttgccggccttgccgtcgccctcagccggcacgcagatgcgcacagttgggcgggcgagcggcaggacgccggcgacgtcgaatgtggcgcggccggaatcgtccaacgaaccataagtgggcagttcggtgccgtccggcaaggtgacggacagcggttcgccaaccaccaaagaagtaggcacagaagcaccatccaccgccgtgatcagccctgcggcatcgacggcgaccgagttcagcttgccattcgacaacgcgaccatctcgccgatgaagccctgcaattccgccgaaagcggggtgctgtccagctcaagggcaagggtgaccgggcgggtcatgcgtccgaagaccacgccaagctgctgcttgacggcggcggagaacagttcgccgggcttcttggcggcgctggctgcggctgcggcatcggcgctgcgtttggcgggagccggggcgggcgtcgtgccagcggccgaggcggcggaggcggccttggcctcggactcctcataagcggaagcagtgggacgcggcggcaccaagccggttttctcgctcatctgcttggcgtaacgctccagttccacggcggcaatcgcaccgtcggcggtggcggtgaccacttggcgcaggttcttgacgcgcagatcgccggccgcgtacacgcccggcaccgaggttctgaggtagtcgtgcgtgaccacgtaaccgtggtcgtcgagctccaccacgccgcgcaccaaatcggtggcgggcacatagccggcgaacacgaagacgccgaaggtgccggcgtcggcgggcttccacgtttcggtctggccggtggcaaggttcaggatcgaggcttctcgcaggcctccttggccggcggtgacgcccttcagctcgacctgataacgcacgtcgatcttcgggttgttcttggcttcggcggccactgcggcatcgcaggtgaagtccggttcgcgcacgagcacggtgactttggaggcgtatttggtcaggaacacggattcctcggctgcggcgaatccgccgccgaccaccagtacttccttgccggtgaagaactcgccgtcgcaggtggcgcagtaggccacgccgcggccggcgtactcggcctcgccctcgaagcccagcttgcgcgggctggcgccggtggcgatgaggatgccgaacgtcttgaggtcgccgcgtgaggtgtgcacggttttgatgtcaccatccacgtcgagaccggtggcttcggcggagaggaattcggcaccgaagtcctgagcctgctggcgcatggtctgggtgagtgcgcggcccgtggtgcggcccacgcccggatagttgacgacttcgttagtgatggtgatctggccgccgaaatcgtccttttcgagaatcagcacgcggtagcgagcgcgggccaggtacaggccggccgtcaggccagccggcccgccaccaatgacgacgacgtcatagagattgttggtctgagtcatgaaaactcccttacatacactggctcccctctctgaggggagctgtcgtagtgagactgagggaagcatatcggatcaggctagctctcgcgagcactccccccagtcgctttcagcgacagctcccctcagagaggggagccaaggttaccgcctattcagtgtcgatcacagctggccgacgaggtcgaggctgggctcgatggtttcctcgccaggggtccagttggcggggcagacctggtcgccgtgctcgtagacgaactgggaggcctgcacgcggcgcagcagctcctcggcgttgcggcccacgttggaggagatgacctcgtaggccacgaccttgccctccgggctcacgatgaagtcgccgcgctcggccacgccatcggcctcgttgtaggtgtcgaggtccttggccagcagggcggtcgggtcggcaagcatcgggtactcgatcttggcgatcttctcgttggcgtcgtgccaggccttgtgcacgaagtgggtgtcgcaggagacggagtagacctcgcagccgatttccttgaacttggcgtagttcttagccaaatcctcaagctcggtggggcacacgaacgtgaagtcagccgggtagaagaagaacagggaccagtggccgagcacatcgtctttggtcacctcatggaactcgttgttctggaatgcgttcaccttgaaatcggtcagttcatgctgcagaagagtcattttcggtcctttcaggattcttcaggcgattaccagaacccatcgtagtgtggcggcacagggctcgcacggacagaacatatgagccttatcacaccagccacagcccttgtgctgactatcatcacggcccacccttaaacaggattgagattgtgagcgttctcattatgctttgggcaaagccagattatgcatgcagtcgcgaatccgcacttccaatcgctaatatggcaaccagcagtccgctgataatggaggtttcatggctcagtcagacgttgaacaggaatcgaccgcaaatgcgacgtggagccgtatgctccaaggcaatcgccgattcgccgaaggcaagcccgaccatccatggcaggatcaggagacccgccagacgctgcttgatggccagaacccggatgccgcggtgctctcctgctcggactcgcgcgtgcctccggaaatcatttttgatcagggcttgggcgatctgttcaccgtgcgcaccgccgggcaactcatcgatagcgcggttatcgcctcgctggagtacgcggtcaagaaactgcacgtcagcctgatctgtgtgctcggtcacgagcactgcggcgcaatcgaggccgccgagcaggagctggacgacctgatgcacaccatcacttccgaagccgacggctcactggaggccgcggatgcgatggacgacctcgacgagcacatcgccgccgccgaatcgattattctgcgccaggccggcatgtccgtctggcaggcgcgcgaagccgagctcgacgcgcatgaagacatcgagcgcgtacacgtggcccacaccatcgagacgctggtggaacaatcccccatcattcagcaggcattggctgccgaccagttgatgatcgtcggcgcccgttaccagctcgacaccggcaaggtcgaggtgctgagtttctgaccatcagtcagaccccgttcaccgggggtaatgcggtcgtggtacatctgtgtgcagagagatcgaagaacacggaagtctgaaccaatgccacctgcccttactattcactacggatccgccacctatacccccaatcctgcacgtgccacgaccatcgggcgtgcgccggattgcgatctggtgattcacaacccgtacgtatctcaccatcatgctcgcgtcacctttaccgacgatggttggctcttggaagacacgggtagtgcaaacggactgtccatcaacggcattcacaccacttccgtactgctgctgaacagcaccaaagtgacgctggcacaaggtgccaccatcgtctgcatcgtcggaaccagcgggccgtccacgccggcacagcccccgcgacgccctgcggcaaacgtggcccagcctgcgctaccgccggcaccatcagcgcaaccggcacaacccacgcaactcgcgccgcaacaggcacgcccagtagtgcaacccacaccaccagcaccgcaaccggcacaaccggtacaaccggcacaaccggtacaaccgcaaccaacgccagccccgctggccccgcaccgcgtatccccggccctcgcgcacctgcaacagcaaccccgcccaacagcagtggcaccgacggcagtatcgccagtgccggtatcacccgcatcaccatctccgtctccctgcgcatccccttccccatcgaatgccgccggcaccgttctggcaggcagcacgcaagcggtaagactcgaatcccaactcaccaccaaccgcgtgcacgggtccttcagccccgagcacgacaccacaggcgtcatcggccgcgataccgcctgcctgattcgcatcaacgattatctggtctcccgcaaacactgctcgctggaaaccaccagcagcggcatcctgctcactgacctgaactccgccaacggcacttacgtcaacggccgccgcgtcgcgaagatctggctgcgggaagacgacgtcgtcaccgtcggcaacaccgacctgatcgtgcatgaaggcgtgctgtgcgaccgcacgccgtttgtcagcaacgacgcggttatcgccgaaaacatcggactgaccgtgggcaaaggcacccggctgcttgacggcatcaacgccgtattcgccaagggcacgctcaccgccgtaatcggaccttccggcgccggcaaatcaacattcacctccatcgtcgccgggctcaacagccccacggacgggcgcgtgctgtttgatggatacgacgtgcatcagaacatcgaactgttgcgcagccgtatcggattcgtgccgcaggacgacgtggtgcaccgcaagctctctgtggacgcggcgctcgaatacgccgccaagctgcgcctgcccggctcaaccaaggccgagcgcgccgaaatcatcgacaacgtgctcaatgagctggaactcacgtctcgccgtaagaatcgcattgacagactgtccggcggccaacgcaagcgcgtgtccaccgctatcgagctactcaccgaacccgaactgctgattctcgacgaaccgacctcgggcctcgacccggcgctggatcttacggtgatgaccatgttgcgccaactggcggatgccggccgcgtggttatcgtggtcacccattcactgtcgtatatcaacaagttgtgcgataacgtgctcatgctcgctcccggcggccatccggcattcttcggcaccgtgcaggagatgagccaggcgttcaacggcaaggaatgggccgacatcttcaacgatgtcgccgaatctccggaacgggtgtattcgattactgattcacgccagcgcaccatgcaggccgagtccaccatcacgcggcacaccgagcatgagaaaccggcaaagccattccgcatcaaacagaccatcactctggtgattcgtcagctgcatttgatcatcgccgaccccggattgctgatcttcctgctgttgctgccattgctcctaggactgctgtcgctggttgtgcccggttctcatggcttgggtgagcccgatttcaaagacgccgccaccgagccgaaccagctgcttgtgctcgtcatactgggtgcctgttttatgggatcggctttgtccgtgcgagacatcgtctccgagcgagcgatttacggccgcgagcgcgcggtgggtttgtcgcccacgtcatacaccgcctcgaaactcatcgtgatgggtttgcagaccttgttgcaggcggcgattctgaccactgcggtcagcctcggcaagcccggcccggaccatggtgtggtcactgattccggcatacccgaactggtgttggcgatttggctgactgcgtggacttccgcattgttgggcgaagtcggctcggcgttggtgaagtcgggagaacagacgatgccattgctggtggtgctggtcatggcccagttggtgttctccggcggcatgattccggtcaccggccgcgacagcctcgagctggtcagcatgatcttccccggacgttggggcttctccgccgccgcctcggatatcgggctcaacgatctgctgtatggccccaccaaggtgccgatgttcaaaaaggatgatctgtgggagcacaccacggatcagttctggttcaacattggcattctggggattatggtagtcgtcttcaccattgtgctgcgtatttgcgtcagcaatgccgtggccaagatgcgtcggcgctcatagaactggatcgaaactagcccgcaaccggcttacttcattcattaggtcaattatgcgttcatttggtcactgcactccaacactgaccattgaaatgccgccattccaacgcctcaccatgccgacaacccaccaaatgaacgcgcaacctaccaaatgaatgaacccagccctatatttggtgctacaacgactgcaaatactgccccaaatgcggcaccgcaaattccagctgcccatgacctgccgggcggatgagtttgtccttgataagaaccgcccggtacttgctcacccagcttcgacttctgcgcgtacgatccgcaatatcacccacctgcgtgggatttggcgaatccttggccatagccgcgagaaacagcctctctgcactagtaatgccgtccagcgctggagcgcatacggcatcgtcgaaggcgagcagcgcatcggaaacaccggtcgacacgtcgtccgcggtaatgacatttgaacctcgacgttgtgtggattgccacatgtagtagccaacaagctgcaccatgtacgggtatccttcagactggcgagcggcttcaagcgcatcttccccactgatggtcttgccggaatccgcaactgtttccaggaacgcattcttgacgtctggaagcggcacgttatccaattcgcggcgtagcgcacggcgcaggaatgtggttacctcgttatccagcaaatcgttgatcatatatggcaagccggcaaacacgatggcaacgcccttcttatcctcatcaggcgtatcactttcatcggcatccgtaatgacgtgctgcacggctgtagcaatagccaccaaatcatcatgcgaggccgcttgcgtctcatcgatggtgatgagaatgcccttccccttgccgagtttcttactgcccagccgcttgttcaacgcgttgcgcaacgtcagcggattggattccgcggaaaagtgcgcttgcccgagactcgccgtggcaatgccggaaattccaatggaaggactgatattggcctgatccagacgcaatcccgaaggcgataatgccgctatgagtctcgtgaccagtcctgcggacgccgtctctccaatgacttcccaatgctgcgctttggcgatgcgccgaaattcggtgagcataaccgtctttccgaagccgcgctgcccggtgaccagcatgatgcgcccaggagcccctaccccgttggtcagcgcctcggaaaaatcttcgataatggagtgccggccaataagaatcggcggcattttaccggcggttggtttgaagggattgactgccatgaccacactcctgtccacaacacataccatctgccacgattgcgtaccatattacacgattgcgtaccaaattacacgaaattacaccatatgacacgattgcgtatcattgcgtactctttcacaccatcacacacgtcaacacacatcacgcctcacatagccagcgcagctagcaaaccctgcccagccagcacaccccaatttgacgtgccactcccctagagttgaagccatgtcacttggtttgaatatcctcctgatttttgtatttctcgttatcggttccgtgttctccggcaccgagttggcattggtctctctgcgcggctcgcagatcgagcaaatggagcaggaggacgctcgcggcgccaaagtcgccaaaatcgcacgtgacccgaacaccttcctctccaccgtgcaaatcggcgtgacgctctccggcttcctgtccgcctcgttcggtgcctcctccatcgccccctacctgattccggtgctcgaaagctggggcgtgcaccccggcatcgccggcggcctggtgaacatcatcctgaccctcatcatctcctactgctccatcgtgatctccgagatggtgcccaagcgcatcgccatgcagcgcaccgagcagatcgcgcgcgccgtggtgcccgccatcgacgccttcgccgccgtctgccgcccgatcatctggctcatcggcaagaacacgaacggcatcgtccgcctgctcggcttcgacccgcagcagaccgagtccgaggtgtccgacgacgagctgcgcgtgctggtcagctccaacaccaacctttccaaggacgaacgcacgattctggacgatgtgttcgacgcgtccgaaaccatcgtcgccgaggtgatgcgcccgcgtgccgacgtggtcttcatcgagggcgaccagcccttggccgaggccgccgcgttcgtacgcgaccagccgtactcccgttacccggtgaccggcaaggatttcgacgacgtgatcggcttcgtgcatgtgcgcgatctgctggacgtgcgcgatccgaacgccaagatcgtgcgcgatgtggtgcgcgaaggcatctccctgcccggcacctccaagctgctgccgagcctggaactgctgcgtaagcgcggcatccatctggccgtggtcatcgacgagtacggaggcacggacggcatcgtgacgcttgaggatatgaccgaggagcttgtgggcgatattcgcgatgagtacgatctgcccagcgagaagggcggcgaacgcaccacccgcaccgcgttcgtcaatggtgtggccacgatcgaggccagcatgaccattgaggacttcgccgatctgaccggcatcgaattggaggacggcccgtacgagacggtcgccggctacttcctgtccaagaccggcaagatgggtgcggtgggcgacgtgctgcattccgacgacggctacaacatggtcatcaccaaggtggatggccgccgcatcgaaaccatcgaagtccgcaaagccggtgccccggaccatgcgccactgccagccgaatcacaaagcgacgatgccaactagccacgtgatattcaccacctattcgttcggcccggggcataaccaaaaatcgtagaattatatggacaggttccacctactgaaagaaggaacattatgacacttgcatttgttgtgccgggccttgatgaagcggccagtgagaaggccatcgccatcctgcagaaccgactgagccaggagcaggaggccgctctggtcctgaagcacgcacactggaacgtgaccggcccgaacttcatcgccgttcacgagatgcttgaccccgaggtcgaggccgtgctggctcaggccgacgagaccgccgagcgcatcgccactctgggcggcaccccggacggccgcgcggacgccatcgtgcgcaaccgcacgtggaagtcgttcgacgccgagggccgtgtgggcaccgaggagtatctcaaggcgctgatcgagtactatgacgccttcatcgccgacgaccgcaaggccatcgccgagctggacgagctggatgtgatcagctccaacatcatccaggaccacgtgcaggaactcgaaaagttccagtggttcatgcgctctcacctggcataagtaaaagcagtattacgtggctcccctcaaagaggggagccactttcgtctcacgtgaaatagagagtctccacatacataagttggaaaagtgtataaaactccccattttgaggttggaaaacgtagccaaaaccgcattcttatggttggaaaagtgtaaaatatgcgctataaacagttggaaaacgtgcccaacatagatgcaaggcctacaaatgactggagattctcatgctgcgaagaaaaatcgagacacagctggaagcttggagatccgcgccgaaacgcactgcactgctggtcaccggagcccgtcagattggcaaaacctatatcatcaggcactttgcccaacagcattacgaccatatcgccgagctcaatttcatcgagaaccccgacctcgttgcattattcgatcggccccgcgatgccaaaaacctactgatgaggctggaactggccgtaaatacgccattagtacccggcaaaaccctgattttctttgacgaggtccagcgttgcaaggaaatggtcaccgcaattaagttccttgtagatgatggtcggttcgattacgcgctttccggctcgctacttggagtcgagctcgaagatatacgatcggtaccggtcgggtacctgaccgagctggatatgtatccactggatttccaagagttctgctggtcgcagcatatcggcaacgacgtattcgatatgcttgccgaatgctttgccaagcaccaggaagtggatgagttcattcatcaaaggctcatggagctatactccaaatatctggtcatcggcggcatgcctgccgcagtcgactcgttcgtggcaaacggcagcgttgcggacgtgcgcactatacaagagaacataaagcgtgaatatcgccgcgatatcagccaatacgcgcgcaaagaagaccggctgcatatccgcgctatctacgatttggtgcccagcgagttaaataacccaaacaaacgctttaccttcgccaaaatcgaaaagaacatgagattccaatcggttgcttccgatttcgattggctggtcaatgcggatgtagccgtcgccgcgtacaacgtggacgaaccgtgcacaccgttggagatgagcaaggaacgtaacctcttcaaactcttttacaacgacgtgggtctgcttaccggctcgtttctcaagaaaaccgcgctcgacgtactcgacggcaaccctgatatcaactacggttcaatctatgaaaatgcggtggcccaagagctacgcgctcacggatttgacctgtactactacaacagtaagaagcttggcgagctcgatttcctcatccaagaccgcaacgatcacgtgctgccgattgaggtgaagtccggcaaatcctacaaacgccatcgcgcaatggacaacgtgctcgcccaccctgaataccatctcaatacaggctatgtgcttggcccgtgcaacgtctcagtcgaagggaatgtaacctacctgcctgtatacatggccggcatgttccataacgaatgacgggccgcacacttagtcaacaagtacatgtcggtcagatggttcggactggtcagagggcccgctctgatcagttaggtcggtctgaacggactggccgggctggtcggcctgagtagcccgtttggaccgatccggttcgcccttgctggccttcacactgcttcagctccagctgaagttcgctgatgcgccgttcgagttcgtcgatgcgccgtacttgtggcgaagtgagactgaggggagcctacaaaatgctcacaggccgagggcaccggccacggccatggcctcgtgttcgggatcggcctggccgatgtgtacgttgacgtgaatttcgccatcgcccggctcttcgagaatgtcggactgggattgcagcatgctcggcttcatgaagtggccttggcggtgggaaaggcgttccatcacctcgtcgaatgtgccctgcatgtagacgaacaccacgccttgacggcgcagcttgtcgcggtagatcttcttcaacgccgagcaggtgaccacggcgggctcgccggtggccacgcgctcgtcgatccacgcggcgatggtgtcgagccaaggccagcggtcttcgtcggtgagcgggtgtccggcggccatcgagatggtggcgcattcggaccatgcaaacgaatccgatcaggccatcagccacatcgccggcactgaagcctgacccgtcatcgtcacagcaccacgcggcggttgaggtcgcggcgcagcgtcttccagccgggtaggtaggcggtcatgcggcgttggaatccggcgccatggccgctttcccacagatgcgtcatctcatggaccaagacgtattccaggaattgcggttccatcaatcccaattgaaggttcatgcggatgcggccggttcgcggcgtgcatgatccccagcgcgaggccatgacccgtagcgtgatatgtgtgggctgccggccgatgaccggcccccacttggccagcagctgtggcaacgcggcgttgatcgcggccgccgcttgtcgtttgcgttcgtcggtccagatttgggagcggtcaaaatacggctggacgttcgtaccggcttggcccggcccggcgtcgccgattctcggacgactgatatcaccggttttcggacggccggcaacgtctccatcatggccgctggcaccagctacgccacgacctccgttctcgaagcctgcaccctcgttcaatgccatgatggagcgccgttgcgcctcagccatgcgctgctgctgggcgagaatccacgaatgtcgctctttgacgaaatccgcgatacgactctcgctcatccgcatcggtgcggagatttcgacgcggccgctcggcggtttgatgcgcaaatacaggtttttgatgggtttgcgcgtcaggtgcagatggatgccgtcaatgtccaacgactgcccggcggcagcggaccgaacggatttcggcgcaccggacttcggagcggtggattgacgacggcgataaggcatgcaagtcattcttgcacaacggcggacaacaagcggcacacaatgccgcccctcacgaatcggcaaccggcgctgctacattcaatccgcataccaactgcccacaccggagaaggtcgcgcaggagaaggcctcgctgctcgagatcgacgacagcttccagaagatcgtcctcgtacgcgacgtggtcaaacccgtccgcgacgaacacggcatcctcacgatgagcgtctacgatttcctcctcaacccggacagcctgacgatgtgacgccggatggccggcaaatgccccggaacgcagaccccccccactcctcgaacaccgccttcgcggtggccgaggacaccatgacgagacagccgagcatgatggcacccagcagagggtgccgaagttcgcgatgacgtactgccacaggtccgacccgtccgtgtagccgtcgaagcgcagcgcctcgacggggacgagaaatccgtcaagcgcatgcgcggcgtcagatacaccgtcctgaagaaccccggcaagctgaccgacagacggtccgaggcgtccgggaacctgcggggcacggcccccaagggccggccctaccgttcatgacggctcagggaacccctccggacgatgcccaaacgaccggccgaccaggccgggaccgaactggaccgccgggtgttccgggcgtcccacagccgcatccccgagatcgtcga

SEQ ID NO: 3132 - DNA, 5752 bp, Unknown
  R215_18m  MAG No. k141_37621
catgatgttcgttgtcggatttctcggtggtttctcaacattctccacggcgctcaacgaagtggtttcattgattcgccagcgtcgttttacgctggctctgggctatggaatagcaaccgtcgcggtgcctctcatttgtgtggccgccggtttcggcattgcgctgcttgccaatccggcgtaattttcacgttacacggacggtcgctgagtaacgtgaaagaaatctgagcgcaaccgcgcaagctgtttcctctcctacgttgtgaaaacaataagagaggaaaaaccaatgacagccgtaacgtatttcacacggcatcgtcgaccgggaatcgcaatgctatgttcgatttttgccgttctctcgatgcttttcgtactccctcccgccattgcgtccgcagccggcaccgctcaagccgtggatgaatgcaatccgacatccgacaacggttgcgtcaacggcattctgcaggatgccggcaaacagccgatcgccggcgccaccgtcaagttgtccggcaaggctacggcggagaccacaaccgcagccgatggcaagtgggcgttttccgttgccgatgatggcgactacaccgtcacgattgacgatgccgttgcgaaagagcatggcctgaagtcgagcagtgcgacggtcaccatcaagaaagccagcttcgacaagcagcgcggcgtcatccgcttcgatcaggccgacgataccgctggcaacggcgcggccgaatcggcggacagcaagcaggggacggcggatgcagccggatcggcggacgccgcagcatcgtcagccaaaaaaggtggctccaatatcggcaaacgtatctggcaacaactgtattccggcattatcttcggtctgatgctgggcctgatgtccgtgggtatgaacctcgtgtatggcactaccggactgcagtccttctcccatggagaacaggtcacgctcggcggcctgatggccttcgtgggcacgcagatgctgcacatgccgctcgtggcttccgccatcttcgccgtgatcatcggcgcgctgaccggcttcatccaaaacgagatcgtatggggtccgctgcgccgccgccacgtcggcaccatgcaacagatgatcgtgaccatcggcctgtccatggcgttgcagtacacgttccagttcttcttcggcggtgacattaagggtatcgtcaaatccgtgccgaacagcttccaaatcggcccgatcaccacggacatgccgacgctgctgtccgcgctcatcgccatctgcgtgatcgtgggcgtcacactgttcctctacaagacgcggctcggccgcgccacgcgagccgtttccgacaacgcggcactggccgcagcgtccggcatcaacgtggatcaggtggtccgcgtggtatggattctctcgtgcgccatggccgccctatccggcgtgctcctcggcgtatacctcaacggcatctcttggaacaccggcgcgaccctgatcctgctgatgttcgccgcggtgacgcttggcggcctcggcaccgccaacggcgctcttatcggctcgttggtcatcggcatcgtggcggatatgagctcgctcgtcatccccaacgacatgcgttacgccagcgcgctggcaatcctcatcatcgttctgctggtgcgcccgcagggcatcttcggcaagcagcaaagggtgggctgattcatggatatcatgacaatcatctccaacgcggcgggcgagctgatcgcccccaccacggcggcatatgttctcgccgccatcggtttgaacattcacttcggcatgaccggcctgatgaacatgggccaggcgggcttcatgctcctcggcgcctacggattcgccatcacgcagtcgatgggctgcaacctgttcgcctcggtctgtgcggcgctcgcgctcgccgtcatctacgcgctgctgctcggcattccgacgctgaagcttgggcccgactatctggccatggtcacgttggcggccgcggaaatcatccgcatcgtcggccgttccacagccatgacgaacttcaccggcggttccgcgggcatctcgccgcaggatttcactgaaaagttcgaagcgctttccccactgcccgacggctcgaccacgttcctgctgtggacgtacagcaacaacatcgcgaattcctggtggctgcgtatcgtggcttggattttggttgcgatcgctgcgttcctgtgctggcgatggttccactcgccgtggggccgtatgcttaagggcattcgtgaggatgagaatgcgattcgttcgcttggcaagccggttacgaaatacaagatggaatcgttgattttgggcggattgttcggtgcgatggccggcatcatcttcgttctgccgcgctccgtacagcccgattcgctcggccgtacagttacgttctacgtgtggacgattctgctgctgggcggcgcggccacgattctcggtcctgtgctcggctcctgcgtgctgtgggtgctgctcaccttcgtcaaggaggttatgcgcaacaccgttcccgaaaccctgatctcctccaatcagatcgaagccctcggctgggtgatcgtcggcgtggcgctgatgtgcctggtgatattcagaccccaaggcctgttgggcgaccgaaaggagttggctttccatgcctgatacaacgaataccccgaccaccggcgcgcagcagctatctggcgtgcagccgggagtgccgttccatgacctgaccaaatgggccaccaaagcgccggaaggcgagaccctcatttccacggcctaccgtgacaaagtcaccgaggatttgaaatttgtggagaacaagccgggtgtgcacaagcccgatccgattctgatcgccgatgacgtgacccgcaagttcggcggcatgaccgccgtggacgtgagtcatttcgaaatcgaaaggcatggcatcactgcgttgatcggaccgaacggcgccggcaaaaccacgttcttcaatctgatgactggtttcgatatgccgaacaccggcacttggcagttcgacggcaaggacatggcccacgtgcagcctgaaaaagtggcgcggatgggcatggtccgcaccttccagttgaccaaggtgatgagccgtctgaccgtgcttgacaacatgctgctcggcgctcccgtgcagcctggtgaaggtatgttccgcgcgctgttccccggcatgtggaagaagcaggagaaagcgaatattgagaaggcggaagcattgctggaacgttttctgctgatcaaaaagaaggatgattatgcgggtgcgctttctggtggtcagcgcaagttgttggaaatggcgcgtgcgttgatgtccgacccgcagttggtcatgttggatgagccgatggcgggtgtgaatcctgcgctgaagcagtcattgctcgaccacattatggcgttgcgtgaagagggcaccacggtgctgtttgtggagcatgacatcaacatggtgcgtcatatcgccgactgggtcaccgtgatggctgaaggcaagatcgtggccgaaggccagccgaagagcgtgatgaacgatccggccgtgatcgacgcgtatctgggagcccatgcgaatatcgacttgggtgacgactccgtgctggaagatttgaaggaggcctgaaatgagcgacaacgcaagtgtggcaagtgcggctggagtgtctggtgcggtctcggtaccccatgtgtccgattctggtgaatcggacatccaaggtggcggagacaagccgctgacccgcgcgcagattcatgtgggtgagccggaaggtgagccactgcttgacgcggtggatttggtggccggctaccttcctggcgtgaacatcctcaatggcgcttccctgaccctccatgaaggtgagatcgtcggcattattggcccgaatggtgccggcaagtccacgctgctgaagtcgctgttcggcctggtacatatccattccggcaagcttctgctcaagggcgaggacatcaccaacctgcgtgccgacaagctcgtgtcccgaggcgttggcttcgtgccgcagactgaaaacgtcttccccagcctgaccatcgcggaaaacatgcatatgggcgctttccaggcgccgaagctgttcgaggagcggttcgactacgtatgctccatcttccccaagctcggtcagcgcaagaaccagcttgccggccagctttccggaggcgaacgccagatggtggccatggcccgggccctgatgatgaagccttcagtcctcctgctggacgagccttccgcgggcctgtcgccaatgcttcaggacgaaaccttcatccgcgtgcgccaggtcaacaaggccggcgtctccgtggttattgtcgaacagaacgcccgccgttgcctgcagatctgcgaccgtggctatgtgctcgaccaaggtcgcaacgcctactccggcaagggccgtgatttgatgaacgatccgaaggttgtctccttgtacttgggcaatctggaagaggaggtccaggaagagggcaggtagccccggtaaatcgcagagcggagcgtataaggcccgtcatcctctccgctcgaagcgccttcgtgtgctttagagtgccttagaactcggatgtcggtctccgtacacgttacgcgaccccctacgagccggaatttctggctctgaatcaagtttccgccggtggggcggaatacccccgccggcggtttcgccatgcctgaaaaatgacacaaatccttgtgtttccaacagttttcatacttcatctccggttaacttcacgcatacacgttcggtttcctcgcagcctatagtgcacctcaagatgttcgagcaacctatctcggcaatcgtcaccaagggttcggcaatcagcggagccaagagaggaaatggtgattcatatgaagaagacaaacatgaagggcatgaaaaagctgtccatcaccgccaccgcagtagtggccgccgcggtcatggcgctcgccggctgtggctccggctccggaagctccagctccgacgcatccgattccggtgccaaaaccaccaagttcgtgcttggcggtctgtggccggaaacaggatccctggcctatctggcaccgcctgaactggccgccgaaaagctggcagtcaaagacatcaatgacgctggtggcgtacttggcagcaaggtcaccaccgtggacgccgatacgtccgacgccgaccatgccgaccagaacacgtccgcggctcagtcggtgttgagcaagaatccgtcgttcattattggccccgcttccagctccgtggtgaagaacacgtacaagtccattacttcgcagaatattccgatgctgtcgatgggtgccacttcggccggcttctccggcctgtccgactacttcttccgcacggtcgctcctgatactgtgcagggtgcggttatgggtaatctgatcgcgcaggacggcgtgcagaagctcgccatcgcggtcttcaacgacgaatacggcaccggtctgcgcgacacggtcgtcaaaaccgcttccgcggcgggcgtcgacatcgtctacggcgaaaaggacaccttcgatccgaccgagacgaacttctcctcaatcgccaccgccatcaaggcgtccaaccccgacgcgacgctcgtcatcgccttcgaccagaccaagccgttgctcaa

SEQ ID NO: 3133 - DNA, 3352 bp, Unknown
  R215_18m  MAG No. k141_41279
cgccgtgcagctgaccgacgaacagtaccgcaatatccagagcattctaggcaagtaacaatcaaataagtctgaagacaagcaggagcagctatgctgaaagggataccgtcgatcatacagcccggtttattgaagattctcagtgaaatgggccatggcgatactatagttctcgcggacgcccattttcccgctgagtcattggggattcattcccatgtgatccgatacgacggccagcccatcgagccgctgctcgacgcggtgctgcagctgataccgctggaccaatacacggaacacccggtgctgctgatggacaaggttcccggagacaccgtggacaccccgatatgggaccggtaccgtcaggtcatcgacaggcacgagcccggcaagcaagcgggcatcgggatgctggaacggttcgccttctacgaggaggccggcaagtcctattgcatcgttgccactggcgaacaatcgcagtatgcgaacatcatcatcagaaaaggcgtcatacgctaacaccttaacaggagtaacaatgagtaattcaaccaatgagggcatcaacctgaagtatctggcgaatgtgcgtccgtcatcgcggcagcttacctggcagcgcatggaaatgtacgccttcctacacttcggcatgaacaccatgacggacagggagtggggcctcgggcatgaggatccggcactgttcaacccgcggaacgtggacgtggatcagtggatggacgcgctggtggccggcgggatggccggcgtcatcctgacgtgcaagcaccacgacggattctgcctgtggccgtcccgattgacgcagcacgccgtcgcctcgtcgccgtggcgtgaagggaagggcgacctcgttcgtgaggtcagcgagtccgccaagcgtcacggactgaagttcggcgtgtacctgtctccgtgggaccgcaccgaggagtcctacggcaagggcaaggcgtacgacgacttctacgttggacagctgaccgagctgctcacccagtatggaccgattttttccgtctggctggatggtgccaatggtgagggtaagaacggcaagacccagtactacgactgggatcggtactacaacgttattcgctcacttcagcccaatgcggtgatttccgtgtgcggccccgacgtgcgctgggccggaaacgaagccggacatgtgcgcgacaacgaatggagcgtcgtgccccgtcgcctgcgttcggcggaactaaccatggagaagtcgcagcaggaggatgacgcatccttcgccaccacggtcagctcccaggacgatgacctcggaagccgtgaggcggtcgccggatgcggagatgacatctgttggtatccagctgaggtcgatacctcccttcgccctggatggttataccacaagtatgaagatgacaaggtcatgagcgcagatcagctttttgacctctggctttccgcggtcggcggcaactcgtcgctcctactcaacgttcctccctcgccggaaggcctgcttgctgaaccggacgtgcagtcgctcaagggattgggaagccgcatcggcgcattccgtgaggcgttggcttctgcccattgcgaagccaagaccagtagcgcatccgcggccgcggcacatctcgttgacggggaccaggacacgttctggcaccctgatgacgatgatgatgcccccgccatcacgctcacattcccgcggcccacgacaatcaacgccgtcgtaatcgaggaggccatagagcatggtcagcgtatcgaacagctgcgtgtcacaggcacgctgtctgacggtaccgagcgtgtgctcggccaggccggcacggtgggctaccggagaatactccgctttgacgatgttgaagtatcctcggttaccctgcacgtggacggttcaaggcttgcgccaatggttagccgtgcggctgccgtgcgtatctaaggacgtataaggcggtatcacaccatgaaactcacttttgatggattctcctcgcattgggaggaaggaatcccattcggcaacggtcgcatgggagcggtcctgtgctccgagccggcagcggacgtgttgtacctcaacgacgacaccctctggtcgggctatccgcatgcggaaacctcgccgttgacgccggaaatcgtggccaaagcccgtgaggcttcagcacgcggcgattacgtgtcggccacgcggataatccaagacgccacgcagcgagagaaggacgagcagatatacgagccgttcggcatggcccgcatccagtattcgtcgaatgtcggcgaacgtgggaatgtgaagcgcagcttggaccttacgaaggccctggccggcgaatccttccagctgggtgccgccgacgtccatgtcgacgcatggtgcagcgctcctgatgatctgctggtgtatgagatgtcgtcgagtgagccgatcgatgtgtgtgtgagcatcgccggcacttttctcaagcagacacaggtgtcgttagggtctgatgtcgatacacgccgagccacgctcatcgtcatggggcagatgcccggacttaacatcggagtattggcccataccactgataatccgtgggaggatgagcgagacggtactggaatggcgtatgctggcgccttcgtcatcactgtcacgggcggcgacattacggtggaccatgatgctttgcaatgctcgggcattaccggtctatcgcttcgattccgcagcctgagcgggttcaagggaagcgacaagcagccggagcgagatatgacggtgctcgccaatcggttgggtgagaccatcgctacatggccgtccgattaccgggcgatgctcgaccgtcatgtcgccgactatcgccagttcttcgacagggtcggcgtgcgtctcggcccggcccatgacgacgacgaggaggtgccgttcgccgatatccttcgctccaaggagaagacaccgcatcgtctggagatactctctgaggcgatgttcgatttcggcaggtacttgttgatttcctcgtctaggccgcatacccagccagcgaatctgcagggaatctggaaccataggaactttccaaactggtatagcgcgtacacgacgaatattaacgtcgagatgaactattggatgaccggtccatgcgccctccaagaactcatcgagccgctcgtctccatgaatgaggagctgctagtgccggggcacgacgccgccgacaggattctcggttgccgagggtcggcggtcttccataatgtcgatctatggcgcagggcgctgccggcgaacggcgaaccgaca

SEQ ID NO: 3134 - DNA, 6883 bp, Unknown
  R215_18m  MAG No. k141_42498
agacactcgcatcgtgttcactatcaccaacgcatcgcccaccgaccccgacaccggcgaaggcccctggtacaaggcaagcgagctgaaccttaccgaccagctcgtcgccggcgatggccagatcggcgagttcgtgtatcccgacgactggcagacgctgatcctcaagcctggcgacagcgtggaggtcaaggccaccctcagtgatgtgaacgagcatcacaccgaccgcgccatcgtcaccggcacgccgctcgtccaatgcatcgtctccgaccccgaccccttcgacggcaaggacgaggagaagctgcccgaggacgcggtggagatcgacgggcgaaccctgtgcgcggacaccaccgtgaccagcaacaccgacgactggaacggctaccagcccaaggacaatctggcgaccaccggcaccaacatcgccggcctcatcgccgtcatcctcgtcctcgcgctcctcggcaccggtgcaaccgccgcgatccgcctcacccgcgccaacggccgccacaccgggcacgagaacgacgcgaatgatgatggcgctgactgcgacagcagtcccgacaaggacagttccgagccggacttcgcccaactcatcaccaccatcaaccccaaggagccgcccacgaactgatgtgccgttttctgagaccgccgagtagaacctttgtttagcgtcctactcggctgatttcagacaatctcccgcgtcctgtgtattttcatttcgcttaggcacaaggcctcggattcgacgaataaggcggctcgggtgccgctgtcgatacgagccatatcacaatctgccatatggatacaattgagaaccaatatataagcgcaattgaaacatgattgaaggcaaggaatgggtaaagccatagagccgggagacattgcaagtatggggagcatgttgacggtttcgcagtttgcccggttgcatgatgtcaacacgcggacgttgcattattatgacgaggttggtttgttctcgcccaggagccgtggcgggaacggctaccggtattacgatgcctcccagagtctggagttcgaatacatccgtatgctgcgggacctaggcttcggcgtggaggagatcaaggactatgtctcccattccggggaacggcgtttcgttgcggtgcttacacgactgagggccgaggtgcgcgagagaaaagagcgtctggaacggctcgaaaaagttctggatcggaaggccggatatctggcggattgcgaatcggtgtcccaggatcgcgtcgaggtcgttcacaggccggagacgcaggtgctgacgatgacctcggtgcatgacggtgaagacaccttggagttcatgcagatggtcaaacgacggtggggtctcgaccgcctgcgttccggcatcggcagtttcatcgccgtcagaaatgttaggtcaggacggttcgaccggtatgacggtgtgttcgtcgccgatggcggcacaggccatgcggcggagccgggacgagcacagacggatgaccggtccgccatgactttgccttccggggaatatctctgcggctaccaccggggcgtctggtccggtcttcccgacctgtatcgctcgatgctgcgatatgcggatgggcatggcctggagcttggcgactatgcatacgagcgtggtttgaacgagttcgccatctcctcgccacaggactatgtcacgcgaatactcatccccctccgaagctgacgtcgcttccatcgaacgttccccgcgcgacacgcccgaaagacacgcgcacttgaccttacactcactgtaaggtggacgcttcttcttgcatggatttccgaaagacggcaatccggaaaggagcaatcatgggcgcgtgcagtagtttcacgtgttcttcgaccgacggcaggcattttctggggaaggacctacgatgagtacggcaccatcgatgcaaacagggtcgcggtcatcccgcgcggccattcggtggcgctgacgttcaccggtgacgaacggcaggccacggattacgccgtcgtgggcatggacgtcgccatgttccccacgccgctgctcacggacggcgtcaacgagcacggcctcatgggcgcgatgctgtacttcccgcattattgcaagttcaacaccaggcgcgcggactatgacgtcaacgccggcctgctgctgccgttcgtgctgggcaaggctgcgaacctcgacgaggtggagaagctgctgaagcatgtcaatgtcattgacgagccctccaccggaatgacgctgccccaccactacatcttctccgatccaagtggggaggccattgtcgccgagcctctcgaaggcgggctgaaggtctaccgccacacgatgggcgtgctgacgaactcccccgatcacaactggcacctgaccaatctcaacaactacctgggcacatccaaccgggccaagccggcccagctggtcaacggccatgagatcagcgagatgggcgagggcagcggctggttcggactgccgggcgactacagtcccgcttcaaggttcgtgcggctatccttcgcgaaggactgcatgcccgagccggccgacgagaccgacgcggtcaccaagatgctcaacaccttcgccacggtcgacgtgcccatgggcatcatgtacgacccggacgaagcggccccgcattacgagcagacgcaatgcaccatcatcatgtgcgcggaaagcaaacgctactacttcacctcggcgaccaattcaagggtatgcgtcgtcgatctcgacgaagaaatatcggagggaacgaccgagctcaaactcatcaagccgcccctgcaacaggacatcctgcaactgaaataatcaaaccccactattcgtcaaaggaaaagtcatgctaaaaagaaaagccatcaaccttcttgcgattctaaccgcattggcgatgtgcctatgcgtaatgattccaacggaggcaagcgccgcccctgtcgactattcatccattccgtccagcgaactgcccgcatcccttggaggaaatcttcacggcaggaagacggaatcgatcgatatcgaaggcaagggcacgcttcaggcaacggccgattacgacaacggcacattccaaatcatcgacttcgatggaacggtgcaggaaatcccccttcagcaagcagtcgagcaaatggcgaggcagttggaggggatgagcgaggagcaactgcaagaaatggccaatcttgcagacacgccgcaactctcacgctcttcgaacagcaccctatgcaaagtcgccaccgatgcggctaagctgatccagagcggcgctatcagcgcagctttgaaactcatcggtaagcaccccatcctaggtgcggtgattaagctgggaaattccgcattctttgcatggatcaagagccattgctgagagccttcattgaagcggtcttccccgagactgtttcaatccttatatgtgtgctgttgaatgctgaaatgtgccagcattcaacagcacgccaactgatacaggccaatttagacgacgcatatcttagagctgaagtatcgagcattacctccatatttggataaggtgacaatgagcgaaatgagcaaggcagacttgcagattgacattgactggcattctctgaagcccttcaaagctcctggccggttgttcgcgtcacgggcggatgcggcgatcagagaggcgttccctgatttcactgcaatctggagggcccgcgcctcttcctcattggattggaaggatggcgtgtgggttgtggcatctaaccttgcaggagacatgcttggtgcactaatagacgcgatcgacggtcttagactcggcggatggattccccggacctattatctgctggaacgtaatgccactatgaaacttgccgttgtcgcgcgccgttccgtgcgtttgtgcgacaagctcaccggtcccgacctcgcggaggaatacaccgatggaaacaacacatatgccaagctctaccgagttcgataatccgtccatttgtaagtgcaacacttcgttcagactgcaactttaactgttcgtcagtgagcagctcgtccgcgacgacatcttgatgagacaatcccgaaccgggctccacccaattcgtcacatcaatcccaaggagtcggccgtgggtcaattccggctatcggtatggccggattgggcacccgttgcgcttcgtccagctgatagccgacggacaggtccgcaagttgtcttgcgggctttctaatacccgccaaacattcctactgtcagttttgtcagaaaaatgataggatgggaatgtttcatggaacaaggttgaaggagatcacaatgggtgcagtgctggaacgcccgcacgccaagggcaccacggttgagatgggcagtcgcgcgctggtcggtgccgacggcggggtgaccgagctggacatggaggcttacgaggccgcgttgaacgcggcgatgggcgtcatgggccgccatcgcatggtcaccacggggcaggccgccaagctgcttgattgttcgccccgcacggtggcgcgcatcctggactcgggacgcctgcccttcactcgcaacggggataccggccggcgtttggtggatgtggttgatgtgatggactaccagcgtcaggaacgcgaacgcatgcgttcctcgttggtggccatgcgccgcgccgcgcaggagatcgcgatggacgacgccgagctggccgaatacgtcgcccagttcgactgaaaggcatgctatggccaagcccgtcgccctgctggacgccaacgtgttcccgcccatgtggctgctcgacatcctcctgaccctggacgagcacaacgtcatcgacgcggtgtggtccgaacgcatcctcgatgaggtatgccacacgctggtcgaacgacaacggcgcgatccggccaaaacgcggcgattcctcgacaccatgcgaaccttaaaccccacgcattgcgtctacggctgggaaccgcgcgaatccacgctcgatctgcccgacccggacgaccggcacgtgctcgccgccgcgctggtcgccgacgccgactacatcgtcacctacaacctcaaggacttcccggcttcgcagctcgccccatacgccgtcaaggccattcaccccgacgaattcctctgcgccatgctcgaccatgatcgaaatggcgtgctcgccgtcatggaagaggtcgtctccagcaaggacaatccgccacgcaccatgagcgaagagctcaaccacctcaaggcattacgactgaatgcgttcacaagtcacttgcgggaaactcaggccagccgcaaatgattcaacgccactaaacaaaaaggactcttcgaatggcggttatctggcaaagcatccttctagggcgtgagtcgttgtccaattggatgacggtatcgaacggctatagcccaaagtgggaggaatcggaagagttcggttccgaagcggtggacgatgtaaaggatttcgcattccccaaaggcacgcacccggttttcctagtcagcgatgacgctattgtcggcgtttgcctgatgacttttctcagaagaatcgggaagctgaaacatcaatacagatttacggatttccatatcttcgcccatcccattgaagtgcaggaagtcgtcgattcatcagaccatcacgtaagcaagtgggtaagagaaaacctttcgcaagaaagaacggtaagcccgggcagcgcaaaacaaatattgaatgttttaagcgagaaggatcaagatttctccaaaattcaagaacagctggaagaaaaatccagaaaagcaacgcccgcacgtctttcccaaaatgagattgaatcgcaggatgcgacggaactcgcatgcaggtttgctggcgtggacgaatcctgggaaaaggaatcgaatcccagcatggcgttcatgcagcccttgccgggaggaagcgaggcttccgccatccgtcacgattggcgtgcattcaatgactggatagaggaaaacgcgcctacgctggatatgacggcctatcgagacccattagaccccaatcaccacatctgtatttggtatgcggacaaggagaatgcggaacgcataacaggaaccgatctaatctattgccagcatgacggcaataattggacggatcttgtgatgatccaatacaagcgtctcgacgaagaagaacgctatcgcattgacagccaagcgcttaaagaaatccgcagaatggaggaactggaggaatcgttaacttccgagcctgattctgaataccgattcaacgacagccccttcttcttcaagttcgtcgataccaatcgacgaccgccacagaataatcagctcgttccggggcactatgttccccttggcatagtgaaaagatacatcggctccgaagcctataaaaagcgcggaggaaagaccttgcataaaggttctttcgcccatctgaccaatgacacgatgatcactctgatgacagaccattggatcggtaccaccaagatgggatcccggtcattgctgtcattgatttcgcaatctcgccggaaaggccggacaccagtcattgccgccaacatgctctcagccacacatcaataacaaagccatgtaaaacgcatccaaattacttccacaccatcaatcccctgttgtccgccgctgattccacgggactgcacgaggatggccgtatgcgtaggcatggcggtgggccgtgccgttcctgtgcggaggagtgcggctgtggatttgatgaaccaggtgctggagttgttcgtgaagttcgcgac

SEQ ID NO: 3135 - DNA, 12825 bp, Unknown
  R215_18m  MAG No. k141_44249
atgttctccatctacgagcagattcagttggccgccataccaggcatcaataccacgatcaaggacaagtatttcaccagcgcatccacgactccggcccgcatcttcccgattctgggagatctcgcggcgaagcacatgcggaaagcctggaagtcgaaggggctgaaagtcaagttggacaaggccctgggcgagctgaccgggagagtgggggaccgttatccctcccgtctttccctggaggaacgcggcgcattccaactcggatattatttcgaaaatcagaaacgattcgacaaagccaacaagaacaacagcgaacagggagagaacaatgactgaccgtaaacccatcgagaaccgttatgatttcactatcctctttgatgtgaaggacggtaatcccaacggcgacccggactccggcaacatgcctcgagtcgacattgaaaccggtaatggcctgacgacggatgtgtgcatcaagcgtaagattcgcgactatgtgcagacggccatgggcgagcaggccccttggcgaatctacatccagaacaggcagacgctcaaccgtctggatagtgaggcattggaagcggagcatatcgatgctcgtccagagagcaaagattttgccaaggaaattaagacattgaagaaatctgaccccacattggatttgcgtctacgagattatatgtgcagccaattcttcgatatccgaactttcggtgcagtgatgaccacattcgtcaaaggcagcctgtcatgcggtcaggtacggggtccagtgcagctcgggtttgcccgttccattgatccggttaatgtccaagaaatttccatcacccgcatcgcagtcaccacggaggcagatgccgccgacaagaacaacaccatgggcaacaaattcatcattccctatggcctgtatcgcatgaacggctacatttctgccaagctcgcacagaacgtcaccggtttctgcaatgaagatcttgacatgctatggcgagcaattctgaacatgttcgagttcgatcgttctgcggcacgcggcaatatggcggttcgtaaactgtacgtattcaaacacagtagcgcacttggtgacgctccttcgtggaaactttttgacagtatcgacgttcataagcgcgatggggtggacgttgctcgcagctttggtgattatgaagtccatgtgaaccgtgagaccattccagactccgtcaacgtaagtgaaatggtcgatcatacactgtgattctccactcaggccggggttggcattcagcaagccctggccttcatttacgcgcatcaaaaaaccaattgcacgaattgtttgcgagaggaagcgtatgcatgcacaatcggattatccagaggatgattggctggctctttctggccttcagcattttgcgttttgcaggcggcagtgggctttaattcatatcgagcagcagtgggaggataactatctcacgacggctggttctcttgaacacgatagggcccacgattacagtgaatcggaaacgcgcggcagcttgctgattatgcgtgatctgcgtgtgttttcgcggcggttgggaattaccggtgcgtgtgatgtggtcgagttccggcaatcggaggctggcgtaccgttgcatggacgatccggcacttggcttccttaccccgtggaatacaaacatggtgcgcccaagcagacggatgcggatcgccttcaactttgcgcggaggccatgtgtctggaggagatgctggcctgtgcgattccagaaggcgctttgttctaccaacagaccagacaccgggagcgggtcagttttgacgaatctttgcgcaatcgaatcgtcacgatgacgggggagatgcacgacttattcgctcgaggtcatacgccgaaggtcagaccgtcgaaggcctgtcgggcgtgctccctgcacgatgtctgtctaccgaaactggtcaggacgcgttcggcgagacagttcattgaggaagccgtgcgtggggaagtggaaatcggggagaagtcagaccacatatgaagcagttacttaacacactgtatgtcaccagcgatgacgcttacctatcgttgaagaacgacaatgtcattgtccagcaaggagataccacgctcgggaggattccactgcgctccctagaaggcatcatgagtttttcttataagggctcgtcgccggcgttgatgggcaagtgttcggaatttggcgtcggcctttcgttcttctctccacacggccgttactactgctcgatacttggtgagaagaatcgaaacgtactacttcgtcgcgagcagttccgtttcgcggacgacgaagacgcggccctgccttttgcgcagtcgttcattataggaaagatctacaactgccgttgggttcttgagcggaccaagcgcgaccatgcgctgcgcgtcaacagcgagcgtatcgcggagcaaagcgagaaactgcggcaggctctgctgaacgcgcgcgactgcacgtccatcgatgagctgcgcggcgtggaagggctggcagccaaagactatttcttcgctttcgacgacttgattctgcgcaacaaggacgatttcttcttccagcagcgtagccgcagaccgccattggatcggacgaatgcgttgatgtcattcgtgtactcgattctgaccagcgattgcatcgctgccttgcagggagtcgggctcgatccctatgtgggattcctgcacactgaccgaccgggacgtgcttccctggccttggatctggttgaagaattccgtccggctatcgccgaccgtttcgtgctgacgctcatcaacactggagcggtcaagccttcccagttcgagatccgagagaatggcggcgtgtttctttccgagggcgggcgcaaaaccgtgcttgctgcttggcagaaacgcaagcaggagacaatcacccacccgttcttcaacgagaagataccgtggggattggtgccccatgcacaggcgttgctgctcaaccgtgcgattcgcggcgatttggacgcttacccgccgttcatgtggaagtagttcttcttgggagggtactttggtcttgccgaggggcattggagtttgagccaactagagatggaaaccgggatgaggtgttggaatgatggttgtcgtggcctatgacgtcaatacggagtcgcctgaaggcaaacgcagactacggaacgtggctaaaacctgcatgaaatacggccaacgcgtgcagaatagcgtctttgaatgttcggtgtcaccgtctgactatctgattttgaaacatgatttggcggaaataatggacgaatcgcaagatagcctgcgttactacaatttaggggcgaagtattcttcgaagattgagcatcgcggaagacagcggcacctgccaatcgatgacgtgatgatgctctaatgtcggttcgtgtgacggttttccatgatgactgggcaatgcaaaaccttactgtgatgaagaccaaggtggataaaacgaggtaggacagtataggacgatacgattaaaatcgtggctgagcatcgatgcttgatgctgcagccatgtgaccagcgcgaactctgagttctcatgaaatacttgttctttcgcactgagattaatgaatgcttggagactgattatgttctcctcgtcgtttgataactcaaaagtggatggtctgttgatgtttttggttcgagaatttgtgtattgagcgatgtacatggattttcgcgataaaatcagttttgagaacagacggagcttccatattatggaatgctatgcccattctcgcggtcgcaccccactggggtgcgtggattgaaatgcgaacgtcgtgtccgcaatccatgtcatgcagaaggtcgcaccccactggggtgcgtggattgaaatctcggtgcggagcccgcatgagacggcgcagatagtcgcaccccactggggtgcgtggattgaaatgtcccgaaggatatggccggctcccaactgttgagtcgcaccccactggggtgcgtggattgaaataataatcatttattatggcttgcgattggtttaaggtcgcaccccactggggtgcgtggattgaaatcaccagatcgacccgtacaccgaggccgtgtacggtcgcaccccactggggtgcgtggattgaaatcgcgtgaaacgagccgcaaccggagagcgtcggcagtcgcaccccactggggtgcgtggattgaaatattgagattggattccagcgcattcaggttagtgtgtcgcaccccactggggtgcgtggattgaaatggtctcaaagacctatgccaccaaggacgctctggtcgcaccccactggggtgcgtggattgaaatacgaaatcgcttgaaatcaagtgaattgaataaagtcgcaccccactggggtgcgtggattgaaataagaacagattcgtaggacactgcgaaaaacaaatagggtgctttccgccatcaacagcggaaagcaccctattcttatggtattcttatgatttctctgtcctaattagagcacctcactccgcagcaatcgcggccttgagctcctcgaccttgtcggtcttctcccacgggaactcaacgtccgtgcggccgaagtgaccatacgcggcggtcttcagataaatcggacgtttcagatccagctcgtcgataatcgcagcggggcgcagatcgaagaccttgcgcacggcggcggcgatctggccgcgcgtcacgccttgctcggtgccgaaggtctccacgttgacggacaccgggtcggcaacgccaatagcgtaggcgatctggatctcgactttgtgagccaagccggcagctacgatgttcttcgcaacccaacgggtggcgtacgcggcggaacgatcgaccttggacgggtccttgccggagaacgcgccaccgccgtggtgggcggcgccaccgtaggtgtcgacgatgatcttgcggccggtcagaccggcgtcggccgccgggccgcccaggatgaacgaaccggtcgggttgaccagctggcggtagttgtcatgcggcaccttggaacccagcacctcatcaagcaccgggtcaatcacgtgcttcttcagctcaacagcaagccaatcctgcgtaacctcaggatcatgctgggtggagatcagcacggtgtccagacgaacgggcttatcgttatcgtcatactcaatggttacctgggtcttgccgtccgggcgcaggtgcggcacttcaccggacttgcggacctcggtcagacggaaggcgaggcgatgtgccaaatagatcggaagcggcatcagcgtcggagtctcgtcggtggcgtagccgaacatcacgccctgatcgccggcaccctgtgcttcgtaacgttcttcgcggctggcggcggtctcctgatcgccagtcagacgggcaacgccctggttgatttcggcgctttgctcggtgatggccaccacaacgccgcaggaatcggcgtcaaggccgacttcggaggaggtgtagccgatgttgcgcagggtttcgcggaccttggactgcacgtcgcagtaccccttggacgtgacttcgccgaagaccaggaacacgccggtggcggcggaggtctccacggccacatggctggacggatcctgggccagcagatcatcaagaatggcgtcggagatttgatcgcagaccttgtcagggtggccttcggtcacggattcggcggagataagccgatgttcttctgtcatatcatccctttcttcaggacttatcgccccgcggggtgcgaggcacaatgatacggtgtcaatttttacttgtcactgcggaagcgggcataaataaaggcccgtgccaaccagcgcggtggctcgagccttacgtcttgttcgctcctgatgatgagttatagctgattgcgataactcaggcaagcgtgtcgctcaaaatcagttgtgagagaactctcacaccatcattcggcgacgaactgtccaaacaatccaaacgaatcgtctgaatcgatcagttgccctcgttggcgtcgtcctcgcccaaggtctcctcaagcagaccctcgtcgatctcgcggaaggcgatggacagaggcttctcgttgttctggtattcgaccagtgggccgacgttctgcagcaggccctcgttgagctgcgtgaagtaggagttgatctggcgtgcgcgcttagcggcgaaaatggccagcgcgtacttggaatcggcgtgcttcatcagatcgtcgatcggcgggttcgcaagaccgtcgggtgtcgggtcagtaccaaaagccattgttcttatctccaaacattggaaaatctatctcaaccgaagcaagtgtagccgtttggggggacttctgtcagccctataccggactctcgccagaggaatgtattccaaaaaatatgtgtaagaaacgttacgtttttgcagattccattattcgactcttgacaagtggcgtgtccctcgcaaaggcttgaatagagccatgactgaaatgcgatctgcaaaaattatgtcagggcgcgtctttgcaggcgcccgagccctctaccgtgctgcgggcgtcagcggagacgacatgggcaagaagcccatcatcgccatcgccaactcgttcgatgagttcctgcccggccacgtccacctcaacaaggtcggccgcatcgtttccgaggctatcaaggaagccggcggcattccgcgcgagttcaacacgatggccgtggacgacggcatcgccatggggcacactggcatgctctactccctgccttcccgcgacatcatcgccgacaccgtcgaataccagtgcaacgcgcactgcgccgacgccctgatctgcattccgaactgcgacaaggtcgtgccgggcatgctgatggcagccctgcgcctcaacattccgaccgtgttcgtctccggtggcccgatggaggccggcaccacggtgctcgccgacggcacagtcaagagcaccgaccttatcgacgtgatgtacgccaccgccgacgacagcgtctccgatgaggaactgctcaactatgagaagaccgtctgcccgacctgcggctcctgcgccggcatgttcaccgccaactcgatgaactgcctgaccgaggccatcggcctggccctgcccggcaacggcaccatcctcgcctcccactcctaccgcaaggacctgttcaagcgtgccgccaagcaagtcgtcaagatcgctcaccagtactacgacgattccgacgattccgtgctgccgcgctccatcgccaccaaggaagccttcgagaacgccatgaccatggatgtggccatgggcggttccaccaacaccgtgctgcacatcctcgccatggcccagtccgccgacgtggacttcaccctggacgacatcgagcgtatttcccacaccgtgccgtgcatctgcaaggcctcgccgtccggcaagtgggagatttccgacgtgcatcgcgccggcggcatcaccggcatcctcggcgagctcgaccgcgccggcaagctgcacaccaacgtgcattccatcgactacccgacgctggaagccaagctggccgattgggacatcatgcgcccgacctgcaccgaggaagcccagcagatgtacaaggccgctcctggccacatcatctccccggagccgtggacgcacaccaccctgttcgactcgctcgaccgcgaccgcaccaatggtgccatccacgacatcaaccacccggagattcacgaaggcggcctcgccgtgctgcgcggcaacctggcccccgacggctgcgtggtcaagaccgccggtgttccgccggagatctggaagttccgtggaccggctctggtggtcgactcccaggagcaggccatcgaggtcattctgaacgacaccctgaagcctggcatggcgcttgtgattcgttacgagggtccgaagggcggcccgggtatgcaggaaatgctgtacccgacctccttcgtcaagggcaagggcatcggcaaacaggtcgccatgctcaccgacggtcgctactccggcggttcctccggtctggccatcggccacatggcgcctgaggctgccaacaagggcccggtggcgctcatcaagaacggcgacatcatcgatatcgatatcgaagcccgttccgtgaacgtcgaactgactgacgagcagctggacgagcgtcgtcgcgagcttgaggctggcgacggctacgtggctcaccgcaaccgccacgtctcccaggcgctgaaggcgtacgccgccttcgcccgctcggccgacaagggtgcgacgcgtgacccggagctgatcaacaagctctccggtctcaactgatcgccgattgcatagctgaaaggcccggcatcttctttatgaagatgccgggcctttactgtgcttccgaaggcgggagcgatattgcttgttatcgcacgcaggcggcgggggagaggcgtgcgcctcgggcccagtcggcggcgcgcatggccttcttgccttgcgccttgacttgggtgagttccagcggcgtgctgccggtaccaacccacacgttcttcttgcccaccttcagctcgccgggctgaagctcggccggagtgttgggattggactggtcggccggttgtgcggcgagaatatgcagggcgagggatttagcggttgactcgtcattatcggcgattggcccttccgcaaacagttcggtccatgccccgggatgtggcgtgcaggcgcgaatctgacggtcgatggcctcggcctcgtccgtccaactgatgcgggcgtccttcaccgtgatcttgtgcgcgtattccaggctctcggccggctgcgcggtgaatgtggcggtgccttcacctacggcggccagcgcatccacatacatgggcgcgccttcctcggccagacggtcaagcagttcgccggaagtctcacggccggtcagttcgatggtcagggaagcgacgatcgggccatcatccaaaccctcgcccaccttgaacacgtcggcgccggtggtcgggtcgcccgcccaaatcgcacgctgggcgggagcggcgccacgccacttcggcaggttggagaaatgcaggttgtaccagcccatgggcaccgcatcaagcacgttcttgggcaggatattgccataggcgatgacagcggcgatatccgcatgcaggtcgttcaacgcctccatgaattcgggggagcggggtttgagatcgatgacgggcaacccgagctccagagccgtcgccttgaccgggctgggcgtgagcttgcggccgcgaccggtaggcgcatcggggcgggtaatgacgccgaccacatcaaaacgtggatcggtggcaaaggccttgagcgagggcaccgccacgtcgggggtgccggcgaacacgagtttgagcatggtcctccttgaaatgtcgatgctcactgcacggccggaatgttcacgccattggcgatgagcagttcacgcagcttgaccggatcctggaaacgtacgccacggatgccggccgcattcgagccgacgatgttcatggccttgtcgtcgatgaacaacgcgccatcggccttgatgccgaactggttcaacgcggcctcgtagatttccttgtgtggcttgcgcagcttgacaaaaccggagacgagcttgccatcaagctgctgcaaaatatcgcactgttcctcggccacgtggaacagactggattcccagttgctcaggccccacacgccgatgccggcagccttcaggtcattgaccagcacgcgcgcgcccggcacgatgccggtcagggagtcgcggaagttcttgatgtagtagtcgaggatgtccgcccacttatcgcccttgtcacggcgcatgatggcgatggcctcgtcggtgctggtgccgccgtccatcaggtcgttgacatcgtagaagccggagatgtcgttgtcgaggaattcgtcgatggtcttctggctgtagcgggggatgagtacggcggccggatcccagtaaatcagcacgttgccgaaatcgaagatcacgtcggtgatcggcttgccggcgttcgcagcggcctcgccatccgcgaccagcacgtcgtaatccatatccggctctccaggccagcccttcatggtgtcctccttatagcgatgttcgttctgtaattatcgtttcacgtgttgaagacgattagatcaggtctttgggatctactcggaagcgaagctcgccgggttcgcgggacgccacatgacgagcggtttcccggtgcagtcgggccgccagctcggctcgccgactctgcggcacacggattactgccttcacccggtcggccgtggcttcgagctcccgggcgtcgaccgtgtccggttgcgcgatcggcaccgggcccaacatgccgggcagctcgccgcaggccgtccaatcgccgcccagcgcgccgatacgctgcatcagcgtcatcaccgcatcacggcgtccccatacgcaggcggcggccacggccggcggcataccggtctccacacgctcctcaagatccttggctgcaagaatcctcgaatcccagagcatcagcgattgggcgatggccgggtcggtttcgccgagaatcaacgcctggccgccacgggaacgcggcgcgcacaacgacaccgcacgcatccacgcggtcaatgtatccaagcgagcatccacgcccaacgcatacaagctggtccaagcgtcgagcacggccacggcacgatactcatggccagccgatccctgctcggcactgaccggacgcacgcgcggttcgaaaccgggagtggcgatgacgatcatcggctggcaagccacatcgcgcaccagaccctgcgtcttgctggacaaaactactggcacgccgcggaacaacccggccagttcagccgcagtgcctgcagcacccacgcgcaccacacgcatacgttcatgcccacagcccgggcacttccaattgatggcagcagccccacaccagcggcatcgcggtgtggaatcccggcggtcggccggtagttgcaacggtccagaacacttggcacaacgcgcctgacgatggcatttcgcacaactcagagtctcactgacgctgtcttgcggaatggacagcagcacggggccgctctccaaagccttagatagcacgcggacggccgtatgcggcacgcgcgccccgatggacgggtcggcaagacgcgcaagttcatcgcgattgagccaacgcacccaaggagtggcgtccttcagcggcgaggcgagcggatgaattgtggtggaatagccgctcactggggtctccactgtacctggaccggtgttttcccactggctttgcggggtgcgcgcattggccatggccacgaacacgccgccatgggacttggcgcgcagccgcatcacgccacgggcctgtggatatggcatcataccgtccatgttctgataggcggcatcctccagaatggcgaacagcgccgggccttcaaccggcgcatacatcaccgcacgggtgccgatcaccaccttcacctgtcccaacgccacagccagataggtgcgataccggtcggccgcgggcatggtctccgcgttaagcacggcgacgtcgcccacccagccgccggccggagcaggggcgaacggtttgagtccataattgcgcagcataggcatcaggtcttcgacctcgcgcatggtgggcaattcaaccacggcagctttaccggcactcagcgcagtggccaccatccatgccatgttccgttgccactcctgtgcaccgggcagcgaatcaaacacaaaagattggaaacgctgaccggtaagcgcatcatgaagcacattgacgtcggcgtaattggcggtcagacgacgatacccctgcgcagccccctccgaaacggtactggcaacggcaaaggtagagccagcaggcatggtcccatcgggattggtgccacgcccggcaaaaccgccttgcgtattatctggtagggagccgccgaccggtcggcggaacgacgcggccaaccgctgttcggcctccaccttggccacgcgcggtggcacggcgaaacgcagaatattggcccgtgtgccgccataggctttggcaatcagaccgatatcctcacgcatcgaagcgggaaccagtacatcggggctcaacacccgttcgatatagcgaatcgaagagcgcggggtatcgctggtatcggtgcgtgcccagatcacgccgctgaccctttgaccgccaaaccgcacgcgcaccagcacacccggctgtgcggcctcgctgtctttttcatcaatgaagtaatcgaatgtctggccgaggtggagcgcctgcacatccaacacgacttgcgctatgggatgctgctcggccggcgtatgctccgcaggcgcacgtttacgccgcttgcggggagccagccccgcaagcgtcaactgttctgcgcctgaagtcgtcagggctcaactataagtgccggagccgaggtcgataacattttaccggcgcagggaatcgagtacgtgggttaggtcgcggtcgttgatggctttgtcggcggcgagctgggtctttggcttggcacagaacgcgagacccaggccggcggcctgaatcatcggaatatcgttggcgccatcgcccacagccacgg

SEQ ID NO: 3136 - DNA, 30281 bp, Unknown
  R215_18m  MAG No. k141_47497
aaacccgtggggggcggcccccgggatacccccggggcacgccccacacgctaatgaaaggaagaaaaggagaaagaaagctttggcgggcagtgccagctgctgtgaccttgccatcacagcagccgggctgatcccgcctattcagttatggtgtgtgtcgtattcggtgcggagaccgagcgggcaagcccgctattttttatctccgccgaccgccatcaccgcgcgctgaagcacaacgaagacgaggatcatgagaccgataacgatggtggtccattcggccggcacaccgaagtcagaggtgagcggatcgaggatggagcggaccagagagccgagcacggagccgagcacgtagccgaagccaccggtgatgatcgtaccgccgatgaccacggaggcaacggcgtcgagctcccagccaatacccacagtgttcttggcagagccgatgtttgcggtgtacacgatcgaggccagggcggcgagagtcgcagaggtcaagtagatgatgtactgcgtgcgcttgaccggcagacccataagttccgcggaggaacgggagccgccgatggcgtagatggtgcgtccggtgcgggtatggtgcaggaagacgtagccgaagaccacaaccaccagtgcgatgatcacgccgacgttgaaggacagatcgttggagatcttcggattgtcgatgatcttgatctcgttggagatgaacgagaagtcattgccctgcgggaaggtcagcgagtcggtggagatgatggaggcaagaccacgggccaggaacatcgtcgacagggtcgcgatgaacggctgcatgttgaattcctcgatcaaggtgccggccagcaggccgaacacagcgccgatgagcagcatgatgatcatgaccaggaaggcgggcacgccggcgttcgccagcttcaggccgacgactgcggtgatggccacgatagcaccgacagacaaatcgataccaccggtcagaatcggcagggtcatggccacagccagaataatcaggtaggcgtggtcaatgaacagggaggagatgaagcccagtcgaatgtaggtgccgaacaacgcctgacccatgatgatcatcaggatgaagatcaccacggccgcgagggtcgggatcatctgacgatcgagcttgaagcccttcttgggagccttcactttgtttgccgtagctgttgtcatgctgccaccgccttagcttgagccttgagcgcgcgcttgcgtttcatattcgcgctcaggttgtgaatcttcggagcctgcatcacgcagatcacaatcacaacgacggcgaagaaggccggagttgcctcggcgttgacgcccagggtgatgatggtcttgcggatcatggcgataattacagcaccgacagcagagccggcgagggagaacttaccacccagcagtgaagtaccgccgatgacgactgccagaatggcgtacatttcgaggtcctgaccggtcttaaccacgtcgacacgcatcacggatgcggtggcgaacagaccagcgatggccgcgaggaagccggaaatcgcgtagacgaggaagaggatcttcttcggcttgataccggtcatacgggaggcttcctggttgatgcccacggcctcaatcatcatgcccatagcggtcttgcggcacagcaggccaacgagaatcacaatgataacggcgatgacgaagttggcgggaatgcccagaatgaagccgttggcgaaccacttcagcggttcgttgccagcaactgcggaggcgtcggtgttctcaccggaggtgatgaccttggccataccacggccggcgagcatcataatcagggtggtgatgaacggctgtaggcccaggaaggaaaccagagcgccgttgacgcagccaatggccagaccaacagccaaggcgatgaggatggagagccacacgttcatgccattggacagggtctgcatggcggcggcacctgccactgccataacggaaccgaccgaaaggtcgataccggcggtggagataaccaaggtcataccggttgcaatcatcaggtatcgggcagattcctggagcatggtgatcagcgggccggccagaccaccggtgttgctgttccagctcagagccaggaagtcatgctggaagatggtgcagatgatgaccagaagaatgaatgcgacgatcgaccaggtcaggttgctgctcagcagcttcttgacaaagttgttgccctcggcttttgccttttcagccatctcatgcctcctttccggtgtttacgttggtgttagcgatggtttcgacgatggtcgcctgagagacggtgtcgtcgttttcgatttctgcgatcttgtggcggtccttgagaacctcgatgtcgtcggacagacgcacgacctcttcaagctcggaggagatgaagacaacgcccatgccctgagaagccaggtcaagcacgacctgctgaatttcagccttggcaccgatatcgataccacgggtcggctcgtccagaatcagcagctcggggtgcgtggccagccaacggccaatgagcaccttctgctggttgccgccggagagattcttgaccgggcgatccgggtcggcgggacgaacgttgagttccttcatgtacttgtcaacgatggcgtccgcttccttcttgggaatcggcttgaacataccgcgcgttgcctgcagggcgataaggatgttctggcggacggtcaggtcgccgatgatgccctcatcacgacggttttcggtggagtacgcgattttgttcttcaaagccgtgtacggatcggagatgttgaccttcttgccgttgagcgtgtaggtacccgaatccggcttgtcggcaccatacaggagtcgaccaagctcggtacgaccggagcccagcaggccagcgaagccaacgacctcccccttgtagatgtcaacatcaaccgggttgatggtgcccttcttgccgaggcccttgacatcgacgatcggcttctcgccaggggtgatttcacggcgagccttcttggcaccaatctgggacagctcggcggcggacttaccaatcatcatgccgatgagttcgtcgcgcggggtgtccttggtcatgacctccttgatgaactggccgttacgcagaatggtcagacgatcggtaatctcataaatctgatcgaggaagtgggagacgaagaggatggccacgcccgagtcacgcaccttgcgcatgatcgcgaacaggtccctgacctcgttggcatccagcgaagaggtcggctcatcgagaatcagcaccttggcgttgataaccatagcgcgggcgatggcgaccagctgctgcatagcgatggagatggagctcagcggagtgtgcgggtcaatggattcgaggcccatctgtgccaaatacttcttggcggcctcgtgggtcttcttccagtcgatgccgaaggggccgcgcttttcgtggcccagcatcacgttctcaccgacggaaaggttggtgcacaggttcacttcctgatacacggtggcgataccggcgttttgtgcgtcgagggtgccgttgaactgctgaggcttgccgtccaccataatggagccggcgttgatcttgtacacaccggtcagagccttaatcatggtggacttgcctgcaccgttctcacccatcagggcgtgaacttcacccgggtagagagtcaaatcaacaccatccaaggccttgacgcccgggaattcaatcgtaatgcctttcattacgacgatggggtttttatctgtcatgtctttgccttaaacgagaatgagatgttatcgttttgtgatatttgagccacacatgagtgatggtgtggaaggaacatccttctcacaccatcacaccaattatttggtccagttatcaatgagtcgcagcagacttatcagtaggcgcgggtgttgttgtccagggcttccttggcggaggcggcgtcgaaggtcttggactcgatctcgatgtccttctcaacggtcttgccatccagatagtccttgacggcctgagcggtttccttaccgaagatcgggttgtactcgatcacgtaggagaggtcgccatcaacaagagcctgcagagcgttcttggtaccgtcgatggtgatgatcttgaccttgcccttgaggccggcggcgtcaacagcctgagcggcaccgaggcccatctcgtcgttctgagcgaagatgaactgcgggttgtcggacttgtacttgtcgagcagaccagcggtcacggtcttggcctcatcagtggaccagttagcggactgggactcaagaaccttgacgttggaggcaaccttgttgtcccaaccagtgccacgatccttcaccacggacaggccggcagggccttcgaggatgaagccgttggcgccatccgggaagttcttgttcacgaactcggcagcctgctcgccgcaccagacgttggacggtccgatgtgagcaacgatggccttcttggcctcggcgtccttgacgtccacgttacggtcaacggtgaagaccggaatctcagcctcagcggccttcttcagggagtcatcccaaccggaatcctcggtggaggacaggatgatggcatcgacttcgtcgttaacgaacttgttgaacgcctgaatctgcttctgctgatcgttgttctgggtcggagagtaggtcaggtcaaagccggcatcctcgaatgcctgctgaatgtccttctcgttggcggtacggaagccgccctcagggcccacagcaacgaagccaaccgtcttcttgccggagtccgagctgccacctgcgttgctggaaccgcatgcggcaacgctgacaagcgcagcagcagaagcaacgagggcaatggccttcttccaattcttcataaatactcctcctcgagcagtgtttattttttggatgatcttccatcctgtttggtgactgttcgtcatcgacaatctctagtgtgacgctcacaggccaaatgttcaatcgcatgcgataacagtttgataacaggtttataacagtttgataacagtagttcaaaaaacggcttcacagcgccgttttgccttgtcattaagccataataagaggtggttgcacggcggcaatgccgctcgtcagccgagcgacaaagccgccgcatcacaacacaagaaaagttattatgaacaccgtttttcttataccatctactgcgcaccgagggcagtgacctggctatcggcgatggtccaggaaccgtcgagtgagccggaaacggagcgcacaatacccaaatcgtccacaatggccaggcgacgagacaggctgatctgccccgatgccatcgacgttatgattccattgggtaaacgctgcgcattggccgggcctggtgccatttgacgccatgcctcttgttgttcgctgtttccctcaggaggtgtggtggcgtacaccagattcagatcattgtagaacgtgagcatggtgacgtgcctgagcacactcacttgggtggccgctttgctcagaccgctcagtgttttatcaccgttgcgcgccacaccggtcatcatcacgccgttcgtgtcctcgcccctgactgccaacgccaatcggcacccttccggagaaaccgccaatgccacaatgctgtcggcagcaccaagccaatcaagcttcagatcggtttccttgcccccatctgacacatgcaattcgcgcccgttctcggatacagcccatacttcgccatccagaccttcggtaatcgatcgcatcggctcgccggagaacatcaccccacaggacgcaccatcagatttcaggcattcgaccacgccgtccgcacgcaacaccgcgccgccggatgaggaaaaaacgaagccccgagcatcgtcatatccgggggcctcccctacacgcaacggactggagctggccagggaaacgatatgaccaccggtcagcgtgtatacgcccgctgtcggctgctcggtagtaagtttcacatttgcgtcggcatcggaatagtccactccatcgccggtaatcctcagcgcgtattcggcattgccgtcgcccatagtcagacggatgcgacgtaccagcaggcctcgttcttcctcgttcaacgcattgataccgctgttgaggtgtatctccaccacattgttcttcaccggcacgctgtcgaccgcgagtttgatggtagacaagccggcgcctcgcagcactccttccaaccaggagggtgcatccgagagcacttcaccgactgcctgggtgcgccagttgcgccagctcaaccaacgaatatccgggataagttgcttgccggaagtactcacctgatacacggatacttggcggaacacctgttcaaaatctgcggtggaaatcaccacgccgctttccaatgacgagatgcgccattggccgcttttcttcatcagcgtatagggaagcctgcgcgtttgggtgctgtttgacggcgtgtatacgccatgcgaatccaaggaacccaccacctgaagttccacttccacaatcagtgagctttccgcaccttgtggcgcgcttatggtgttggcgcgtcggcggaaatcaggggtgccgctgtataccagtgccgcagaatctccattccacccggcagaagccgagccagtcaggaattcgcgagccacgcgatagccatcggactgcacgccagcaggcatagcgtcatagaaccctttgacaatggtttccggctgtgcatcgtccgcaggcccctgaggattggtgtaaacacgctgggtctgctgttccaccggtgccagagtctgcaccgagccgctaatcggcaaaccgaacggacttgagcatgccgtcatcgtgatgcaacaggctatggccgcgcctgcggcggcaatcgttctggccactcgtctcatagtggcctccccatcatcgtgtcgcggcgaacctcatgataatcatgtgtgacttggctggtggccacaccaaacccaccggtaacacgcaggtcatccggcgtttcagaagcaaaattcaccggcagttcagcgtccgccacctcaccttggtcggggtcacgcggcagcaataccaagaaccaggtgccctcccccactgccgaacgtacacggatactaccgtggtgcagcaaggcatcagtcatggcgatggccaggcccaatccggtgccgccggtaacgcgtgaacgtgaaaggtcgcctctccagaatcgatcgaatacatgagcgactttgtcttcgtcgataccaacgccatagtcgcgaacgctgatggccacggctttgcggttggccgcgacgcgcacttcgatcggccggtcctcagcgaaatcgacggcattggccaacagatttctgacgatgcgaatcactcgacgcgaatcgatacgagtcaaaacctgcacattaggcagatacgtgtgaatcggcacccgtttggcttgggcgatgccgtcaacttggtccactgccgtttcaattggttcgcataaatcggtttccacaaggtcgagtgccgcataaccggcatcgtagcgggagatttccaacagatcggcgagcatgtcttggaatcgactgatctggccggccaacagttcgaccgtacgcttggtggaggggtcgaagccgtcttttttcatttcgagcaggtcggaagccatacgcatggtggtcaccggggtacgcaattcatgactgacgtcggacacaaatcgtttctggaaaacgcttgcttcctccagctcatcgatcttctggttgagcgcatcagccatcgtattgaaggattgctgcagcacaccaagctcatccttacgatccacggtaacgcgcatatcgagattgccggaggccagtgtttccgaggccgctgccactcgtccaatcgggcgcacgatgccacgaatcaccagccagattactacgcccaccacgatggacagcaacgcacagatgaccaccagactgagctgaatctgcgtcaaggactgctgctggaacgtgtacgaataaatggcgaagaattcgaggttgccggccacgccaaagtccaatacggtgccgagcaccgctgcgggcgtcccgctgcccggcatgccggaatcaccgggaatttcgaccggctgatagaacacgctgtcatccaagtcggaagccacggacgaacggatgtcgtcagaaatcagactttgatagctgggttcggtggatacggggatgatggcacgcgagttggtatcacgactccacaaatacacacctatcaggttggaggacccctcggattgcaacgaggacgccaagtcattgaccagctgttggatctgcactacggcggagacatcggccgcgtccagactggtttgggcctgctgcaccatgtttgaatagtcggcacgcgactgcgaagtgatttgggtaagcagcgaggcgcgcactgataccatcgatacgccagagaagacgatggccacggccagcgtaagaatcacggtgagggccacggtgcgggcctgcagtgagcgacgaacttcagcgcgtccgtggcgcagcaagcgtttgaggctgaatcgagggcgcaggttcattgttcaggagtgacgaacttgtagccgataccgcgtacggtctgcacgatttgcgggttctcggggtcgtcctccactttggccctaaggcgttgaacatgcacattgaccaggcgcgtatcgccggaattctcgtatccccagacattcttgagcaggctggaacgactgatggcctcgccggcggcggccgcaagcatgaacagcagctcgaattccatcggagtgagattcaggtccttgccatccttggtggcggtgtgttccaaacggtcgatgacgatgggtccgcgttccagatggttgacgtttgcattgccaccgcttgcgccaccggtggcaccgtcttcggcggccggcttggcgatgcggaagcgtgcacggatacgcgccagcagttcggctactttgaagggcttgggcacgtagtcgtcggcaccggcttccaagccggccacgacgtcaagtgtgtctgatttggcggtgagcatgataatcggcacattagaggtagctctgatgcggcgggccacctccgtgccgtccagcccggggagcataacgtcaagcagaatcaaatcgggcttgacgatggggaacatttccacagccctcagcccgtccaggcaggtcacagtctggaatccctcgttttccaaaacaagactaagcatttcgccgatggcctgatcatcgtccacgatgaagatggtcgccatggtgtttgcctcccctttttccactgttattgttgcgttacactttactcccctatgttcatttctgttcgggttccccaccatgcagtatcgggcgaatcttggcaagacgctggctgacttcgtgttcatagccgcgatcgttgggatggtagtactcggtgccacgcagctcttcgggcatatattcctgtggcgccacggcaccgggccaatcgtgcgcatacttgtagccctcgtggttgccccactctttcataagcttggtgggggcgttcctcaaatacagcggaacagcgccgatcttgccggtatccacgtccgcgagcgcctggttaatggcgttatagctggcatttgatttgggcgcggtggccacggcaatcgtggcttcggccaaaacaatacgtgcctcgggcatgccgaccagcgccacggcctgcgccgcggccacggtgacctgcaaaatctgcggggcggccatgccgacttcctcgctggcggcaatcatgatgcgacgggcgatgaagcgcggatcttcacccgctttcagcatgcgcgccagataatggatggcggcatccggatcggagccccgcatggatttgatgaatgcggaaatcacgtcgtaatggtcatcgccgtctttgtcgtagcgcacggtggcggtgtccattaccgtagccacgatttcggaggtgatgatgggtcggcgtgcgccctttttgcgggcttcgtcgccggtgaccgcgccagccgcggcctccagaatcgtgagactcttgcgtgcgtcgccaccggccatgcgcacgatatcggcgatggcttcgtccgtggctttgacctcgtccctgagaccgcggtcatcagtcagcgcgcgctgcaccagttcggtgagctgatcaggctccaatgactcaagcttgacgaccaccgaacgggagagcaacggtttgatgatggaaaagctcgggttctcggtggtggcgccgataaaggtcacgtcgcggttttcgacggcgggaagcagcgcatcctgctgggatttggagaagcgatgcacctcgtcgatgaacagtacggtttcccggccgcgtgacacgagccgttcgtgagcgcgggtgagtacgtcgcgcacgtctttgacgccggaggtcacggcggagagttcctcaaacacgcggccggattggccggccacgatggtggcgagcgtggtcttgccgacgcctggagggccgaacaggattacggagctcggcgcggtgagactgcctttgctggccggattggcgaggcggcgcagcggcgagccctggcccaacacctgcgtttggccaatcacctcgtccaaagtgcgtggacgcatgcgcaccgccaacggccgtgtcatcgactccggcgcatcagccgccccaaacaaatcgttctcactcataacgtcctatagtaccccagtgttcgaacagacgttcgagctgcaccttggcttccctcagagaggggagccaggaatcagttactcaccttgtagtcgtggaagactacttcgccggtgtcttgggtggcgtcaaggtccacgatgccttcgatggcccagtcgtggtcgccatcggaatcatcgataatctgacgcaccttccacgtatgctcgtcgttctcgtgcttgtcatccaacatgaacagttcgggcgagcgcgcttcggcgccgatgcccacgtactcgtgctcgtcgtagtagtcgtcgagcacatcttcccattcgtgcacgccgtagccccagtccttgtcgagcgcgccgagcttgtccggctggtcaaggtccataagccgcacacggcggaacaaggcattgcgcaccagcacggtaagaccacgacggtcctcgaccaccgcgctttttgcgccgggcgcggccaaggatgccgcagcctcggattggtcagccgagtcaccggcgttctcccattcgtccaccagcgaggagtcgatggagcgcacgagcacgcgcagccacgagatgatgtcttcgagttgctcgtcacgcttttcgggcggcacggtgcgcgacagcgtgcggtaggcgtccgagaggtagcgcaacagggtgccttcggagcgggcgatgttgtatcgggtgatgtatccggtgaagtcggaggcggtttccaccatgtcgcgcaccacggatttcggcgacagccagtagtcgttggcccacggcacatcgtggcggtactgatcgaacgcggcttcgagcatgtcttccagtggcttcggatacgtaatctcctgcagcttatccatacgctcgtcatagtcgagtccgtcggccttcatatcggccatcgccttgtctcgggcctgacgctcctgggcacgcagcacctgcttggggtcttcgagcgtggcctcggccatggagatcacgtccagcgcataggtgtcggactcggggtcgagcagttcgagcgcggccagcaggaacggggagagcggctggtcgagggcgaagtcgtccggcatatcaagggtcatgtagtagtccttgccgccgtccttgcggtcctcggtttcgatgacttcggtatcgaacagggtttggaagatctcgtcggcccgctggtgcagatgctccttctggtcgggggtctgcgcggaatcgtcgatgagatcgtcgatacgggcacgggcgtcaccgccctgcgccacttcattgagcaccatcgaatgcgtgattttcaggtgcgggaccagggtctccggttcagcgtcgatgagcttatcaaacgtgctctggttccaggtcacaaaaccttccggcgccttcttgcgcttgaccttcttgagtttcttcggatctcccccggccttggcgatggctttctggttttcgatttcatattcgggagcctcggcgatcaccagtccctcggtatcgaatcccatacggccagctcgtccggcaatctggtggaattcgcgggcgcgcaggcggcgcatcttggtgccgtcgaacttggtcagggccgtgagcaccacggagtgaatcggcacattgatgccgacgcccaatgtatcggtgccgcaaatcaccggcagcagaccctgctgggcgagctgttcgaccaggcggcggtagcgaggcagcatgccggcatgatggatgccgacaccggtgcgcagcagtcgctgcagaatcttgccgaaggctgtggtgaacttgacgcctttgatggcttctgcaatggcttggcgctgttccttgctggatacaccggtggaggcgagcgcttgcgcggtctccaatgcggcgtcctgcgaaaagtggaccacgtaaatcggggtttcgccgttacggaaggcgagttccacggttttttccatcgggtcgagcgtgtattcgtagctcaacggcaccggtcgcggcgcgtcggcgattacatccacgtccggggtgtcgttcagatcggagagcttgtcggcgatggcgtccacattgccgagtgtggcgctcatcagcaggaactgggtctgcggcagcgtgagcagtggcacctgccacgcccagccgcgctccggatcaccgtaataatggaattcgtccatcgccacgaggcccacatcggcatgggtgccttcgcgcaaagcctgattggcgaggatttcggcggtgcagcagatgatcggcgcgtccgcgttgatgtggctgtcgccggtgatcatgccgacattgtcgcggccgaacacttcgaccaagtcgaagaatttctccgacaccagcgccttgatcggagcggtgtaataggagcggcggccagtgcatagggcggcgaagtgcatgccgagcgccaccagcgatttgcccgaaccggtcggggtattcaaaatcacatggtcgccggccaagaggtccataatggcctcttcctgatgcggccacggctcgatgcccttgacgtcttccacccagccgaagaaccgttcgtagatgtcgtcggccgtaagattccgttcgcgtccgtcgccgtcccattcgggggccagccgccccagggatccgtattccttctcgtcagtcataatgctcagtctacctagtggcctattccgacggcacgagccgccctccgtcgctatgcgacgcctcccgccagcgggcggagccatgcgaagagctgtgccatgcgcttggctccgccaatgggaggatcgctcacgccaaccggcggcgcacctcgtcggggtccacctcgggttcgaggggaggccaggtcatgttcatgttcttcaaggtggtgcgcagcagttcggagaccacggctcgcgaataccagcggttatcggccggaacgaggtaccacggtgcggcggccgtgctggttttctcgaacacttcctgccaagcgaacatgtactcatcccatcggtcgcgggcctcgaggtcggagatatcgaatttccagaacttggtgggatcatccagcctcccaagaaagtgttttttctgttcttcctggcttaccacgaggaagatcttgaggatggcgcatccgctggcggccagttcacgttcgaaatcgttgatctggtcgtagcgggcacgccatacgtcttcgggataggtgccatagacgtgcggcatgaccacatcttcataatgggagcggtcgaatacggcaatccaccccggcttgggcaattcacgcttcacacgccagaggaagtcgtggtcgagctcctcggccgtaggcttgccgaagccatggtaatggatgcccatcgggtcgccttggctgaacacgtggcgcacaatgccgcccttgccggaggcatccatgccttgcagcacgatgagcagccgccgtgccgagcctttgacgccattagcgtacatgagccgctggtatcgggcgatttcggaggagctgatcgaaatgaacttctcggcgtcctctttattgccgtcgaatccgggagtggaatcgccttcgacatcagtgacctgcatgccgtggtggaacataagacgttgagcgggcggcaacgaccatacggcgctgagcagttcactggatttcgccgcacgcgccagtcgttcaggcacgctggcacttgagtcgatggtgtctatgcgatccaccgcgagctgtaataccttgtcgatccgtcgatcggttttggattcctttcccttgccgttcttgttgttctttcctgaggattttccggccgtaccccacttgccggcctcttcaggctcgttggttctgtcgtcgtccttggccatgctcccgattgtacgtcttgtaactcaggagacctagcaacgtagcgacattcacatttcgcctgttactgcaaatctataggcatgcagtcgttcggaccgtaattgttggctttgcaccaattccaagcctcatctgtcgagtcgaagccctcaccggcaagaatcacatagtatttgtcggaattgctgctgtaggcgggccagtcacccgaccagataagcagtacgtttgaattcttgttgtgcatcgtgatgaattgcgcaagaatatcgcggtagttccaggtcttgccttcagcctccatacccttacgcttgctggacagctgtgcggtatacgtggaatagaacagctctgcggagtccttgtcgtgctcgacctgccaatccaatgccttgcttgcattattttcggcttcgtcatccgtaacgttgctgccgcttatcacgcctggatcagacgatccccagcaatatcttctttccggcagacccaccggaacgcggctgcgcggtttcaccattacctggcgcagtcggcaatgtcgaagtaggtgcggtcgccgtgttgaaacttgggggggcagcggcatcgaacccgctggcacctgctggggagcagccggtaccagcgtcgggccatccatcgactgaggacttgggcttggcgcagactgtgccatcggcgcaccgcattccgtgcagaatcggcttccctccggcatctccgttccgcaaacctggcacttcatactctctccgttctctctcatccctatcggccaatcccccgtccgtttgcagtacataaagaagcggcaaacggcccgaaacatacctgagccatcaggaagacggcacgatctgctacgagaaagagatcatcaccgaccggcaaatcgtcggcatcatgctgaagcatccgaccagcgcacgcggcttcaagcgctacttgcgcgccgcatcatgacgcttgaccacgatggtgacgccacccgcagcgaacagcgtcgccagaaccacaaccaacgcaaccgaggcaccggtatcggccgtacgttcggtctgctgtggcttggtgctgccattggcattgacgctaccgctatggttgccgttatccttgtcgtccgtcccggtggacactccggtaacggcaacgggcagagcgaccgtggtcttattggtcgcaccggtcactgtcaggcttatatcaccggtcttggttccggcgggaatcgtgaccttgagctcggcggtatcgccattcgcaacctgtgcttcgccgaccatctgctcgccgatggtggcggtcagcttcgtctcgtcaggcacgcccagcgaggtgagcgtgagcttcgagaagtgcagggtgaacgagccaccggccttgaccgcaccggtcgggataccggtgacggccactgcacggcggtcgtagcgcggggcaaccggatcgttgtccttgagatagtcaatccaggcgtcgcggtccaccagaccggtgtccttggtgttcgtgccttgggcgaaggcgcggaagttatcgccgccctccaacaggaagctgaacgaaccgatacggtagttgcgtttcaggtccagaggctcaccgttgacggtcaccgaggtgatgtgatggccttgcgcggcatccggatcatacgtgtagctcacgttgtgggacagtccgagttgcagatacgcgcgcgatggcgtgctgccgtccgcgttcgtctgccactgctgttccagcgcttccttgaactgcgcgccggtaagcgtggtggtccacaggttgttcaggaacggcagtacagcgttggcctgggcgtaggtgatattgccgtcggcatcgagcgtgcaggcgtcattggtgccggacttgcagaattcggcacgcagaccgccggggttgaccacaccgatttcggccgcgccgcggtcctcgcctttgagcgaatcgagcagcgcatcagccaccagattgcccatggtcgattcggaggcgcggtcgtcacgcttgccgtccttgaatgcggtggtgatatccgcatacaccttgccgaccttctcgccgcccttttcatcggccaccttaagagcctggtacacgatgtccctcaccttggcgacagtcgggttcgcggcggcgagcaggccatcgttgtattcggcgtaatcgttgtagtgcggatcatttttgtcggcgggctgcgaagccacctgcacggccgtgttaccggacttgtcgtaagacaccgcaccggtggccgtgttgtaggtgagcaccacttggccgatgttggcggcatagctaccggtctggatgatcggccggttgttgtgcgcgggatcggtgtacgagtacttcatgtgggtgtgtgcagtgaagatcacgttcactgccgcatcggtatcgtccacaatcttctggaatacggggctggcggccttctgctcgtcaagcgtgggcttggccgtggcgtcatcttcattggaggctgcaccctcatggtattcggccacaatcacgtcagcctcgccattggattcgtcgccgtcggtgagttgcttggtcacacggttcacggcttccaccggatcgccgaattcgatgtccttgacaccaccgggagcaaccaacgtgccggtttcctgagtgaccgcaccgatgatgccgaccttcacgccgttcacctcctgaatgctgtactcgggcagagccggggttgtggtgcccttcttgtacacgttggcaccgaggtaatcccattgggcgttgcgcgcgccctccttgccgatcacacgatcggtaaggtcggcatagccttggtcgaactcgtggttgcccaccgccgaggccttgacgcccaaagcgttaagcacatcgatggtcggctggtcctgctgcaccgaagagttgaacagcgaagcaccgatattgtcgccggcggacagcagcagtgatgagtcagggtattcgcccttgagctgctcgatggtggcggcgaacggcacggtgaggttcttgtcgatacggccgtggaagtcgttgaagttcagcaggttgatggtggtgctggcgggaaccggctgattggttgccatatagcccatacgcaatgaatggccattggtcacgccgtcgtctgcccagaacaccggcttgtacaccttgccatttactaccttggtggcttcggtatcaggggtgatggcaaagccttcggtgttctgcgtacggatttcatccggagtgtcggtcagcttggtcagctgcagcacaccgttcttgaactcgtaggtaccgattttggcaccggtgttcgcatcattgtcgctttgggcgagcagctggttgtgctcggcgtcccaagtcagatcgcgcgggccatcatagccggtgttcactgcggactgcggcaggtcgatgtcggccaccggatgcaccaggtcctcatcattcacggtttgcagtgcgaaggcgtagatatggccggttttctccagtgcggcgaagaacagaccgccgaaatcattgccgaaaccgtccgggtcgtaggtcattacgttcttcgggtcaaggttggattggaatccattggcggtcaggaccgagtcgggaataaaggctatgccttccaccccaagattggcgtccgctccgtggcccagcgtcacgccgaactgtgtgagtgctgcggtgagattccactcgtgcgtagcggtcagctcttgcgctccgtcgccgttggcgtcggtggttttcgcggtcacgtcatactgcaggatggaaggccgcggcacattcttgttttcgttgtcgcgctcggcgccgatgaatatgcccttggatgaatctccgttgatcagcgtgatgccttcggagtccacaccgcccttgccgtccttgaagtgcagctgcttgccgcccttggtctgaccgttgttggtgaaggtccagccatcagtgggatcctgctgccatgtgccgttctggtagacgaacttgttgatggagccagggcccttatcagcggtgttgccgagcgtggggttcagatcgttgtcggccgcccacagcacgccttgcttgccgtctttaccggcttcatacaccagaccagacagattgccgtcagtgtggtcgccgccttgtcctttggcgccaaattcgccttcggcatccactgtggtcacatcggccaatcccgaccatgcgtccacggtcatggtctcgccggcgggcggagtcggagtcgggtcatcgaacacgttctgtgcaccgggcgtgggcgtatcggaaagcgcgaaagtgccatcgtccttacgggaccacgactgactgtcgctcatcttcttcacgccggttgtatcggtattccatgacgtggaatccaccacatcgctatcggtaaagtcgccgctggtagtggtcagataggcttcgtcggcatcggaacccaggccgggctcggccttgtcggggtcgatgtatgccaccagatatccgccggctttgatgacggtgtccgtattcgttacttcgctggtgccgatggtgtagtgcttcttggctttcttgccgctgtcgtagatgccccagcccttcacgtcaacgtcggtggagccggtgttcttgagctcgacccaatcgcaacgcttgctatccgggtctccggcagctttcgtattgccggcatagacctcgttgatgattacggatggtttggcagccgtgttctgttcggcagcggcctgctgctcgtccgcagccgcagcgggcacgccgatcagggcgatgctgctcagtgtcaccgcagcggtgagcagcgcgatggcgcgccgcgacatcgcggtgaaattgttggtgtggaacattactcccgttccttcctcgggttgtgccgccgcagcatgatgctcttcggcggatgacaccccgagagtatgagagagaaatgaagccgacaccgtatgaaggcaaactcggcagatctccaaactgaactttggctgaattactgctgaagctagttcttggatttgcgtcgaaccgtccgtattccgccgacaatcgcgattacagcggtaccgatggctacgctgatcaacgccggtcgttgcgcggcatggagggtggcgagatccggtccggccgcaatggcgctgttttcacccgccgagccatcagacgccgggtgattgcccgcgtcggcgtactgggcattgaccacactcgggccggcaagcgccacctggtcggcggtctcgaccttggccacatcgccgtgcttatccaaggtgacgcgggcgcacagggctttggcccagttgatacgctgccagccgtcgctcgattgccatagggggtatccggaatccaaggcagtggctttcaaaatcgcgttgcgctgatcggcgtgcagttcgggataggccagtcgcagcacgtccgccgccccgcgcggtgccacgaaatcagcgccggactgggcggtgtcttgcgggaaggtgtaggtcaggcgtgcggtgtagacgcgcacggccgaggcctggtccgcgaccggctcggtggccaccgggtccagaaaatcgttggtgtagccgcccgaaccggaggccttggtgttggcgatgcaggcggcgagggtagtgccgtggccgtccgcggcgcagcgggacaccagatagtcccgcagctgccgggacgcgggcacgatggacgaagcgaattcgttatgccagtactgcccgttctgggcggatgcgccaatgcgcccgcccatgatgtcaagcggataatgcacgccgagcacgatgcggttgttgccggcctccgaagtgcgggccatgatttgcggcgcgagttcgggaatcatgccggccagcgcgataccccacgaataggcgccggtagtgtggccggaggggtaggaactgtttttctgcaagttcgagtagccgggcacgtgttcgagccatgagggtgattgcttgatgtcaagcgtggcgggcagtccggcgagatcgttagtgccgccgtagctgctttccgcacggttcagataggggcgcggatgcatggccgcacgttttgaggcgtaggtggaggccacgttaaaggagaagatatcggcgacggcgttgagtttcccggatttgagcccttcgctcatatatttgccaagcaccggaccgagcgcgtccggcatggcttcctcggcttgcagatcggagtcgacgagcgcacgcttgcgttgggcgttcaggccatccttatcgagattttcggcggctttgtggttaatggccacggccaaatcttcgtcgagtttcattgtatcggcgtcgagcaccttgccaccgtgttcggcatcggtgggggcctgccaatagttcttttcgtagtcggagagcaatgccacccaatccgggttgggcagctggtcggcctgtgcgattgcgggcgtcgcggctagcgtggccgccaacgccagcggcgcaatggtcgcaatagcaaaaacggaggataggtgccggaacatcttcatatgttccaacctatcctccgtgaaggctacgtagccggaacccagtcaaacactcagtaaattcttcgtgccggcttagcggcgattgagctgactgtcaggcctctgactcgtcttcggacttgcggaacgccgggaattcgccggtttccgggtcaacctgtgactcgggctgggtggcgtcatatccctgttcatagcgggtgcgccgccagttgcgaatcgaggcgttggtgccgcggtgatgcacatggtatttgcgcggcgcaccaccaaacggcagctcttcgacttccttggccacagcgatctggttgacattggacgggtctccggcggcgatcggcgccacgggctcggcctcggtgggcgcggccgtacgctgctgcatgcgcgagggcagccattcggcgagcctcgacaacagccagcaggcgatgaagtaaatcaccgcggccatgaccagcgtctgcaggatgttgaagtacatcgagccgagtcggcgcgattcctgcagcaggtcggtatacatgatgatcgagcctagggcggtatccttcaacaccacgaccagctgggtgacggcggccggcagcatggcgtagacggcctgcggcacctcgatctccatcagcgactgcgtttcggtcaggcccaaagcgagcgaggcctcgcgctggccgcccggcagattgccgacgccggagcgcacgagttcggcgaccaccgaaccgttgtacagcaccaaggccagcaccacggcccaataggacgggctgggcaggcccgcgaacgcgaaccatcgccagaagaagatcatgagcagcagcacgggaaccgcacggcagaactcgacgatcacggcggagacgccacgtaccaacgggttcggcagcagtcggcccacgccgaacaccaggccgaacaccacggcacccaccacggccacgatggtggccttgatggtcatccacagtccgggcaggtagaagtcggtccacgcctctcgttcgacggcgggcttccacagctcccagctgagctggttctcgccgtccggcgggttgtgcaggcgcatgaggataaacacgagcaccaccgcgaacagaatgcccgcgatccagttgacgatgcgaatggtgcgccggcccttgggacctggcgcgtcgaacagcacggaattcgaagtatcggccatatccgtcacctccttacggcgagtttgttggacaggtacgtggtgagcatgccgatggggatgatcaggatcacgtagccgagcgcgaagatcaggaagatttggatgatcacgtcgggacggaattcgatcatctcgctcatcagcgaggatgtttcggtggccacggatgcggcggcggccacggtggagttcttgagcagggcgatcagcgtgttgccgagcggtgccacggagcctcggaaggcctgcggcagaatgatctcggtggcggactgcatgaagcccaagcccagcgctcgtgcggcctcggcctggccaatcggcacggtgttgatgcccgaacgcagagattcgcacacgaacgccgccgtgtacaggctcaggccggtgaccgcgagccagaagaagttcgtggtgaaggtgtcggagaagctgagcttcagctgcgcgtaggcacccagcaccatgaacaccatgatgatggtcagcggcaggttcttgaacagttccacatacgcaccggccacggccctgagcgaggaaatcggcgagatgcgcatcaccacaaggatcacgccgaggatcagggagaacagggcggaccatagggtcagttcgatattgaccagaaacgcgccgagcacgtcatactggctgaagagttccaggaatccgctcatcaggcctcctctccttcgtccggggtgggcgggttgtagcgtacgtcgggcgtgtagttggtgcccttggtgttatcgctgatggcgttctcccacgagccgtcctgaatcatgtccacgatggcgttgttgattttggtggccagctgcgtgtcgcccttcttgatgcccacgccgtagtgttcctgcgtgaacggtttgccgaccaccttgagcttgccgcgcgaggcggaggccaggccggccaggatgatgtcgtcggtggttaccgcgtccacgatgccggagaacagggcagtggcgcattcggcgtaaccgggctgttccataagctggacttcggaggcgaacttctccttgacggtggcggcggaggtcgaaccggtgacggagcataggcgcttgccgttcaggtcttcggggccgttgatggagttgtcgtccttgcgcacgagcagatcctgtccggccacgaagtacgggccggcgaaggagacggccttcttgcgctcgtcggtgatggagtaggtggcgaggatcatgtccacgtcgccgttctgaatcatggcctcacgctgcttggagggagcttccttccagatgatctggtcttcggaatagccgagtttcttggcgatgtacttggccacgtccacgtcgaagcccacgtaggtgccggacttcttgaagcccaggccgggctggtcgaatttgatgccgatgcggatcttgccggtttcgtccgcgccgcaggcggccagcgacattgtgcaggccacggcggcgagcgcggcgatcacgcggcaaaccttccgtttgaacgtattggtgaatgtcattggattgcgtacccgtctttcagtgggttcgtcagtgggtgaggatcttcgagaggaagtccttggcacggtcggtctgcggatgctcgaagaactcgtcgggcgtgttctcttcgagaatctggccgtccgccatgaagacgatgcggtcggcggccttgcgcgcgaagcccatctcgtgggtcacgcagatcatcgtcatgccttcatgcgcgagttcgaccatcacgtcgagcacttcgttgaccatttccgggtcgagtgcggaggtgggctcgtcgaacagcatgaccttggggcgcatggcgagcgcgcgggcgatggccacacgctgctgctggccgccggagagctgggagggcatcttgctggcttgggagtcgacgcccacgcgggcgagcaggtccatggccagttgctcggcttccttcttgtccatgtgacgcaccttgatgagggccaacgtcacgttttcaagaatggttttgttggcgaacaggttgaacgactggaacaccatgccaacttcggccctgaggttcgcgagctccttgccttcctgtggcaagggcttgccgtcgatgcggatgtcgccggaatcgatggtctcgaggcgattgatggtgcggcacatcgtggacttgcctgagccggacgggcccacgaccaccagcacctcacccttggtgacggtcaggttgatgtccttcaggacgtgcaaagcaccgaagtgcttttcgacgtgggtcagttcgactagcggacggttcaggtcctctttgccgggaaccagcggggtcaatttggccttgcttggtgatgttgtgcttgtcgtgcgcgaacgcactgctgtttcattgttcgtttcagacatgagtgggaggatagcacaccgacgtttccaacgtgttcacagtatatccacacagttgctcagtcgatgtctcatttccgcatcagacatcgtgaaggcggcattgggcatcggcatacattctcgctgagtcgcgcatcgctcggcgtctgctgtgcgctgattgcctgctgcgtggtggctgagacgttgctgcgacggcaaagcgggcatgtgttgtcctatctgctgattccatgtttggccttggtgtcgttggcgttgctgccgtgtatgccgcagtcgggcgcatggctggcggtcactttgtattgtgtggggctggtctcgccgtttcccatgtcgtattcgtataaatgtgctaggcattttgagcgtggctagctgttcgcacacgatgagtgctgttatacggtggacgacactcccgaagcgcggtggataaccgggcgcggcacacgatatgccggtggataaccggttcgcgccgcttaagttatccccattttccagttttgcccctgtgccaccgtggaatgcgctacgctcggcgcatgaacggatacagcgaagcgccgcacaatggcgaaatcaacaactatctgcgcaaagatcttgacgccaaagccacggccaagaacacggcctgttggaatctgctgggcaaagtgcgcacgaaacgcacgttgtgtttctcgctgtataccgcattggaattatgcggcgtggagttgccgaggcacagcacgttgccgcagaaggatttttatgtgacggtgaggagcaaggggacccgctcttcattggacaatgtcgactatcgcatatggaatgcaaagttcagcagtatcgctttttcaaacggcgtaacctgcatgcatcccatggatgcgtggatacagtttgcccaatatctcaacctcactgaattagtggtgctggctgaagcgctcatcagacgttatggatatgccattgaacaattcactcaacgactaacggcctttcaccgcgttattggtcgtgcgcgttgtgaggcggcgctgaagctcgtaaaaccatcggattccgttcaggaaactcgtacacgcttggcgcttatgcttttcggcctgcccataccgcaaacacaatacggcattaccgattcagagaacggatacacctataccgttgacatggcttatccacaatacaaagtcgctattgaatatgatggcgatcatcaccgtcgcttccgcaaacaatatgtgcgggaccagcaaaaacgtcgacgtctgcggcaattgggctggaccgtcatcgaggtgttcgccgatgacctgtggaacaccgccaaacaacgtgccttcgcacaagaggttgccaccgcgatgcaaataccgcttcctggccgtcctcaaccttcatgccgggtattaatagacggcagccttaccatcaatgcgcgcaaaggggaatacaggaggcggaaacaagcaaaacacaacaaagcatcacaacattaatcaaatacggagttgcgatcgctcctcatgaggcggtaatttgcccatggggcggtttgaagaaattatgaaaccgcggaattaagccattttgacctaccgccccatggggttttcaccgccccatgggttgtttaccgccccatgaggaagttaccgccccatgggggggggataatcggcaaacgccaagggggacaccgcatggtgcgaggtttgccgcatggcggaggtgccatcgggcggagtatttggcacaccttagcaggtatttggcacattgggccccacccgcaaaaagcaaatggcccttggaattattccaagggccatttgcggctaatagcaccggagcattactcctcgaaaattaatctacgcatgcggagaccgccgttcgaagccgaaggcgcactaaggtgcgtcgagtgctgaggaaaggcggtatacgctccgtagattagttttcgtcggcgtccgggtcgtagtcgacgccggtctcggcgcgctgctcgtcggagatcggggccggagcaccggtcagcgggtcgcggccgccgccggccttcgggaaggcgatgacgtcgcggatggagtcggcaccggccaggatggacacggtgcggtcccaaccgagggccaaacccgcgtgaggcggagcgccgtacttgaatgcctcaagcaggaagccgaacttctcgtcggcctcttccttggtgatgcccagcacatcgagcacacgggcttggatgtcgtcgcggtggatacgtacggaaccgccgcccatctcctcaccgttgcagacaatgtcgtaggaatcggacatggcgtgctcgggatccttgtcgaacttgtcgatccaatccttggagggcatggtgaacgggtggtgcatggaggtccacttggagtggccgacagccacatcgtcatcatccggatcgtcggtgggcttgaacagcgggaagtccacgacccaagtgaaagcgaacttcttcggatccagcaggccttcgcgggaggcgagctccacacgcacggcacccagcagcagctgggcggactcgcgagaaccggcggcgaagaagacggcgtcgccttcctcggcaccgacagcctcgcgcaggccgttgcgctcctcatcggacaggttcttggcgacggggcccttgagttcgccgttttcgccgaagaccacgtaggcaaggcccttggctccacgctgacgagcccaatcctgccaagcgtcgaactgacgacgcggcgtggcggcaccgcccttgaagaccacggcacccacgtacggggcctggaacacgcggaacggcgtgttcttgaagtactcggtcagttccaccagcgggttgccgaagcgcaggtccggcttgtcggagccgtacttgtccatcgcatccttccaggtgatgcgcggcagcggcagctggacctcatagccggcggacttccagatggcggcgatgaccttctcagtcatggccatcacatcttcctggtccacgtaggccatctccatatcgagctgagtgaactcgggctgacggtcggcgcggaagtcctcgtcacggtagcagcgggcgagctggtagtaacgctcgacaccggagaccatgagcagctgcttgaggagctgcggggactgcggcagggcgtaccaggaaccgggcaccagacgggccggcaccacgaagtcgcgggcgccttccggggtggacttgatgaaggtcggggtctcgacctcggtgaagtccatgtcttccagcgcgtggcgggcggccttagccatgtcggaacgcagcttcagattgtgctgcatggatggacggcgcaggtcgaggtaacggtacttcagacgcacgtcctcgcccggcagcttgttctcggactcattctcgagagcggtggaaacctggaacggcagagcgtcggacttggcgaggatctcaatggtctcggccacaacctcgatcttgccggtggccagatgggtgttctcgttgccatccgggcgcaggcgcacttcgccggtaatctgaatcacgaattcactgcgcagcgggcgggccatatcctcgtcgtaaatgacgacctgcacgaggccggtcgaatcacgaaggtcgatgaaggccacgccaccgtgatcacggcgtcggtcaacccaaccggcgagggtgaccttctggccgaccagggcctcggtcacttcagtggcatgatgtgttctgtaagccgtctggctcattatcttgtttctcctcgatttttcgcgcgaatacgtcagatttcgacggtttgctgggcaaccacagtatccggctcccacgacgtgcaatcggcggcaacctgctcgcccgtgacgatgttcttgacctcgtcgccagcgggctctgcaccttccgcaccttcggcagcggtggccgggaaccacacgtacggaatgccgagtttgtccgcgtacttgatctgcttgccgagcttggccgcggtgggtgccacgtcggtggcgatgccgcgcgcacgcagttggttcgcaatacggttggcggccgggcggtcctcttcattccacacagcgaccagcacggcggccgggctgacgcggttggcgtgcgcgccggcagcgtgcagcatgtagctgaccagtcggctcaggccgatggacaggcccacgcccgggtacttgcggttgccctgggaggcgagattgtcgtaacggccaccggaacagatggaaccgagtgatgcggcaccgtcgaggaaggtctcgtagacggaaccggtgtagtagtcgagaccgcgggcgatcttcaggtcggcgatgacggaaccggggcggatggcggcggcctcgtcgacgatcatggccagggtatcgagtccctgacgagccagcgtgtatgcctcggaatccttggcgatgccgtgagactcgcacagcgcatcgaacttggcggcaagctcagcaccgtcggaggcggtgagctcggccaattcgaggcaggcgcgtgcctgtgcttcggtggcgccgcaggtctcggtgagcagtcgggccacctcatcggcaccgattttgtcgagcttgtcgatctcgcgcagcacgccttcgacgtccgtcaggccaaggccgcgatagaagccttcagacaacttgcggttattggcgtgcacggtggccttggggaggccatacgcgcgcagctcttccagcgcggagaccatgaccagcggcagttccacttcatagtggtcgggcaggtcgccggcaccgatcacgtcgatatcggcctgcacgaactcgcggaagcggccttcctgcggacgctcgccacgccacaccttctgaatctgccagcgcttgaacgggaacgccaacgcacccgagtgctcgaccacataccggctcagcggcacggtcagatcgaaatgcaggcccaaccgctcttcaatcggagtgtcggattcatgaccgacctcctgcaaacggctcagcaggtagatctccttgctggtctcgccttttttcaacaaagaagcgccggtttccaccgctcgcgtctcaatgccgatgaagccgttgagctcaaaaaccttacgaagcgtatcgataacacgctgctccacaacacgttcggaggggagccactccgggaatcctgatattgatgcacctttagccacgaaatcaatataataggtgagggttgcgtcaaaacttcctggttcgcccgggatgggagacgctcccgcttatgcattctacgctttaaggagctggccatggccgacgaaactgtcaccgaacccgtaaacaccgctgcgcccgaagagcaggcaacgacacccgcacccgaagccagcgcggccacgccggcgccgactccgtcccccgcttccatgccg

SEQ ID NO: 3137 - DNA, 31286 bp, Unknown
  R215_18m  MAG No. k141_50054
agcctacactgagaaaccatgagcaagcaccaccatcgcgaccgtagctgggccccggcacctgaagcattgccggacgacgcccagaccatcgacaaccacactcacgtggcctccgtaatccctttcgcgcgcgctatgagccatgaggcgcaggagaaggggcagcccgaagtcccggtgtacgacgtcgaccaattgctggcgcaggcgcaatctgtcggcattgggggtatcatcgactgcggttgcgagctgccgcacctgatgaccgccgtccagatggccctcgatcatccaggtaacgtgcacgcggcgctcgcaatacaccccaatgagtccgtgctccacgggcatcgcggtgtgccggggccggatggtctgcctctcaaatacaagccttaccatgacacgtctttcgaggacgcgctcgccgaagtacatcgcctcgccaccacataccccgagcaagtggtggctatcggcgagaccggcatggacctcttccgcaccggcgaaggtgccaaggaactgcaacgcgaggctttccgcgcgcatattgccctggccaaggaactgggcctgcccatgcagattcacgaccgcgactcccatcgcgaggtcatcgaaaccctgctggccgacggcgcgcccgaacgcaccgtattccactcgtattccggcgaccgtgagatggccgagattgcgcgcgaacatggctggtatctgagcttctccggcaccgtgagctacaagggcaatgacggtatccgcgaatcgctacggattgtgggtctgggccatgcgatggtcgaaaccgacgcgccgtatctgacgcccatgccgtaccgtggccgcaccaacgcgccgtacatgatcccctacaccttgcgggccatggccgatacgctcgacctgtccatcgcggatgtggcgcgcggcacccgcgataccgcccgcgccgtatacggactgtgagggccgggtgtgcggccgtcgcggcgatgtgttgacttgtaaaatttgtcagaattgtgaacgaggtctaccatgatgtacctgacataagcgagggggatgatctccacctcaatggaggactgaacgtatggctgagtcgaaccaaaggaccgcacgcgcccaaaaagcctcaaaggcccagacagcccaggctggcgccgccaaagccaaggcccgacaggaagaagaagcactgctgagggccgacacctttaccaacgctcccaaggtgtcccgccgcactctcaccaaggaggagcgcgaggcactcgccaagcagagggaagccgaaaccaaggaagccgagaaaatcgccagcgcatggtcgaaaggcggcctcggccgatggtgggcccgcttgcaatccagcccagacaaggttacctggggcatggcgatcgtggcgctcggcgtggtgtacggcgacatcggcacctcgcccctctacaccgcgcagaccttccttgccggtcagggagggcttggcagcgtaaaccgagaggccgtgctcggcatgctgtcgctggtcttctggtcgattacgctgatcaccaccgtcaaatatgtgctcatcgccatgcgcatcgacaacaatggcgaaggcggcatcttcgcactgtactcgttgattcgcaagtacggcgcatggctcgcgattcccgccatgctcggcggcgcggcattccttgcggattcggtacttaccccggcggtttccatcagttccgcagtcgaaggcttgcagaccctgccgccattggaagggttgttcgatgaaaacccaagcctgaccctgatgattaccgtcgtgatcatcgtgattctcttctccgtgcagtcgcgcggcaccgaaagcatcggcaaagtattcggctcgatggtgctggtctggttcagcttcctcgccatcgtaggcgtcacgaatctctctaacgactggtctgtgttcgcggccctgaacccggtgtacggcatcaaattcctgttcagcccggacaatgctgccggcatcgccctgatgggcaccgtgttcctctcaaccaccggtgccgaggcgctgtactccgacatgggccacgtggggcgcggcaacatctacttcacctggccattcatcaaggttgcgctggtgctcaactactttggccaaggcgcgtggatgttggccaatagcgataacccgcaatacaccgcgatgaagtcgctcaacccgttcttccagatgatgaccccgaacgtgcggtacctggccgtgattctgtctgtttcggccggcgtgatcgcctcccaggccctgatcacgggcgcgttcaccatggtttccgaggccacccgcctcaactggatgccccatctgcaggtgcgttacccggcccgtacgcgcggccagctgtacattccggtggtcaacggcgtgttgtgcgtggccacgctcgccgtgctcgccatcttcaaggattccgaacacatctccgccgcgtacggcctggcgttgaccattacgatgatcaccaccaccgtgttgctcggcgtctacttatggcattccggcaagcgggtcggtgccatcgtgttcaccgtgctgttcttggcgattcaggctatgttcttcatcgcgtctatggccaaattcctgcacggtggttggttcaccatgttgctgaccgccgcgattctgttcgtcatgtacacgtggaatgagggcaccaagctcgaacgtgcgcaacgccgtcacatgcggcccaacgacttcctacccgcgctcgacaagctgcacggtgatttccgcatcccgtattttgcggacaacatcgtgtacctgacctccgactcggaaaccaagcgactcgacacggacatcttcttctccatcttcgccgaccaccccaagcgtgcccgtgcttggtgggcagtcagcgtggaaaccaccgacgagccgttcacccgtgaatactcggtggaggacttcggcacgaactacatctaccgcgtgcgcttccgtttgggcttcaaggtttcgcagtccatcccggcgtacatccaccagatcatgcacgacctgtccaaaaccggcgaactgcctaagcagaagtcgatttaccccaaggtcgacgccgatccggacatcggcaccatccgttacgtgctgattcacaaggccctgatgccggaatccaaggtttccgcacgcggtgccctgtcgttgcaagccaagtacgcaatccgccgcatggccggctcgccggttaagtggttcggtctggcaccttacaacccgctggtcgaggtgcagccgctgttcgtctccacccgccgcccaccgcgtctgaagcgcaccgatacggccaagaccatcacgacgcccacgccgactcgtgcagtggccgacccggccgccgtccccgacccgatggacaccacgtccgggcttgggcgattggtacaggagctcgatgccgccgtatcggccgaggagcggaagatcgctgagaccgctgccgccgctgcggtcgctgagcagggcgataaaggcgataagggcaaggccaagaacggcaaacccgccgccaagcctcagcgctcctccaaacagaagcgataacataccagtttgcagcggcgctgatgcgctctataaagaatggctataacggtcgccgcacgtcgccacacggtttcggtaagttgaaataccatgtgcagattactgggatacgcgacggcaggcttcaacctgagcctcaacgccgtgttgggtcgggacaatgtcggcgatttccgcgaactgtctgaaatccacaatgatggctggggtgtagcccagctttccgatcccgccgaagcaccgcacgtgcgcgacggcggcgcacccaccccggaaaccggcacccgaatctacaagtcgaccatcgcggcccgtcatgacagcacgtttgagacgctggccgacgaaccgtctcgcggtgccatctggcacctgcgcttggcaagctccaatctgccgctcatcatggagaaccagcacccgttctatgcgaacggcctgagcttcatccacaacggcgatatctcggacgccaatggccgcaacatcgtcaccaaccgctcatacccggtgaaccacagcgtgctcctctccaccggcggccgttccgactccgctatcttcttcgcggtgattctggaatacatcggtttcggcttcccgctcgacgaggccgtggcccaggccgtgcgcgaactgcgccaagcctacccgaagtccagctacaactgcatgattcagtccgaggaccagctcatcgccctgtgcgccgccggtcgtgagaagaccagcccgcgcatcgtggaaatctacgatgagtacggccgtggcgagcaggccgccgactaccgtgtgatgcgctaccgtgagctgcgcgacgacaacggcgactccgccggtgtggtggtctcctcttccggctatgagcaggaaggctggaacgtgctggagaacgaccagatgatcatcgcctctaaccgcaacggcacctaccgtctccgttccatctgaaatagcttcataagccgtctctgacgaggggggctgtcagccgacagactgactggggggggggaggcccctagagcctcaaatcatccgcatcccatacttctccgccaacgccggaatatccggcacgccatacttggccaccagatccagccatcgttgtttgttctctccgccaaatcgctcggctcgggccgtatacgcctcgacctgcaggaacttcggcggcactgacttgctatggaacttgtcggcgtacatcaccacttcctgctcgagattcatcggcacatagtcggctggtggcaatggcagctcctggcgcaccacatcctcgcgcgtaagtcccacgccggtatggttgcggcagaactgggcgatggactcgtccacgccctcgtcgagcagatactcgtagcccttaagaccgtgcagaatgtagcgtttcttgctgaatttgagcggttcgtcgtcagagccgtcatgcttgaacacgcggtaggtgccgatgtcatgcagcagtccgccgatgagtactaaatgctcgtcgagcagacgcggcggcacatggccgccggtgacgcctgcggtgggcggtacctccgcgtccttcggtaatgtgcagcggcgcgtgaacagcgcgttctgccggcgcacgatctggcagccgatggtcgccacaatcacgcaatgcgtgtgcaccagctcgtacgccgccttggacggcgcgattttgcggtgcaactcgtcgatctgctccagtgtgggaatatatccggtcatgattatcaggtttcgcctcgtacggtcagatttatcttcagattagcgcggcaatgagccgcggcaggattgtcaggagctgattcggacatctcgacatgcctatctccgtttcaaggggctgattcggcatcctcctgaggtctacttccgtttcaaggggctggtgcccaagtatacgcggcgtaaaaacggcggaatgacgttggcatgaagccgtttatactcggggtttggcggatgaccagccccttgaaacggaagtagacctcccggaacacgcaaatcagcccctcgaaatcgaaaaagctcacgatgtttggtatgtatccgaacatcgtgagcttcaagagcctgtgctggtgtgtctggtgtgtattgctaccggacagatcagatcttgaagagtgtgtcggctgcttcggcgatctcgcgtgatgcggtgagcacgataacgcaatgcttcgggtcaccggtgtgcgccagcttggccagcgcggcgaacacggtcacctcgtcatccgcgttcagccctcgtgtcggctcgtcgaggatcagcacttcggcctcggtgctgattgcacgggcgatggccaccaaacgctgctgcaccaaaggcaatgtgccgacggccacgccgctggtggcctcggagaagccgaccttggccagcagttcgcgggcgatcaccggcttgggcttcaggaagttgcggttggacgcctccatggcgtacagcacgttttgttcggcgtcgagcttcggctgcacggcgtgcagctgcggtacgatgcccagacggtggccgcgcagttccacgggctcgagctcaacaatgttggcgctcttgttcatcaccgtgccagacaccggcgtggccaaaccgctcatcacgcccatcagcgcgcgacgtttggcgtcggcggtgatgcccgaatcggggtcgtcgctgatcagcagcgcgtatgcgtgtccggagtagcagaagaaattcgcgccatcgaggatattgaccttgcccttggggccggcgaccgtcaccttgttcagggcaaaggtcgggtaggtcttgagcagaatgccgtcggaaccgccgcccaccaacacgcgatcgatacgcgaggccagcgtcatggtgggttcggccgctttgccctgaggctccgcatgctcggccaatgcgtctttgtgatcggttttggccagtcggagtgtttcgttgacgcgggcggcattgcgctcggtcacttcggcggatgcgttgaccgaagcgatggcgtctgcttcggcctcactggtctcgtcggtttctccggtttcggcagatgccagtgcgctgtaaataccatcgtcaacagtgccttcgtcatcaacgtcatcgaaggtcacgctgaactgcacggagtcagccggaacggattcaatggtgtcgttcgtctcagtctcagaagtcacttcgtcagccgttgcgtcagtggtcttctcgagttcctgatcgttgttcttgtcgctcatgcctgtgcctccgcatcgtcggttgtggtggtcgtcttattggcctcgccggcatcatgagcggtggcctcagcagcttcatcggtctcggcagcgccagtggcttcggccgcttcaatctcctcggtctcgctcacggtgccccagtcgccatcggcggcgaacagcttgttcgcgctgaagaacgcaaggcgcagggcggcaagaatcgccaggatcaggattgaacccagtccataccagaccatggtccaaatcaggtccgatgtcaccgggatggcatggccggatgccagagcaggtccgatcggcttggcggcgaacgcgcctccgaccagaccaattacgtagaagggcagggtgacgatgaacacttccagcatgaattgccatcccaaacgcccgcgagtgacgccggacaccagtgccatgccgatctcgtcgtcacgcttgggcgcccacacgcctgacagcacgaggatgagcaacagcacgccgcccacggcaaccaacgcaatggtgccggtcttcgcgcgcgaggatagcgtatccagcggctccagagaagcgttgtaggattccagcgaaggggaagacacctcgtatcccttggcgggcagcttggacttcttgagggtggataccaaggacttgtatgtagcgggaccaccggtgtcgaacaccacgtccagatccggcaccgcccagccggaggcggtcttgtcgttggactgtgggtcgagtccggccttggcgaaggtctgatagttggtgaagatcgcgttctcgcggttgcgggcggccgtcaccggattggcgacggcggattcggatgtgtacttgtagatgccgcgcaccttgagcttggccgtggtctgggcgtccgaggcggccgccaccttgagcgtatcgcccaccttcaggttgttggcggaggcaaacgcttcagagaccagtgcgccggtggtgttcgggttggaggacttgttgtcgtagctcaggtccttgccgtccacgatttcgaaggtaccgaggtcgctggccttggcggcatcctcggtccagaaggctcgccaaatgagctggccgccggtctcatcatcggaggccgagcccagcgatccgccgtccagggccttcaaatcaccgctcacgcgggccggcacggtttcggtaaccgtgaagttcaacgagttggtggccgaccggacgagcgtggcgtattcggtgtatgaggtccacgtcatgtaatgcttggtggaagccgagtccgtagcggagaccttcttccacgtagccgcagtcgggcgaatggccaacgtggccttctgctgatcgtacgcggtggtgtgtgcgttggtatcttcttgaatgatggccagtccggcgactgtgccgaaggtgaccgccaaggtgatgaacgcggtcagggccgtacgtcctttagaacgtgtcagggcccgccaggcgttgctgaggacgaacatctaattgcctctcccgttctcctaagccgaacaaatcaatacggctttaactattgttgcgtttagtgaccgttttcttgcgcaatactgttatactcctcaatgaagtctgagaacattctgacagcgatgtggtggtcatgaggggatttgcacccggtatgggataaaccctcggtctatttcggtggcatcggtacactggcatgagatatgcgtggcgtcacgtgtgctccggcatgtctgcgattccggattcacccggagtccggcatccggaagcgtggcctcgcgccgttggataagagtatgagctgagcagattttcgggtaggataagtatgcgattcacttcagggcattcgagccataaggctgtggggcgtaggagaagccgccatgccggtaacgggaaatccaatcgctccgcatctacgaatagcgctgcaaatcagcagacgggtcccgtaaaactgaagactccccagcacgtgggtggcaacggccgttcgctgatcagccgtacgccgatatgggcgcgagtggtggttgtgctgctgctgacgttgctggccagcgtcacctgtgtgggcacgctctacgcggcatccgtctcgagaatggccacggatgcgcagcgtgtgctgacatccgccgaaagtctggccaattcggcacttggctgcggcagcgataagagtctgtcggacatctcccaagagttggtcaatgccaccagtgatctcaacgaggagctgaacggcccgcagtgggacttcttccgcgaccattcgcgatttggcaacgacatcaccgctgcccgcgaaatgctggcttccgtggatacgctggtcaacggtccgttcactgatctgctgaacctgtccaaacgattgcagggcttctccctgaagaatggctcggtggacgtcagcgccctgatggatatgccggatatcgtcaagcaggcgcataaggatatctcgcagcagctcaccaagctcaacaaggtgccgactccgagcgtcgccaaggtggccaccgtgctcgaatccgaaaaggctgcgctcaagaccgtggattcgatgctcagcgaatacgatggcctcattaacttgctaccgcaactgcttggcgaggacggcaagcgcacgtatctggtgatggtgcagaacccggccgagctgcgttcggcgggcggcatggtgggcaccatcgccgcaatcacggcagataagggcacgattaccatcggtgatttcgccaccacttctggttgggacattcctgaaaagccaatggatgctacggtgctgaaggagcgccaggtattcggtgacacttttgaccagtacccggccaccacgaccatcgaccccgaattccagcgtgtggcacagatgaacaaatacatgtggctgtatcagaaaggcaacgaagacgagaacgtagcgggtgtattgtcattcgatcccgtattcctccaggcattgctgggagccacaggcaaggtcaagctttcggacggccgagtgctggatggcaccaccacggtgccgttcttcgcttcagacctgtacacggattacccggacttcgagcagcagaacaacttcgtttccgaagcggctcaagcaattatgaaccacgtgcttggtaacgcgaatgcttccaccgcatccccgctgttgaaggcaatcagagataccagcgctagcggtcatttcaagctatggatggctgatccggatgagcaggaggcgctgattgccaccggacttatcgacgataaggccagtggtgagctgtctgctgacagtcaggtgcctgaaaccggcatctatctttcggagctgcagcaaggcaagcaggattggtatctgaagacctccaccacggtcataaagacttgcggtgacgtctcggccagccggaacgccctgtattctggcgtgctggataagcgcatcacgacagccgtgcgtaacacgcagctgggtcagtttacggaagatcagctcggtgacgaatacacggtcaccttcaccatgaagaacacgctgactaaggctaaggccgaatcgttgcctgatttcgttaatggcggctcggagaatccagtgctcggtggcatgctgtaccgcgtggtgcttaccgccccgtacggtggcgaaatcaccgctgtgcaggctgatatagattcatggggtaccaacaccgcgagcctgtatgaccgtcagtacattatgttcaaccagcagtggatcgagcccggaaaagaattgacgattgcctataccgttcgggtcagcagcgatgccacacatccactgaacgtggtaaccacgccggtggtgaatgcggatggcgtcgagacgggctccaacggtaaggtgacggatgagtgcccggccgatacgaacggcgccgatggtgcgaacggcgccgatggtgcgaacggcggcaagaacgacgcgcataagggcgcgtcctccgatccctcggccggcctggacaccttggacaagctgaagagccagatcagctgcccggtcgatctgaagtccctgacgggatccatgtgatgaccatgcccgattccgtttccggcgtcgccgtttccgacgccaccgtttccggcgtcgccggcaggccgcgcgacgtgaactacgatctgctgcgcgtggtggcgatgtgcctggtcatcggcgtccacgtgatcaacaactacatgcccgtcaagatgaccctcgccggcagcgcggaaacggtgcgatccgtgctgttcgcgttgttcatggtctgcaatccgctgttcattatggtgtcgggccggttcaacctgacattcgatgccgaccggccggtgagcacccactcagcgggccgtctgccgggctctggctctgatgcccgggcaggcggcggtgccggccaagccgatcccagcagcctcgcgccgtacgtgcgctactactacaaacgttttatctcgctgattgtgccgtatctgctgtacgcgggcggcatgggattcgtcgcctacctggtgatcgatcatcgttcggttggcggcgctgtgtctggaacgttgtttgatctgttttccgggtatgacgattccgtctattggttcgtattcatgctcgccggtttcgtgttggcgacgccgtttctggccgcgatggtgcgcgcgataggccggtcgggtgcctggctgctgatcggtctggccgccgccgtggccgccgccgagcagatctgcaatcttgccggatacccgttgacgttcctgcagtcattcccctggcggggactgctggtctactatctgttgggattcgtgttggaatactatccgccgtccacgcgggcgcggcgcggcttgtatgcgttggcgccgttcgccctggcgtggaccgtcgccacgccgtacctgttcgccggccagcagatccaggtgggccgcacgctcacggtctccttcgcggtggtggtggccgcggtgttcctgttcttccggtacgacgtgcatccggcgtcggcgcggctgcgcagggcgatcacctggctggcgggatactcctacacgatctatctggtgcattcgccgctgtccaaggtgctgatcggcccgcggattcccgcgcccacggacggatggtcgtacgcgggcatcagcgtgctgatgttcgcagccacgttgctcgcggcgttggcgttcgcggtggtcgccgacaccgtggtactcaagcctgtgcagcgtctgctgcgcaacgttggcctgccgcggaagggccgcctgtagtaggcggtcgttttcactgcccttgcgcgcggtagcgggcctcggtggcctccttggccggcgcccaccagtcgcggtgttccgcataccaatcgatgacgtcgcgcagtccgccggcgaagtcggtgtgcatcggcgaccagcccagttcggcgcgcagtttggatgcgtcgatcgcgtaccgtctgtcgtgcccgggcctgtcgtgcacgttctcgccggtgctgatgtggtggaaacgcacgtcgtgtttccgggcggcctccagcagccgcatcgtgccttccacgttcgtgcggatgaacggttccggattggcgatggaattatcgttgtgcgattccgcggcgaagtggacgatggcgtcgtgaccgggcacgatacgctccaacagcgcgacgtcgcagatgtccccgacgacaagatcgacctgcgacggcggcaggccggcgatgttctccggattgccggcgtacgtcagcttgtcgagcacggtgatgtgcacgtgcggatggctccgcgccacgtatcgcacgaagttcgcgccaatgaagccacatccgccagtcgccagaatattacgcggctcgaatacgccgccgcacgccatgctgttcaccattccagcatgccgtcgcatgccaacggctgcggggttcgggtgtggacgtcgtcttgcacgtattcaccggtactgagtccaaggaaagggctgcggacacagtcccctctccttgttgtgccgtcataccggaatcccaatcacctgttctcgaagatgcgtgcccatgtctccatggaagcgatatcatggcttcggtattgcgcagatagcttcttccagttcctcaggattcggcgtgcaagtcggtacccttcaagcatgtttttacggaaacgcttattgtctcgtttcagccacgccacgccattcccatcagccgtcgtgaccagcgccgaattcacgtgatcaaaagccgaccaagtccaagtggcatcttgtgcaggaatgatgccgtcagggcgaaggactgtattcggatccacatttgaaataaaactcttgatgatgagtttgatggcagagatgtagattctcttcatagttgaagggtgacttctcaagggctcaatttccccagcaggctccgggaacgcctcgatgctgtctgcagcctgggcgtcgggatagttcgcgcggaatttacgtatctcgctgagttttgccggcaggcaatcaacaaaatattgcgggcctcggagaatatctttcaacgccatgtggtgcaacgccatggccgaatagataaaacgaagacccaaactggcgtcggtgtacaaggtctccatcaacatgcgaggagggcggtctggatatgtcagcagagcggtgatccatcggttgcgttcggtgaagtattcttcccatgagcgagccggatccttgtcgtgccacgcctgatgccacactgccacacctggcagacacacggttgggaaaccggcgttcttggcgcgtaatccgtattcgatatcatcaaatttgataaatgcgggtatcgaaagaccgaccttctcaacaaccgtgaccgggattagacacatccaccaaccattgaaatcctcgtcgatgcgttggtggcgctcaggagaatcacgaagcggctccatggaaaagtcatggttgtattccaaacctttagacggctgcatccacatcctctgttgattgatccgttcaccttgcgtatatagcatggtgcggttatccaagtgaagcatgcctccacccacaagcagtggacgtattgtatagtcagcgaactgtattgcgcgaagaatcgattccggttcgctgacggcatcgtcatctaacagcaatatgtagtcgctgctgcctgccttgaccgtttcatacattcctcgggagaagccgccggaaccgcctagatttgattgttgaacatacgtcagctgtgttcccagctctgccgacacctcggcaaagcctttttgatctttcaccagatcgttgccttgatctgtgcagtacacagtatccaatcgattccgtagcgcggagtcctcggcaatcgttcgtaattggttcatgcaatatgaggcacggttgaatgttgcaatagctatagacatggaagtgccatgacgagcagtgcgattttcgcatgggacagaccatatggcatcagcaattgctaccgttcctccaagcgattccgcatcgaaccagaagtatccgccatccatcagacccgacatcgggatatccatattgatggacattgctgattccgaagctgctacaatgcgctctgcaacagggtagatcagaccccgtccggttgagcggaaaatactgatctttgcgtttccttgaacggaaaccccgaatcgtacagtctttacgccagtccaacgacgccaatatgatgcaggaaacgcattgaagaatgtacagcacgacacatgcccatgattctttagtgcaatcgaggtgcgtcccttgacatcaaattcattacaggaaacctcgttggagacccccgagtttcgaatcattcgttgcaacgtagactggttcatggattcgaatgacacttgacgagtatcgattcgagcatccaaagtggctttcgcgatgtgggggcgagtccagtcgattgcatacaaaggaagagtctgctcggcgtctttggtcgggtatacgactcgcatgaccgtttcccacgcttgtctcaagccagtgtcttccaaagaattattctggatcatgcgtattgtctcctgctgtgagtctctgccgtgctaacgatgatagtccatctcgaataattcgtcgcattccgagcaatcaactgcggtcgcttgagaccacattcggaatctcgatcatcgtgcggctcgattatggatgcagctcatacaggaaagggaacgacaccgctaatcgtgttgtcgttccctttcctatatctgacgtgatgcggttctggattattcgtctgtcctagaatccatcgtctgcggggtagaagcctcgcattgctcatccttgataaggttaatcgtcattgccgtgtcgttcaataatgcgtactgacgattcttcgaatcacggatggcgaaggaacatgaattgtcatcattggtgaaggcaatcatatcggacggcagcttaggattgctatttggagtacgcaacgaagccaccaatttgaaattgccgttgttgaagatattcaatggcaattcaaagtgtgcgacgcgatgtcccggcttcgtcatcttaagtgtattggcgcctgtatcgtatgatatgccgccacgtttgatatcgtggagcgcaatggccagatagaatacggtcggttcattgaactcatattcgacatcaaatgtgaatttgtcggagctggtgcatattaacggacaagtcggaataatccgtaatttcggcacgcgcttattaagaccgacggggaagcggctctcgtctttcttttccttctccttgctttctaggttctccagagtgtaacgatctgcgacatcatccttattccctgaagcgatgataacgccatccttaatgagaatcgccttgttgcagtatttcttgaccgcactcatgtcgtgtgtcaccaaaatgacagttttggtgggatcatgtttgacgtgcgcaaagaagtcatcgcatttacgctggaacgcctcatcgccaactgcgagcacctcatcaagtacgaggatatctcccttggcttggatggctacggaaaacgccaaacggacttgcatgccggaagagtaattcttcagcttctggtccatgaactcttcaagctctgcgaattctacgatgtcatcgtacatggcgtcgatttcatcgcgagtgaagccaagcagagcaccgttaagatacacattttcacgaccggtgagttcagggttgaatcccactccaagttcgatgaatggcaccaacttcccgttgacctggatggtgccggagtctggaacgtagattccagagatgagtttcaggagggtggattttccagagccgttacggccgacaatgccaaagaaatcgccttgacgcacttcgaaattaatatcacgaagcacatgctgttctttatagcctttgatgcctttcgcccaattgattaccaactgcttcagcccggtggcctgttccgtgggcagtttaaaatactttcccacatggtttaccgacagcacgacgggagaattggattcattggtggtttcaacggttgaggaatagtcagtcatagagttatccattacataacctccgcgaatttgcggttattctttcggaatacatggatacccagccagaatatgagcagcgcaagagcaacagggatcaatcctgttgccgcatgagcgctaagcgtccaaatagttgactgcgtggccggtgcgataagattgtgccggatatcctgcactgtctgcgcaatcgggtttaacaactgaatctgggcgatgcgcttgccgtaaggttgcaatgcctgattatccatcaccatgttgagcggatagatgacgggcatggcgtaaaacagcacttgcttaaggacatcccacaggtgggcgatgtcgcggaaatacacatacatagcgctcagcagtaaagcgatacccagagataacatatatagttcgatgaagttcagtggtaatagaatcacgcgccatgtaaaccgcacgtgattgaatatcgcgaaaataatcaccaccaccaagttaatggcatagctgataagcgcgccgatagtggaagacaccaccacaatgtaattcgggaagtgaatcttacggagcaaatcgccgcgatcgactactgaacggagaccaacggaagtggcttcctctatgaactgccacgtgctgatgccaagcagcaacactacaggatatgtaggagtgccatcagacatgcgtaggaatttggcaaacaccacatacatcacgcagaacagcatcaagggtttgagcaccgaccatgcgatgccgagaaatgaaccctggtaacgcagtttgaaatcggtgcgcaccagctctcgaagtaccactatcgaataatggtaacgttttctgagtttttcaatcatacttgtcacgaggccattgtccttactgattgacggcaaaatgtctgcgttgatccgtcagtgtgcggatttgctgatcggcgtctgcgggaagtcgatctgcggattaaaactacgtgcttccagcaacttgccatatacctggcgctggagcttcttgtccacgttgcctcgacgcatgttgttgcgaaccatcgcacagaagcgaagatacgggtacagaccttcatgatgcaagtggtaggaagcctcattccgggcgccgtagaggaatttccatacgttcttctcgttgatcatgccaaagttcacgcccctgttcacgcccatatcgtgcagcaccacgctgtcaagcacctgcacgccggggcatgctctggtgatacgcagcgtgtactcggcatcatcgaaccagatgaagtattccttgtacggcaggccgaatgcctccatgacccagcggggaatcaacacggaaacgaaggagcatcggctgaccaagacgatatcgagacccttggctttaaggcggccccaatcccatgtcgggatgggattgttcatctcggaaatggtgccgtcgatgaatttgaccagggaacaggcgaatggcacgtctggtccaagttcggcaaccgcatcgccgtatcccttgaagagcttgtccagagcgtccggttcgggatatccgtcatcatcgaagatccaagcgtaatcacacccgatctcgtacgcccgacgcatgccagcagaaaatccaccagcgccgccctcgttcttctcaagggtcacaatgtcaagctgcaccgaatccgaatacttgaaattggccgcatattccttcaaaaaggaatccgtgccatcggtcgccgcattattcacaatgaccaactgatcgggcaaccgtgtctgtgcttccaaagaagacagaaccttcttcagtttttcaagacgattgaacgtcactacaaccgctgcaattttcgtattctgcattagtggctccactccgtcaacatgttgcggaaatattcgtttgccgactgcaattcagagaatttctccagccgatccttctccgcctcccaaagtttcttcctgttctcttcgctctcgagaactcttcccactatagccgtggcatcatggacgaactgagcggaccctctgcggcacaatccctgcggcggcacaagcgtatcctgcgaacccacgttcgaagaaatcacgggaatgcctgcggacaccgcctcaatcgtggtcagagtaatgccttcattcatggacgagacgagcagtatgtccgtctgtgcataggtctgactcaccggcgtggacatggaacaacgttggatgaccgtcccgaggccatatcgttcgatgagccgatcgacgaattcatccatatcgccattgccctgcatgatgaagcgaagcttgccggggaacttcttgttcagttctcgcaccgcgaggatgaaggtctccgggcgtttctgccggacgttgcggcccacgaaactgatggtcaggggtttggagatgtcacgggacttgaacgtcggagtcttgctgtcggcggtaagaccgacaagaggcgcatccaccaccttcttcggatcgatatgatgaacatcctccatccaatgttcaagctggggagagatgacatggtgtatatctatccatttatcgcgggccacggactcactggggtatccgccgtggaaaatgtattccacaatatgcagggaatcgaccacgtgggtttcggggaagtagcgctttacccaccacacgttgtcgtacatccactggcaatgatgaataagcacacccacgatattgaactgttcgaatagcgctcgcagcaacgtggcgtccccgacacgatcctgcaggggcaaagtgagcggcaacaatacggcatcatcaaactcgtgacgtgtaatccaaggttggtggccatcggaatccgtgataatgattggcagcagccccgcctgccgggcgagggtgacggtctccatcgcccaacgttcggccccacctgattgcagccagtgcattgcgatgattacggcttttggcgcatcaggcgcggcctttcccggaacgatctcgacccacggatgatggctgtatccagactcattaactcttgtgatggtagcgggttcgaatggcgcaatggccgttttgccgattcgctcacgttgcactcgttttgcttcgcgcagcatgtcgaagaacgctggcgcctcggactcgactttacggtacaagcgagcatgcctgccgacaggtcgattctgttccacatcatcatcggtggcgtcgtcaggagtcaacagcagacagcgaatgttgcgatccacaagttgttcatcacctgcgaaataatgcggtgaaaaataggatttctccttgaccgaggaagtcgcctgaaatactgcaaaaggctccagtccagcctgctccgtcaatacaccattcaacgttgaagtgtcggtcaagcgaggatactgccatttctgacccatgtacaacttatacgtaagcgttcgtcccggctggattagagcattgtagtccactgctccgagtgtcagacggcgttggcgttcactgagcttttcaatcaggcgcgcgccttcttcgtcaatatggaaaaaatgtcgcataactcttatggtagtgaaaggcatgggcagagacccatgcctttcactcgagaacatcatccgggatttggtcgaacgaggcaattccgtcactgctgatgttcggttaccgcattgcatcgctgcggctgaccatcccattgtcgtgattgttgtcggaccgcaaagggcacccattgggagatcggcatcaaccgtttgaccctatgaggcgatagcaacccccatatcctgcaatcaaaggttctcagtggattcgtgctgcatcggagcgggaaataccgattggcgcactctatacggtacgacttgttcagtacagttgattggcttcgcgcttcttctttcgagcgatacgtagcgactcggcagggaacttcgagctagccgttgcggaaaccggggcgggatggtccactgacacatccaagttggcccagccagtgccgaggtccatcaaagatccatgttttatgtcgtagtattcattcccgaatcccatggcgattccccgcgctccggcgcatgcacccagcagatgcatatggaaacgactggagatccaaaccgtgtcggcggcattcgggaaaccataattccatagatggctgaaaggaagaagccatacttcaccgggccattggtccttgaaaagatccagcgaccatgaatcttccggaggaatcgcctcaacgaggaaaatcggctcacttttctctactcccgatagcagtagagaatcgactgcggctttgacggctttcgggttgcgacccacgacatcttgttggaggcatacgaaggcgcgggcagacgcattctgctccaaccagtcagatcccgtgttcgcgatttccagaaacgcatcatcaaaaccacgttccgtgcccactatgtccgcgcttctgctatctcggacgctcatatgatcaaaggcggtaagacttgttcgtgcgaggaacaggtcgattcccttcaaaggcgcaagtcccaagccggttccgtagagcaggactttgggattcagctccttcaactgggctaatgccaccaaaagcagcacgttagccttccagagctgattgatataaccgccgccgaggagatgaacggtatccatgctgcgcaacagatcgatgccgaaatcttcccggggtgttcccccatcgcgaatccagccccgtatcttctgcgccgccgcctcggaatcatccaacaagtcggaagtattccaaaccaactgccataatgtgtttacaacgtgtaaatgaggatgctcatccttcagcaacagactggagtgactggggttgggacaatccaaccaaatctcgctatccggatcggacttcgccaagaaacgaatccaggctcgagtgatgaactcatctccccaattcggctgtccggctgtggaaacaagataatgacgccttgcgcgcgacttcctcgggcctgcattaaaccatttcatatctctaagtttaaacatgagatgtcgggaaggtgtcatgattatgttgccgcctcaacatggcgaaactgttggtctcgatgatgaatgccttgcgatcgttcttggccatgacatcaaggacgacacccgtcacgaacagcagcagcccggcgatgacaagcatgaccgctccgatcagcgtggggaagcgggccaccatgccggtgttccagaaatccaccgtcaccgtgccgcacagcacgacaccaaggatgccgaggacgcagccgatgccgccgaagaacgggagcggcttgtattcgcggatcatgcggaaaatggtgcccatcaccttgataccgtcgcccacagtatcgagcttgctgaccgaaccttcggggcggtcccgatactgaatcggcatctcataaaggcggaggttgttgttcaacgagtggatggtcatctcggtttcgacctcgaagccgcgcgacaacacaggataggtcttgacgaaggtgaacgagaaagcccggtagccggtcataatgtcggtgacattggcgtggaacaagccgttgatggaaccgcgaaccagacggttgccgaagttgtggaagggcctcttgttctcctggaagtacgtggaactcagtcggtcgccgatcaccatatcgtagccttcgaggaccttgtccaccatggccggcgcggcgtcggcggggtacgtatcatcaccgtcggccatgacgtacacgtcggcatcgatgtcctcgaacatggcgcggattacgttgcccttgccctggcgcggctccttacggacgatcgcgccttcgcccgacgctatctcggcggtgcggtcggtggagttgttgtcgtatacgtacacgtcggcatcgggcagcgccgctttgaagtcgcgcaccaccttgccgatggtgacttcctcgttatagcaaggaagaagcacggcgattatcggttcagctttctcggacatgaggcccaagtatagcgtttgttgcgaacgacataatagtggtgaaaagacttgttctgctggtctcccttgtctgggacgtgcgggcgagagcatgccgtacccgttttcaacggatgcggtacgcataacttagtgatcgaacggtggggcgtccggccactgcttgcgcgttggatgtctgctcggagttctgtcgttccctgttgcgctggcgcaacaggatgagaccggttcatgtcaaaggttatccttgttcctcgatatcgttggcagaaccgcttcgataaaatggcaggtgttgcagcatggtccagtttcttggtgtcttctctttgagaggagtgaagagaagattggccggggctttctccatctgagtgttttaactatctatttagtaattagtaaagaaagacgacagaatgatgatctggttgagtttttttgttgcaatattggcaacggttttcatcctatatgcgccgggcttccttttgatgaaggctgctaggcagacttcaatcaatgccctggctttcgcgcctccgctgactttagcgatatatgcgatagttgagatcgttctatccaaggcgggggtgcctggcaactggtatacgatcttcctgccattccttattgttgctattcttctctttatcttctcaatatgtatgaggtacaaagaaaagagaagcatcagatgcgcgctgaccaatctatcagatacgttcccgtattggatgatggttgttctatatgttgcagtcgggtcggttgttagtttaatagtctttattaggcatatgcatggtccgaattcatacactcagttgtatgataacgcatggcatatgggaatcatacagaaattcctcgctagcggagatttctcgacgctcaatgcgggcgatattgtggcaacctcgggctctacattttatccaacaggatggcattcattggtggccttagtggcatcgatgacgggattttctgtgcctgtttgtattaatgcaagcatatttgttatcctgagcatagtatacccgatttccatgttcgtattggtgggcaagttaagtgcatacaataacaacgttattgtggctggagcatttacagcacttatgtttgctgcattcccatggcgattcctgacgtttggacccctctattcgaatctgctttctttcagcatcataccgttggtaatcactgtggctcttaatatggttgaagcgaagcggggcgttaaagaacgtattttcttggtttccgtcttcgtcttgtcaactataggtgttgccgtgacacagccgaatgcggtcttcaccatgggtctactcgtagcaccttatatcttccttcagattcccggttatctcgaatatgccggaataacaaagcatcgcaatattgctgttgctggcgcgtgtgttgcattgatgatggcaatagcaggtgtatggtcgttaatctacaacgcgaagttcatgcaaagaacggtgacctggcagtggccgtcatatgagaagaagatacaggcgtttattgatattgccttcgttggtttccgcaatgctgagccacagattctgcttggtgttctggtgcttataggaatggtctataccgttttccataagcatcttctgtggattacctgtggctatattattatgtgcggattttatgccgtgagttcctccaccgaaggattcctcaagaacgttctcactggattctggtatcacgatcaatatcgtttaggggcttctgcggtgttctatggagctgttctggctgcaatgggtctgtggaatctgatgatagtcatcgtcagattggttcctgagaacctgataggtgcgtcgaactccaggaacaaatgcattctatcgacgttctgtgttctattgattgttctggttaattacttcccttcgttctatctgagcggcagaggagattacgttactgcgttcggtgccatcacgcgagatatcagctactggaactctccctctgaacccaaaagctatacggctacggaggccgctttcgttgagaaggtaaagaaggttgttccaaaggaagcgattattctcaaccaaccctacgacggtagcgcctatgcatggggccagaacggtctcaacgtatactacaaagcctgggaaggcaattggatgggtgctccttcagatgataatagtctgatcagtgagtccttggacaagattgcgtcgaatcgcgaagtgaaagaagcggttagaagagttggggcaaagtacctactcgttttggataagagtgatttcagtaaagataagaatgacgcttctatgatgaaatcaatctatgcaagctatcctgagcgtaagtggtctggtatcgatggagtttctgatgcgaccgaaggattcaaggtcgttctgtctcaaggagccatgcggctatatcggataacggtgtgacaaatgtgcggcaggatttatgcaaattctgccgcacatttcttttcctctatgtgatagatttattggggcgatcgtgtaaggatccaccttaaagcaaggatgctctgctgtaatgattcccacgaagatcgatcttcgtgttgtgtgacaatacgctgcttctatagagtgaaaagtcgtccgatatacggaattttccgtagtgatgcggatgctgcaaggcatgcggcaaatacgcacgtgcacagtaatatgttcagcaaggtcactgcaacagagctcatatttcccataaactggaaccatggcagcgactgcaatttgtgcagcaagattaatcccatgaggtgaagcatgtatatgccgaacgtattcatgccaattacttgaaagattctagaccagataccttgaacgttcacctggcccactgtcaacacgatcagtattgttgcgatgaatgttggtaacagtagatagccattttccacggtcaagttggtgccatgcgcggcgtgttgatatctctggatcagcaatgtcaaaacgtagcagagggcaatgccgatgcatgccttggctggagaaattgcagacaaaagatgtagggcatcatcggaatgttttgcctgtattcgctttagatgacgtccgattacacctccaactaagacgtacagtagaacgtatccgtatgggccgaagatgcagaattccccaagagaggaggtgagtgaagcataatcacggtttgtcatggttcctactgcctgaaggataaacgtcagggaatcctttcctactgtgaaaacagtcagaaccactaataatgcgttgaatgcgattttatgctctgcgtcaaaagctagtttcattacaggaagaacaagatatactgcaatcaacgcattcatgaaccagaaatatccagttggataatctccgaatcctccgccaagcaagaagatggcaagattcttcgccgtcactggatgtgatccgtcaacgaagatgaagaacgttgcggcaagcagtttccatattgtaaccacaataatgatgttcaatgttttccggtaatgcttcacctcatccatgtctcgggggagaagtagtgcgccgttcacggagaaaaacagtggcacgcagaccacgcatagtacagttattaacgttccggtaaaccctctggagtaatatcttgtatagaatgaatagtgaagcattacaaccaaaaacattgcaataaatttgatgatgtcataaccgatcacacgtttttttttcattagcctacgtcgtatcccttcggtatctgcggttgcaagtatcttacgattcatctctcgtgtcgcggctcgcatagcggtcaacaacatgtcggactcatgcaaaatttaagaacagcggtatagggataatagtaaaacgcatgcttgagaattcgagcgtttccgtcgtaatgcttcttccttcagttctccgaccgtccgcatcccgccaaaattgcgacctcacccccgactacagcctagcccgggtagggactccattgagcgcaccatgagaatcgtcgccgtgctcagggcttcgttttctttgctgtgaaaaaacgttgagcaacctatcagtgcccttgcttccggtacttttcctcagtcccggctttatccggcatccaccagctttcgtgcgcgcggtaccagtcgatggtcgcggccagaccttcctcgaaatcggtgtactttggcacccagccgagctcggtctgaagtttggtggcgtcgatggcatagcgcttatcgccaccggggcggtcgttcacatggtcgaagtcattggcgtcacgacccatgagcttcagaatcatgcgcaacacatcaatgttgttgtattcgccattggctcccacgaggtaggtttccccgatgcggcctcgggtgagaatcgtccagatggcactgcagtgatcttccacgctgatccagtcgcgcacagccagaccttgcccgtagagtttcgggcgaatgccggcaagaatgttcgtgatctggcggggaatgaacttctccacgtgctgataggggccgtagttattgctgcaattgctgatggtggtcttgagtccgtgcgtgcggtgccaggcgcgcaccaagtggtcgctggcggccttggacgccgaatacgggctggatggtttgtaagggctgagctcggtgaatttgcgcggttcgtccagagccaaatcgccatacacttcgtcggtgctgatgtggtggaatcgaatatcgtggcggcgggcggcctcgagcaacacgtacgtgccggtcacgttcgtgttgaggaatggggaggcgtcgagaatcgaattatcgttatgcgattcggcggcgaagtgcacaatggcgtcaatcgggggtactgcggctgcagagcgttggttcagcccagaaaacagggattccacaagctcggcatcgcaaatattgccatgcacaaaggtcaggttcgcggccggcacgccatcgagattctcgcgtttgccggcatacgtgagcgcatccagaacagtcatgtgggcctgcggatggttgcgcgccacccagtgcacgaagttcgcgccgatgaaccctgcgccaccggtaaccagaatgtgttgcggcgcgaatgatgggttggttgcttcgttggatgctttgttgactgcttcgttggttgagtcgagggcctgttcggaattgctcatatctaccaatcgtaacctgaggtttgcctgagtgcgggggcttatattggtggttgcgttgttctgcactctgtctttgtggcggcgaacgggtccgggcaaagacgcagaaatgtaagaacatgccatcgttttgccttgagtctgtcgtctggtcttggattgtgtccagtctgctggtaagtctaggaagattgccgatttgcaattgggtgagtaagatattttctcggagatcgaacataataattgatgtattgactttatgaaagggaatgcgcgcatgccggaaactactcaatacccagacctagtcattgtcggcgcgggcctgttcggtctgacggtggcgcagcaggcggtggagcatgcgggtgcccgtgtgcatatcatcgacgtgcgtgatcacatcggcggcaacgcgtactcgtactttgatgaggagaccggcgcggagatccacaagtatggcgcgcacctgttccacacgtccaataagcgtgtgtgggactacgtcaatcgtttcacgagcttcaccgactacgtgcatcgcgtgtatgccacgcatgacggggaggtgtatccgctgccgatcaacctgggcaccatcaatcagttcttccacgcgcgttacacgccggccgaggcccagaagcttatcgccgggcaggcgggcgagctggccggcaccgatccgcagaacctcaacgacaagggcatccagctcatcggccgaccgctgtacgaggcgttcatcaagaactacacgggcaagcagtggcagaccgaccctgccgagctgccggcggccatcatcaagcgcctgccggtgcgcttcaactacgacaaccgctacttcaaggacacgtgggagggtctgcccgcggacggctacaccaagtggatggagcgcatgatcgatgacccgcgcatcacggtttcgctgggcgtggacttcttcgacgagtcccagccgtacaacaaggaggcgctgaaggccgcgggcgtgccggtggtgtacacgggtccggtggaccgttacttcggttacgagcttggcgacctgaagtggcgcacggtggacttcaaggaggtccgttacgacgagggcgaccacttcggttgcccggtgatgaacttctccgacgctgacgtgccgtacacgcgcgcgatcgagttcaagaacttcaacccggagcgccgcgatgcccagaacccggacaagaccgtggtgtgggaggagtacagccgtttcgccgagcgcggcgacgaaccgtactacccggtgaacacggatgcggacaaggccctgtatgcgcggtacgaggccaaggccgcggccgagccgaacaccgtgttcggcggccgcttgggcacctacaagtactatgacatgcaccaggtgatcgacaccgccctgaccgcctacgaggaacaggtcgccccgctgctgaagaagtagaccgtcgtttcaccagaggattaacgatttagcttgaaaccgactgaatattgctgaggcaatagccggtttcaggcttctgtgttttttgggaagccaaatttcctggggtacttaaagctcgccacgaggagtacagttgtctgtaacgcacaatgtggcgcgtaagacgaggggcgtatctcgcaagtggggtgcgatgcagttgaaggagtgcatgtcatgactgatccgaatgccaatccgaacggccaggtgccggggcagcaagctgacgccaatccgactgagccgttaaatgcgatgacggggggaagcaggaaccgccgccaacaatgctccaacccaagcactcgcagcgggcgaacagcccactcaggcgttcactcctgttgagcagcctacgcaggcgtttacacctgccgagcagtccacccagcctcttgcgccggtcaatcagccggtaccgcctacgcaggctttgccaccagtgactcctgccgctgcgcccgcgcccgcaccggcagcgcccgcgcccgcaccagcagcacccaattcgccctatccggggacggctccggcagcgtcagtgctccggtatccgggcggcggggccgtgcctccgcaaacgccctataacccgtatatgcaaggcggccaaccgaacggccagccgggatggtctggttcttacggcagtgtgccgcctgaagcgaaccagaagtacaacggcctggctattgccggttttatctgctcgttccttgtctcactccccggtctgatcctgagcatcgtgggcctcaaccagattaagaaacagggcggcaagggcaagggcttggccatcgccggcatcatcatcagtgcggcgggcatggtgatacaggtaatactggtcatcgcgctgatcatcggcggtgcctcgtatgccagcaaggctatagatgaggcgaaaaccgattcctcctatagtcagtcctcttcgggcaacggtgatagcagcgataagagcaaagctcaagataatcttgacgatgcgctggacgacacgttgggcgaaacccatgacgatctaaccgacggcgattatgggctgtacgattcgattcaggatttcgtcgactcttcggaattcaaggactccattgaatccgaagcggatacgtttgcagataccggcatcaccttcaactaccgtgtcgacggtgacaccttggtgtacgagtacgtgctcgacgacagctacgcctcgctaggcgataccgtcgcttcctcactggatgctatggacagcacctatcaatccaccgcgaatctgctgggctcgatgtgcaagacctccagcggcaaggcatcattgcgcgtcatcatgcacacgcaaggcggccagtcgctgtatgacaaaacctggaccgaaaagtagcaatcccagcgaacgtgcgttttggtcgattgaaggccggtctgcttgctccttggacggatgcttctgcggaaggaactgccaaggagtaggcttacaggcatgagactcgcacgtttttctttgaatgattcgccgcgctacgccttcgtacaaaaggacgaaacggacggcaaggactacctcatcgaacttgacggtcatccgctggccggcgaccaggtcaagcccaccggcaaccggtacccggtcgacggcgacggcatccgcctgctctccccggtcatcccctccaaggtctacggcctggccaagaactacgaggcccacgcccagttcatgcacgaggccggacactccgaaatcgcccacgcgccggaggacatggtgatcttcaccaagccgtccacctcggtgatcggccccgacgatccgatcgtgtacccggcctgctccaaggacatgaacttcgagccggaagtggccgtggtgatgggccgtatcgccaagaacgtgtccgttgaaaacgcgatggattacgtgctcggcttcacctgcgtgaacgacgtgacgttgcgcgacctgcagggcatcgaccccacgtggacgcgcgccaagggcttcgatacttcctgcccgcttggcccgtggattgtgatgcgtgacgacctcgactggaaggacgc

SEQ ID NO: 3138 - DNA, 4736 bp, Unknown
  R215_18m  MAG No. k141_53123
ccctcgtacaccacgctgttcctcgacgaggcgctcatcaaggccgacggccgttacacgcagcgcgccctcacggtgctgccgcgcctcggattccaggtcatcgtctccgccccggaaagcaagaccggtgaaatcctcgaggtctccaccaaggcctacgtgacctacaaggaccccgacaccggcctcacctccctgtgcgaggccgtgctgcatcagaatgacatggacgatgaatcatcgtcggatatattgaaggatgacggggttgccgaatgagcagtcccggcgtcgccggtattaagacgattcggttcgactcgacgatgttcgaaagcaggtgatgggaactatggccggcatgaaagacatcgctgcgatcaccacatgcgtgaagaaacatatgcgttcacatatgtacgacatcgaaccggcatggccatttcccgtgccggtgggattgccggaccaagcatttttggaaaccaatgcgattgcagtgcatgacaacaacaatgagatacggcaatgggcaagcaagaatggttgcgaaatcataaccaagcatcgcaccataggcacctctgtcgagttgatctccaaagtcgtcgttcctgacgaatcaatagccatgcgtgtggttggtcgtacgctggcggcggaatatcgcgaagcgcaccgtcgcacagattccactgacaggattcagcggcaaatggctgaatgagtcaaaaaccaatcgtcgtaaggccatttgccgactgctcggtgtcgaaacgttgggtctgtcaaaacggccgaccgaactgcggttccgttatctcgatccgggccacgacgattttggtaccgatcgtactgaacgcagcgcgaagattgctatgcgggagcctaagccgacgcccggccttcaatcggcggagcgacgtctttatgaacgactgtgtgctgacaaaaccatcgcttatcggcgtatcgaacaggaacgcattcccatgcgtgatgcagttgacgaattacgcaagcttggcatccccgtggagtccattgaagattttgtcccggttcgaacatcaatcgtttgacggacgtaccggggcagaatccgttgtcccggtttgtgatttcgggtgtttttcgcgaaccgggacatgttgtgttgccccggtatgggcgcaatcgtttgatgcgagaatcgggacaacatggcgactctgagattggctttattccgccgtttccgttcgcgttttatgtggttcgtggaaactggaatgtcctggttctcgaaaacaggccaaaatcacgaaccgggacagcgggttttgccccgatgcggacgtcaaacgattgacatgtgaaccggggcaaatcagaggaggagaggtcttcgggatagagcttgactggggctgggcgcacggttgatgtcgcgtgggccggctcttgcgtttcggtccactgatggtccggaattttgcatactatggttcggttttccggcctgacacgccatcgaacaagcgttcgaatttggtcgtgtgttcgggtatccttgggacagatttggcgcgcgcataaccgtgcgcgcgggaacggtgagatggaaggtggggtgtggctgtggcggcaacgcggactggcgcaaggcgcgcaacaaacgcaaagggcgcgaaaaccagcaagggcaagaacggtgaggtcatcgtcgaaaaggtgatgaccagcgactccttcctgagccgggaaatcaaaaaggcgccgctgatcgaacacgatggttcgctggtagctgatatctcgcacatcccgaacgatctcaagatcacgattcagggtgcgcgcgaacacaacctcaagaatgtcgacctggcgattccacgcaaccgtatggtcgtgttcaccggcctgtccggttccggcaaatcctcgctcgcgtttgacaccctgttcgccgaaggccagcgacgctacgtcgaatccctgtccgcctacgcccgccagttcctgggtcagatggacaagcccgatgttgacttcatcgagggcctgagcccggccgtctccatcgatcagaagaccaccaaccgcaacccgcgttcgaccgtcggcaccatcaccgaaatctacgattacctgcgactcctcttcgcccgcaccggcatcccgcactgccccgaatgcggcgagcccgtcgcctcccagaccccgcagcagatcgtcgacacgctgctcggctacccggagcgcactcgattccagattctctcgcccgtggtcaagggccgcaagggcgagttcgtggacatgatcgagctgctgcgctccgacggctacgcccgcgcgctcatcgacggcgagatgacacagctgtccgacgacatcaaactcaccaagcagaagaagcacaccatcgaggtcgtggtcgaccgactcgtggtcaaggacggtatccgccaacgtttgactgattcggtggaaaccgccctcaagctcgccaacggcagcatcgtcatcgacttcgtggacgaggaggaaggcaacccggcccgccgccagccgttctccgaacaccgcagctgcccgaacgggcacacgctcgaactcgatgaggtcgagccgcgcaccttctccttcaacgccccctacggtgcctgccccgcctgcaccggtctcggcttcaaactggaaatcgacccggacctcatcatctccgacccggacaagtcactggccgacggcgtcatcgaaccgtggagcggcaccaagatgacctcccagtactacggccacatcctcgaaggcttggccaaggaaatgggcttctccatgaagaccccttggaaggacctgccggacgacgtcaagcacgacatcctctacggccacgacttcaaggtcaacgtctcctaccgcaatcgctggggacgcctgcgtgaatactccaccggcttcgaaggcgtgatccgcacgctcatgcgacgccacgacgaaaccgattcgcagtccatgcgcgaatactacgagtcgtacatgcgcgaagtgccctgccaggtctgccacgggcgtcgtctgaagcccgaggtgctctctgtcaccgtggacggcaaatccatcttcgacgtatgtgacatgcccgtcgtacgcgaactcgcctggatcaacggcctgaaactcgaaggctcggcacagctgatcgccggcgaagtgctcaaggagatcaaggcccgactcggcttcctgaacgacgtcggcctcgactacctgaccctctcgcgcgcggccgccaccctgtccggcggagaagcgcagcgcatccgactcgccacgcagatcggctccggcctggtcggcgtcatgtacgtgctcgacgagccgtccatcggcctgcaccagcgcgacaacgaacgcctcatcgaaaccctgcaccacctgcgcgatctcggcaacacgctgatcgtcgtcgaacacgacgaggacacgatacgccgcgccgactgggtggtcgacatcggccccggcgccggcgaacacggcggcgaagtcatctactccggccccgccaagcacctcatcgaagccaagcgctccatcaccggcgactacatcgcccaccggcgagagatcgccgtaccctccaagcgccgcaagatccacaagacccaggtgctcaaagtcgtgggtgcccgcgagaacaacctcaagaacatcgacgtgagcttcccgctcggcgtgctcaccgtggtcaccggcgtctccggctccggcaaatcctcgctggtcaacacgatcctctacccggtgctcgccgacaagctcaacggtgcacgcatcgtacccggccgccacaggcgcgtggaaggcgtggaccaggtgcgcaaggtgatccacgtcgaccagaacccgatcggccgcacgccgagatccaaccccgccacctacaccggtgtgtgggacaagatccgcacccttttcgccaagactcccgaagcccaggtgcgcggctacggccccggccgcttcagtttcaacgtcaaaggcggccgatgcgaggcctgccacggcgacggcacgctgaagatcgaaatgaacttcctgcccgacgtctacgtggactgcgaggtctgccacggcaaacgatacaaccgcgagacccttgaagtcacgtacaacggcaagaccgtggccgacatcctcaacatgcccatcgaggaggccgccgacttcttcaaggcgtacaccggcatctcccgatacctgaagaccctcgtggacgtcggcctcggctacatccgactcggccagcccgcacccaccctgtccggcggcgaatcgcagcgcgtcaagcttgccaccgagctgcagcgccgatccgacggcaaaaccgtgtacatcctcgacgagccgaccactggcctgcacttcgaagacgtgaacaagctgctcaaggtgctgcagtccctggtggacaagggcaatacggtcatcgtcatcgaacataatctggatgtgatcaaggaggccgactggctgatcgatctcggtccggagggtggcgacggaggcggcaccatcgtcacgcagggcacgcccgaacaggttgccgaatgcgaagcctcatggaccggcaagttcctgaagcccatgctttagccttccattgctgctgacctcgggtgggtgggagtggtatgttgctggacatgctccgggccgctcaggccaagtcttta

SEQ ID NO: 3139 - DNA, 16714 bp, Unknown
  R215_18m  MAG No. k141_60680
aactgagctacgcaggaatattcaattttcatcccgtccggagttacacattcaggtgagctcctgcgactgggcttgaaccagtgaccgtccgattaacagtcggatgctctgccaactgagctacgcaggaatgtctgctgtgtttgagatttctctcgcgcacaagtcacacatcttacatgcttgccacgaaaaagcaaattacatgcgtgtatggcatgtcgcgctgaattccgcagaatcggactcatcgaatacccactcatacaacatgatgacgatgcggcgatactgtcacgcgaaatttcattgtggataacttcggaagctggaaccacataggtcgttctggctggacatcctgtttcggacccctcaaggtgggtatcaccggcaaagaagccggaatcacatcacactcacactatggggaggaatctcatgaatgcaccactgttgtttgattggcgtcgcgacgaagcccgacgtgccagcaggcggcgtcagcaggcgcgtcagcgggctcaggaacggcaacggcgtatggatgccataatcgcgttggccgccgttatcggcctgctgcttgccttgggagtagggctggcatccacgcctcagcatgttgcgcatgcggatactgcggtgaccggagatgcggcatacacggtggaggatttcaccgatatgtctgatttggcgtggcgcaatggcaatcagtgcgaatcccggttcgactggccggtcgacgatccacaggtcgaacaacagttcgagcggccgatcaacccgtgggcaccaggtcatcgtggcgtggatcttgctgcggagcaaggtaccgtgattctgtcaccacaggcagggaccgtgagttttgctggcaaagtagctggcaaagatgtggtgagtgtacggcatcgtggaggtgtcacgtcgacattcgaaccggctgttaccgagctctcggtgggggatacgatctcccgcagacagcccgtaggcatcgttgagggcaactcggaccattgcgaagaccgttgcctgcattggggcctcaagcgaggaacggccgactatcttgacccacagcaatatgcggggagtcgaaaaatcgtactgaagccgtcatgattcagcaatgtttgtcggccggaacagggctgtacggaagaggcatcgcaggcggctagcggcgtgacgagtatgaatcacagaccggcatcggccaaggagatatatctgggggcgatcagcgcggacttgagattgctggcgctgacagccagcaacggttcgttgatggtcgggatcttcttcacgccgcctacctcggagttcctgattgaaggcatggaattcagcgcttcgttcttgttgagcctggcgcaggcctgagcgatatccgtggcgatggtctgtctgtcttccatgccggtcatccattgcttgccattgacgatggatgggatgttcgagacgtacgcgccgtatccggtcaccagaggccattgcgagtcacggtccttgtcggaagcggaggtgtccttatccgcatcgtcatcggaactggatgagtcgtttgcgttgtcgttttcaggggatttgatcgggtccggcactgcgtcgcggctgagatccttcttgccggtgatattgccgacaatgcccgagatggtgatctgcggattgatatcggcggcagagccggtgtatcccagatcgtccaattccttgacgacctcggaggcgatatagtcgttcatcgtgatgatgccgtcaatacgggtgagtgtggactgcccgtcggtttttgccagacgcttgtcaagcactttcgcagtggagccttccttggcggcatcgtaggccacggcttgccaatcgttttccgtggatttgccgtccaaggtgcctgaagggctttccacaacgcccttctgatagtaggagcccagtacctgccagataccacggaacgcctcttgggcgaacgtggaatcgttggcgttgcctttttcgtccacggcggtgtatggcagcagcacctcaatgtatttggggttgtctttactggccttatccaacttgagtttggacaccatcttttccgcctgtagcttgccgatggtctgggcgtccgagaacttgacgaaggcgtccggcctatacccctcgatgctgttgccgagcaataccacatgcatgccggattccttggccagcttgagcgatgagaccagccggtccacggcctgcgcctgctcgtccgatgcagtgccgtcgctctcagtgttggacgagtcatctttggaagagctgtcttcggaagaatcaccgtcagaagtagctccctcatccgtggcatcgttggtgctcaggttctggctgatgtaatcgccgtattggcgagtggaagcgtcggcctcgactactggagccacgagcaatgtcatgttgtcgggcgcgatggcaatgccggaatcgtccgtggtgttattcgaaagatgatcgaccacaaagtcttggatggcgcggctttgcttgtccaacgagtcggacgtcgtatgatcgatatcgcctttcttgaaaccggcgtcgaccagggccttggttaggtcgggcaccagcttcgcccatttgttcagtggcgtctgctgattcagcgtaatgccgtccgaaggcgtgaacacggccacgccgccggcagaattggacgtcaccgtggtttgaccatctacaacggtcttattgtctgaggtgcacgcggtcagtgacagcaccatcgcgcaggatgcgacaatggcggcgagcagggtggttgagcggcgtgcgaacaccataagcggcgaaacctcctcaagcgggcgtgaaaacaaactgaatcacgattctagtaggccgtatacgaaaaagtcccggaccagtggacaaatcgccacatatccgggaacaattaggggtatttcgcgcgtgtatcgaacaactgtcatgattgtcgtgctgaggaacattccagatgaagcacgacaatcatgacagttggcgacatgacatgacccatgtaggtccgcacgatgtgttcgatgatttactcggccagagccttggccaggttctcgtccagcgcgttcatgaagccgtcggtgtcgagccacggttcgtccgggccgatgagcatggccagatccttggtcatctgaccaccttcaacggtgtcgacgatgaccttttccagcgtctcggcgaagtgacggacttcgggcgtgccgtccagatcggcgcggtgcttgaggccgccggtccacgcgaagatggaggcgatcgggttggtggaggtcttctcgcccttcttccagcggcggtagtgacgggtcacggtgccgtgcgccgcttcggcctcgacggtctggccgtccggggtcatgagcacggaggtcatgaggcccagcgaaccgaagccctgggccacggagtcggactgcacatcgccatcgtagttcttgcaggcccagatgtaaccgccgtgccacttcagggagctggccaccatgtcgtcgatcaggcggtgctcgtaagtcaggccggcctcggcgtacttgtccttgtattcggtctcgaacacctcagcgaagatgtccttgaattggccgtcgtaggccttcaaaatcgtgttcttggtggacaggtacaacgggtaatgacgcatcaggccgtagttgaagcaggcacgagcgaaaccgcggatcgaatcgttgacgttgtactgcacctgggccacgccgccgtcttcgccgtagttgtagaccacgtgctgaatcggctcggagccatcgtccggagtgaaggtgacggtcagctggccggcgcccggaaccttgaaatcggtggccttgtactggtcgccgaatgcgtgacgggccacgacgatcggcttggtccagccgggcaccagacgaggcacgttgctcatcacgataggctcgcggaagatcgtgccgcccaggatgttgcgaatggtgccgttgggggacttccacatcttcttgagaccgaattccttgactcgggcctcatcgggggtgatggtggcgcacttgacgccgacatggtgcttctggatggcgtgggcggcgtcgatggtcacctggtcatcggtctcgtcgcggtgctcgatgcccagatcgtagtagtcgaggttcacgtcgaggtacggcaggatcaggcgatccttgatgtccttccagatcacgcgggtcatctcgtcgccgtcgagttcgacgacagtgccttcgaccttgattttggccatgcttcctcctgatagatggtgtgaagatgatttagtcatagcgcatgtttgtaacgacttgaagcaatcgtccggtccgtgggaaacgaccttgttggcgtcccacccgggcaataggcttacaaccatgtctcaggaaattgaaatcggtttgggcaaaaagggccgtctcggctacgcactcgacgatgtggcgatcgtcccctcccgtcgcacccgcgaccccgaggacgtctccacctcttggcagatcgacgcctatgagttcgatgtgccggtgatcggcgcccctatggattcggtgaccagcccggccaccgccatcgccatgggtaagatgggcgcgctcggcgtgctcgatttggaaggtctgtggacccgttacgaggacccgaccccgctgctggacgaaatcgccgggctgccggccgatcaggccaccgagcgtatccagcagatctatgccgagccggtcaagccggagctcatcacgcaacgtctgcacgagattcgcgccgccggtgtcaccgtggccggcgcgctctccccgcagcgcacccagcagttctactccaccgtggtggacgcgggcgtggacctgttcgtgatccgcggcactgtggtctccgccgagcacgtctcctccggtcaggaaccgctgaacctcaagaagttcatctacgaccttgacgtgcccgtcatcgtcggcggcgcatccaactacaccgccgccctgcacctgatgcgcaccggcgcggccggcgtgctcgtcggcttcggcggcggcgcggtctccgccacccgccagaccatcggcgtgcaggccccgatggccaccgccatcgccgacgtggccgaggcccgccgcgactacatggacgaatccggcggccgctacgtgcaggtcatcgccgacggcggcatgggcgactccggcagcttcgtcaaggccctggccctcggcgccgacgcggtcatgctcggcgcgccgctggcccgcgccaccgaggcccccggcaagggcacccactggggttccgaagcccgccaccagacgctgccgcgcggctaccgcaccacggtcggcacggtcggcccgctcgaacaggtgctgttcggaccgagccaccaggcggacggcaagaccaacttcatcggcgccctcaagcgcgctatggcctccaccggctacgtcgacgtgaagaacttccagcgttgcggcatggtggtcaacccgtattccgcacgataatcccgattaccccccctgaaaatgggggtttgccctccatgcaggaggcttagcttgccctaaggcgcgctcaagtcgtttgacttggcgcgcctttcgtgatgttgtagtacaaacgctcgccgatgatggtgagttgcaagggggcttgaaggggtcatcatggagtattcgggatttttccacggcacatatcagtacgggccgttgccgagttatgacggattcatcgttgtggagctgtcggatcgcccggtgcggtatcatatccaacccacattcataggcgggctgaatgcgaaggaatgtcattccatggccatggctgcatgccgcatcgcctgcacatcggcggacgcgatacgtggcaaactcagcgtcgcacatctcaacagagccatgacaaaaccatgtctggaacggctgcaaaccatgcaatacctgctcggcacccacatggtcactcatccggagctcaaagcgaaattctgctatctgcccactgtccccacattgatcgacggcatgatcaccggcaaggacacgctggaaatggcggtattcatgaccatcggccaggaaaatctgcgagtcaacctcaaactgaagttcatcggttctcgatggatgtgcatctatgccgatctgggctgaccagacggccccgccctcacaccgattcctacgctggcagcggaagacggttctgccgtgtcataggctggttcgcctatagtagtgaccatgcgtgaacatgtagaagaacccagatatgtcaccaccgatgacgacaccgtctactcgctgctggccaaacgagcagctcgcacgccggatgacatcatcgcggaatggcaggatgacaacacccaccaatggcgcggcgccacagctactgaaatgctgtcccgcgtacgcgaggtggccaagggcctgttgggacttggcgtcaaagccggcaccatggtgctgatttactcgcctacctgctatgagtggggtgtggctgatttcgcttgcgcggcaatcggcgctgtggttgtgcccgtctatgagaccgattccgcccgtcagaccgcgggcatcgtcgaggaagtcgatcccgccatcgcctttgccggcgacttccagcgcgcacagacgcttgagcagatccgtgtcaatcatccgggcatgaaatacgtgttcaatttcaaggccgatggccttgacgctgtcgctgacttcgggcatggcgtatccgatgagacgttggatgcggctatcgctcgtatcaaagccgatgatctgcttaccgtggtctacacctccggttccaccggcaagcccaagggcgcgatgctctccaaccgcaattacacgcacatcgtgcttaacggctacgagattctgcgtggcatgctgtacgacgacaaccgtctgctgctgttcctgccactggcgcactgcttcgcccgctacatccagtacgtgtgcatcggtggctgcggcgtggtcggatacattcccgacgccaagcgactactcgccgatatccgcagcttcaagcccacctacctgctgggcgtgccacgtgtgttcgagaaggtgtataacgcggcctcgcagaaggctggtgccggcatccaggggcatatcttcgcccagtcggtcaagcacttcgtcaagtggagcaaggatgagcaggccggccgcggccattcgttcatcgagcgcatgcgccattcgttctacatggccacggtgggcaaatccattcgttccgctctcggaccgaacctcaaatggctggcctgcggtggtgcgccgctcaacgtggatttggcccacttcttcaacggcatggatgacatcaccttcatccagggttatggcatgaccgaaaccgccgctccgatgctcgtcaattgggaggacgacaacgaggtcggttcggtcggcaagcctgggcctggcatgggcgtgcgtcttggcgaagacgatgaaattgagctgaccggcccgaacgtgttccttggctactacaagcagcccgaactcaccgcacagacgatgactgccgacggctggatcaaaaccggcgatctgggtcgtatcgacgaccgcggcttcaccttcattaccggacgcaagaaggacatcatcatcaccgccggcggcaagaacatcagccccgccccgatggaggatgtcatcgacacctgcccgatcgtggctcatgcagtagtagtcggcgacggcaagccgttcgtgtccgcacttatcgagctcgaccccgaaatgctgcattcctggctggaaggtcagggcctcaatgccgacatgacactcgccgaggccagcgacaacgacgcggtgcgtgcctttatccagcagtacatcgaccaggccaacgccaatgtctcccgcgctgagtccgtgcgcaaattcgcggtgctggatgaggaattcagtcaggagcacggcacgctcaccccgagcatgaaagtggtgcgtcccaaggtattgcagcgctacgccaccgtcatcgaagaggatctgtatgcgcccaagccatccaacaaaccgctgcccgccacagccaagatcatcgacagcacgctggagaccgtcaagaaatcctccgaatcggtcaagcaggcgtccgaacaggtcaaacaggcctcggaacagatgaaaaccagcgtgtctgattcgattgctagcgtgtcggagaagatcaagaagtcgaaggccgaacccgaagagggcgagaccggcgattccgccgacaatgccgacaatgccgctgacaccggcagcaagccggaccggccggctgacgagaagaacgaggagtaacgagaagtggccatccgtgagatcagggtcgtgcccgacccagtcctgcgcaccccctgcgatgagatcaaggaaatcaccccggccgtgcgccgcctggttgacgacctgctggaaaccgtggacgatccgggccgagcgggcctgtccgccaaccagatcggcgtgagcctgagggccttctcctacaacatcgacggcaaggtcggctacgttctgaaccccgtactcgaggagaagtccggcgagcagtatggcgatgaaggttgtctgtccgtgcccggcttgtggtacaagacccgtcgggccgactacgctcgcgtgcgtggcatcgacctggacggcaacgaggtcgtgctcgagggctccgggctgatgggccgtatgcttcagcacgaatgcgaccatctcgacggccacgtgtatttggatcgcctggaaaaggaagaacgccgcgaagccctgcgctacatgcgcaatcgtcaggcgaagtagtccatacccggctcccgctggcgggagccgccgaacgtagtgagactgagggtggttctgccggtaccgcccgtaactcccctcagtcgcctacggcgacaggctcccctcagagaggggagcctgtttttcttagtaccggctccgtgctatccttgaaacttgtgtgccacccggcaacggacgcagtcgctggcgtccggaaccacccaatattgtcaaccggcacacaacaaattcgcgtcatgctcgcgacggcctgtgtcggtcggctgcacaactcgtgaaaccggggggagcagctgcacgcaggtgcgcatggccaggcaagaaccgacaatgaaaggtagtaataccatggctcagatcactatgagcgatatgctgaaggctggcctgcacttcggccaccagacccgtcgttggaacccgaagatgaagcagttcatcctcacccagcgcaacggcatccacatcatcaacctgttcaagtcgctcgacatgatcgacaaggcgtacgacttcatcaagaccaccgtggcccacaacggcaccgtgctcttcgtcggcaccaagaagcaggctcaggaagctatcgccaaccaggccacccgcgtgaacatgccttacgtctccgagcgttggctcggcggcatgctgaccaacttccagaccgtctccaagcgcgtcaaccgcctcaaggaacttgaggaaatggacttcaccgacgtgcacggctccggcctgaccaagaaggagctcctcctgctcgagcgcgagaaggacaagctcaacaggcagctgggcggtatccgcaacatgaaccgcaccccgtccgcgatgttcgtcgtcgacatcaccaaggaggccctggctgttgaggaagctcacaagctgggtatcccggttgtcgccatcgtcgacaccaatgccgacccggacaccgttgagtacccgatcccggccaacgatgacgccatccgcggcatcgaactgctgaccagcctgatggctgacgccgtcgccgaaggtctgctggagcgctccggcgccaacaaggccgagggcgaagccgccgagcagccgatggccgcttgggagaaggaactcctgaccaacgaggctcctgccgaggcttccgctgaagccgccgctccggctgccgccgagggcgaaaccgccgaggcccccaaggccgagtgatgctctacgatgggaagtgcctgaataagcgcttcccatcgttcatgggtaagcaaaatttctcaaggagaataatcaatggcagcaattaccgccgcactgatcaagcaggttcgtgaagacaccggcgccggcatgctcgacgtcaagaaggctctgaccgaagccgaaggcgacgtcgcccgcgccaaggaaatcatccgagccaagggtatcgccgcagccggcaagcgtgaaggccgcaaggctcaggaaggcaccatcgcctccaaggtcgtcgagaccgccaatggcgagaccggctacgccgtcgagctgaactccgagaccgacttcgtggccaagaccccgaagttcgtcgagttcaccgaggaagttctcggctacgccgtggacgccgacgccaactccgctgacgagctgctcgaggccaaggctggcgacaccaccgtcaagctggctgtcgaggaggccgccgccctgttcggtgagcacgtcaaggtcggccagttcgccaagatctccggcgagcacgtcgaggtctacgcccacaagaagtccgccgagatgccgccgagcatcgtcgccatgatcgccaccgacaaggccggcgccgccgtggctcacgaagctgctctgcagatctccgccatgggcgctaagtggctgacccgcgaggacgttccggccgatgtggtcgagtccgagcgtcgcgtggccaccgagaagtccctggccgagggcaagccggagaagatcggtccgaagatcgtcgaaggccgtctcaacgctttcttcaaggaagtcgtgctgctcgagcagccgttcgtcaaggacccgtccaagaccgtcggcgacctgttcaaggaagtcggtggcaacgccaccgcattcgctcgtgtcgaggtcggcaagggcgaagaggagtgagcccaaggcttactccacgcgcttagcgtaatttcaacgaaacgccatccggttattcaataatcggatggcgtttcgctattccaagggtgtcgttgctagggggtgtcgtcgtaaaccgatacgcttgtctacggataatttcgcactttcggttttgagaaaggcatgatatgactgatagcgacaagccgcgcagagttctgctcaagttgtccggcgaagcattcggtggtggcaaggtcggcatcgatacccatgtgattcgtcgcattgccgaggaaatcgttccggccgtacaacagggtgtgcaggtggccatcgtggtcggcggcggcaacttcttccgcggtgccgaactgcagcaggccggtatcgatcgttcccgcggcgactacatgggtatgctcggcacggtgatgaactgcctcgccctgcaggacttcctggagcaggagggtcaggccacccgcgtgcagaccgccatcaccatgggacaggtcgccgagccgtatattccgctcaaggccatccgtcaccttgaaaagggtcgcgtggtgattttcggcgccggtgccggcatgccgtacttctccaccgacacggtttccatccagcgttccctcgaaatccactgcgacgaagtgcttatgggtaagaacggcgtcgacggcgtctacaccgccgacccgcgcagggacgagaacgccaagcgttttgaaaccctgagctacaatcgcgccctcgtggacaatctggcagtcatggacgcctccgcactgtccatggcccgcgacaacaagaagcgcatccgcgtcttcggcctcgaagagccgggcaacgtgacccgcgccctcgtcggcgatgaaatcggtacgctggtctccaccgccgaatcgcgcgtggccgagtaagccgcaaacgcctacaatcgaatcaaacgttcatagacgaacaacacagacgaacaccaacacacaaggagtgaatatgtctcttatcgaccaggccaaggaacagatggccaggaccgtggaaaacaccaaggaaaacttctccggcatccgcaccggtcgcgcaaacccggccctgctcaacggcatcaccgtggactactatggtgcccccaccccgattaaggccgtcgcctccatcggcgttcccgaaccgcgcaccctgtccgtcaccccgtttgacgcttcccaggccggtgccgtcgaaaaggccctgcgcaactccgacctcggcatcagcccgaaccgtgatggcaacgtcatccgcctgaccatgccggaactcaccgaggaccgtcgtaaggagtacgtcaagctcgccaagggcaaggccgaggacggcaaggtcgccgtgcgcaacattcgccgtaagaccaaggaaaccatcgacaaggccgtcaaggacggcgagatgggtgaggacgaaggcgatcgcctgctgaaggatcttgacaaggtcaccaagtccgttaccgacgagatcgatactctgctggagaccaagcagaaggagatcatggaggtctgattcagaccaggtccggagaattatggaacgcaacgaacaactccatgaagaggccgaggagacgctcgaccggatcaacaagaagaccggccgcaacatgccgcaggccatcgccacaggcgcggcactggtcatccttattgtcgcgtgcctgctgctcagcgtcgacctcttcgtgctgctggtagtcgtgttcatgattctggcgctgtgggagctcagggtggacttcgccaccgtaggcctgcacatcccggtgttcatgctgtggctgtgcgcgtccttcaccctcatcgccacctattattccccgtaccatctcatcacgatgtcgctgagtatcatcgtgtcgattattctggtcgccatcgcggccagcgcaaaaatcagcgtcggcaaccgcctatctctggcggttgccggcaaactgtccaacacggatgccagcgcgcgcctcgaatcctcgttcaatcatgagggcggggaacagcatcattcccggctcagccatgtggctgtgtccgtgcttaccgtgttgtacattccgttgctggccagctgcatcatcatctcgctgactttcaatgggcatccgattgcacacgccatcatgctggtgttcctgcccgccctctccgatacgggtggtttgtttgccggtgcctggctcggcaagcacaagctcagcccgcgtatctcgccgaagaagtccgttgagggcctgatcggctcgatgctcttcgccatggctggcgcattcgccgtattcgcatgcacgtatgatgcctcgaaatgggccactcgttggtgggtgccgatcgtggcgggtattctcatcggcgccgtgggcacgttcggtgatttgtgtgcttccatgctcaagcgcgatatcggcatcaaagacatgggccatctgctcaagggacacggcggtgtgatggatcgtgtggattccattttgatgagtgcaccgttcacctgcgccttgctgtgggtcaccggactgtgattcgcatgcctcgtgcatgaacaatgtggcatcgtgtgtatatcgcacggtgccacatgtcatatatgggggaaatcatcgttcaatatgcgttcgccatgggctaagacatgggccatctgattcgtatgcggcacgccgtatggtggattctgatatttctattgcatgtttgactattttctgatattgagagcgaagcgaacccatcatgaccacacagcatcctgacactccggaaaccggcattactcccggcggcacatcaggtgccttccgtgacgtgctatccaaggaccatgcccgccgtggcaagccgccgctgcactttgtggatatgacgcccgagcagcgcatcgagaaagcggccgaactcggattgccgaagttccgagtcaagcagctcgccaaccattactttggccatttcgatgtgaatgccgccgaattcactgattttccggcagccaagcgcagcgaggccgccgccgcgttcttcccgcagctcatcaccgaggtgacccgccaagtggcggacgaaggcaccaccatcaagaccttgtggaagctgttcgacggctccctcatcgaatcggtgcttatgcgatacccgacccgcaccacgctgtgcatttcctcgcaggtcggctgcggcatgggctgcccgttctgcgccaccggcaagcttggcctgacccgtaacatgtccaccggtgaaataatcgaacaggtgcgtgtggccgccaaaatgatgcgtgacggcgaagtggccgggggagagggccgcctgagcaacatcgtgttcatgggcatgggcgagccgatgggcaactacaactccgtgctgtctgccgtacgacagatttccgccatgcctcccgaaggcttcggcatttccgcgcgcaacatcaccgtatccacggtgggcgtggtgcccggcatcaagaagctcactgctgaaggcattcccgtgcgtctggccgtttccctgcatgcccccagcgacgaactgcgtgacgagctggtgccgatgaacaagcgtttcaacaccacgcaggtgttggatgccgcgcacgattattggctggcctccaagcgccgcgtcagtatcgaatacgcgctgatgcgcggcatcaacgaccaggccgagcatgcgcagttgctggccaagaggcttaaccattacggcgacaactgggcccacgtcaacccgattccgctcaaccccatcgagggctcgaagtggaccgcctccaagccgggagacgaacagcggttcctggagatcctgcaccgcgcgggcatcaccgccacactgcgtgacacccgcggccaggacattgacggtgcctgcgggcagttggccgctaaggagcggtagttacttcagcgcatccttgattgcgtccacgaagtagtccaaatcagcgggcttgcgggacgtgatgagcttgaagccgttggcgtcgtccacgtgcagctgctcgtcgacgtaatggccgcccgcgttctcgatatcggcggcgatataacggcagggcgcggcggtcttgagatcgcgcagcgggcgcgtcagctcggattctcatattccagaaacgggtgcggcgcatgtaacgggcggtaggtagtctgaaggactgtaatgcaaagccgaacaggggagtgaagcatgtcgttggcggtacgagtcatcccgtgcctggacgttgacgccggtcgcgtggtgaagggtgtgcatttcgaaaacctcaaggatgcgggcgacccggtggagctggcggccgaatactatcgtcagggcgccgacgagatcaccttcctggatgtgaccgcatccagctcccaccgcaacacgatgattgacgtggtctcccgcaccgccgaacaggtgttcattccgatgaccgtgggcggcggcgtacgcacgcccgaggacgtcgactcgctgctgcgctgcggtgcagacaaggtcggtgtcaacacggcggccatcaatgacccgtcgcttatcagccgcgtggccgaccgtttcggcaaccaggtgctggtgctctccgtggacgcccgccgcgaaaagggcgagcaacacacgcaatccggcttcgaggtcaccacgatgggcggccgcaaatccaccggcattgatgccatctggtgggtcaagcgcgccgagcagcttggcgccggcgagattctgcttaactcgatggacgccgacggtaccaaggaaggctttgatctcgagatgattcgcgccgtgcgcaaggaagtcaagattccgatcatcgcctccggcggtgccggcaaggtcgaggacttcccgcccgccatcgaagcaggtgccgacgcggtgctggccgcatccgtattccattacggcatcctgaccatcgccgatgtcaaggcggaactcaagaagcacggctacaccgttcgctaaacgaatacaccttgctcccgctggacgaacaatccagtggattgttcgtagcagtgcgctatgcacatgtcgcacataatccgggagctgtcagcgaagctgactgagggtggtccacataaggaagataggtatgacagacactacatacgacaattccactgaactcgatccccgtattgccgcacgcctgaagcgtgacgccaagggcctggtcgctgccgtcatccagcagtacgacacacacgaggtgctgatggtcggctacatgaacgacgaggcattacgccgcacgctgaccaccggccgcgtgaccttctggtcccggtcccgtcaggaatactggcgcaagggtgatacatccggccatgtgcaatacgtcaagggcgtgtccctggattgcgacggagacgcactgctcgtcgaagtagaccaagtcggtgccgcctgccacaccggcaagcgcagctgcttcctcgaaggcggccccctgtccgtggtcgaaggccatcgcccggccgagcagtagaacgggcttccctgactggggggggaagccgaacgaccgcgtactacgaaacaagacatcgagttgtaagtaaaggagcgaatatgagcgaatgcagcgtcaaacacctgaagtggggcgccacctggcccagtcgcggccagttccacgaacaggcc

SEQ ID NO: 3140 - DNA, 40786 bp, Unknown
  R215_18m  MAG No. k141_61721
ccgccatcttccacttcaagtggtcgaatcgcggaatcagccggcggatatcatgtgccgcgtcgttaccagtcaagccgggaaattcgttgcagacggtcagtcgaccagcgaattgatctggatgacatggtcgcgctgcggaccggtgccgatcgcggagatacggcagccgctcagctcttccaaacgcttgacgtaggcctggcaggtggcgggcagctcgtcgaaggagtggcagtcggagatgtcttcgtcccagccgggcatggtctcgtaaatcggcttggcggcggcgaaagcggcctgatcggtcggcatgtcatcgtggcgttcgccgttgacgtcgtaggccacgcaaatcgggatttccttgagtccggtgagcacgtcgagcttggtgagcacgatgtcggtcaggccattgacctgggaagcgtaacggttgacgacggcatcgaaccagccgcaacgacgcggacgaccggtggtcacgccaaattcgtgaccctgctgacgcagccattcgccggactcgtccagcagttcggtggggaatggaccttcgcccacgcgggtgacgtaggccttggagacgccgattacgcgggtgatcttggtggggcccacgccggtgccggtgcaggcgccgccggcggtcgggttggaagaggtgacgaacgggtaggtgccgtggtccacgtcaagcatggtggcctgagcgccttcgaacagcacggtcttgccttcgtcaagcgccttgttgagaatcaggccggtgttggccacgtacggcttgaggcgttcgccgagcttcagcagctcctcggtggtctggtccacgtcgatcggacgacggttgtagagcttgaccagcatctggttcttctggtgcaggctggcctccaccttgtcgtgcagatggtcggcgttgaacaggtcatgcacgcggatgccgacacggttgatcttgtccgcgtaggctgggccgatgccacggccggtggtgccgatcttgtgcttgccaaggaagcgttcagtcaccttgtcgagtgtgcggtggtagggcgcgatgatgtgtgcggcctcgctcaccttgaggtgggagcaatcgatgccgcgggattccaagccgtcgatctcctcgaagagcacttccgggtccacgaccacgccgttgccgatcaccggggtcaggttcgggttgatgatgccggagggcagcagatgcagggcgtacgactcatcgccgaccaccacgctatggcccgcgttgttgccgccgttgaagcgcgcgacgtaatcgaccttggtgccgatcagatcggtagccttgcctttaccctcgtcgccccactgagcaccaataagaacaattccaggcatgatgcacctccgcattcgcacgattccgccggaaacagactaccttacaccctctactcggggcgcggccatctcacgcaatcgggcttctggtgtctttgccgcgcgttgcgcgaggcgggccgacaccaatgcgccgccacggcgaatgacagtttatttgggtgttatctgagtgctttgccggccgagccgagttgcttgcatgcctcagccacgcgggcggacatggattcctcggccttgcggccccaggaacgcggatcgtagaacttcttttcgcccacttcaccgtcgatcttgaggaccttgtcatagttctcgaacacatggtcggcaatcgggcgcgtgaacgagtattgcgtgtcggtgtcgatgttcatcttgatcacgccatggctcacggcttctgcaatctcttccggacgggagcccgaaccgccgtggaacaccaattcgaacggcttgccgttgggaaagtcgactatgccggcggcgctgggcagctcaccctcgaccaccgcgcgcgccacacgggactgaatatcaccgagcagggcgggacgcagcttgaccacgccgggcttgtaggagccgtgcacattaccgaacgtgaaggcggccatgtatcggccacgctcgcccaaaccaaggcgacgggccacttcaaggccatcggccggcgtggaatagaggcgttcgtcgattttggcggaatagccgtcttcctcgccgccgaccgcgccgatctcgatctccagcaccgtgtgcgcggcctgcgacttatcgagcagctcctcggcgatgtccagattttccttgagcggcacggtggagccgtcccacatatgcgactggaatgtgggctcctgaccatgcgccacctgatcggcctcatgtgcgagcagcggttgcacccattcgtccagatactgcttggcgcagtgatcggtgtgcagggcgatggtgatgttcgggtacttcgcggcgacctcgtgtgcaaaagcggccaaggccagcgatccggtgacacggtcgttgacgccgatgccggaaaggtatgcggctgcgccgacggacacctggatgatgccgtcggattcggcatccgcgaaccccttcagcgcggcgttcagcgtctgcgagctggtcacgttgatggcagggtaagcgtagccgccgcgtcgtgcggcgtctagcatttcggcataacgttccggtgttgcgattgtcatggcttcattatcgctcggggtgtgcccgccagactaggttctggagccaggcgagctgtgaactatctcacgaggaacaccatgatgataatcatggcgaagccgaccaaatcggtcggggtaaagaccgcgccggcgaataggacaccggtgatagtggcggttacgggttcactggtgccgagcatggtggcgcgcattgcaccgcagcgctgggtgccaccgaggaatagccaataggcaccgaatgtgccgaacaccacggtgaataccatcagaccaatgccgaaccagtccaacgcgggggcggtggtccacgggcgcacgagcggcagcagcattaggccggaaacgatgaacatgacgccgctggccatgaagttgccccatttggccattaatgcgatgggcagaatcgcaagcagtgacgtgcatacggcatcggtcaggccccacagcagaccgggcagcggcagactgagctggctgagatcgccgcctgtggcgatgagcaccgtgcccacaaaagcgagtaccacaccgatgctttcgcgtttgccgggcagccgtttgcccataatacatacgaatacgagtacaaccagcagattgagcgtctgcagcactgtggccgtgccggaattggtccagtcaatggccttcaagtaggagacctgcaccatgagcacgcagaagaacgcgcacagcaggagtctcaggtaggaacggtagtccttaagcgagttgatgaacttgtcaggcgtgaagattcctgcgcaaaccagaaagatgacaccggccaatagctcgcgcacgcaggcgatccacagcggatcggcgtgatagtcgttcatcaggagtttggagacggtggcgttgacgccccagaagacgcctccggcgagcgccagtccggcaccgacgaagatgtcgtgcggggtgcgttcgagggttggcgttggttggccattggttgcagcggtcttgggttcacacatcgcccatcacgatacgcggacgacgtgaattgttctcatatagcggtcatacggcaggaaaataagctctcaaaagagggaaaaccgttgaaatttcaaggaaaatcgatggagcggacgacgggagtcgaacccgcctctaaagcttgggaagctttcattctaccgatgaactacgtccgcatgtgcgcttccacgcacgagaggcaagtgtatcacctatgcggcaccttgcgccatgtgccggtttgagttctgtgctggactagtgaattgcgcgcgtggaatacgtggatgcggccaccggagtgccgttcatttcattggccatttgcatcaggcgtgcgatgcgctgatcagtcggcggatgcgtggagaacagtttggagaaaccgaccgcggagaacggattggcaatcatcatcgcggagacggactgggtgccggccgttttgcgcatgggcgtggtctgggcaccataggagatcttgttgagcgcggaggccagggcctcggggtcgccggtcagcagactgccgtcttcgtcggcgtcgtattcgcgagtacgggagatggccatctgaatcagtgatgcggcaatcggcgcgagaatcacgctgaggagcacgccgatcaagccgagaccgcctgaattatcgcggtcgtcgcgcgagttgccgccgccgaaatacatcagagaataaccgaggtacgtgatgacggtggccatggcagaggcgatggcggaggtcagaatgtcgcggttgtacacgtgcatcagttcatgacccagcacgccgcgcaactcgcgggcgttcagaatctgcaggatgccctgcgtgcagcatacggcagcgtgacgttcgttgcggccggtggcgaaggcgttcggactcatggtgggcgcgatgtagatgcgaggcatcggcttgccggccttggcactcagctcgcgcacaatctggtagatttcgggggcttcctgctcgctgacctccctggctcccatggatgcgatggcgagtttgtcggagaaccagtatgagccgaacgtggtggccaacccgataatgacgtagatgcccagcgtctgctgcctgccgcccgtggcccaccatatcagcatgatgatggcccacatcaaggcgaacagcagcgtagtcttcaggccgttgaaatggccgtgcacccgtactttggcatccatgaggctcacactaaaatcactgcctgaatattggctggatgtgcgccgaggggtgaatcggatgggggttggcggtgcttacggtgcggttggcggggatcggaatagcctgtttacatgagattgacgatgcttgacagtgcggttgcttggcctgttttaccgctttaccgctttaccgattggtctgatcgggacgctttgcttgtttggcctgctttggctgcttggatcgtttggcccatcggcctgctcgactggcatgacactggcttttatataaataagaacgctggcgtataaccggcgttcttatttatcgatgtatcaatcgcgccgattgctgctggtgcagttgccggtgcgatgagctgatagtcaatcaggccagagcgagctcacgcatctggtcgggctcgatgaccttcttgtgctcgcggccctccttggcgccttcggcgcgctcgaaggcgtcgaccttcttccagccagcgaagtcaatcggcttgacgccgcggctttccagcagtcggtcgatggattcggggtcgcgatcctcggccacgcgaccaccttcggcggccttggccagatcctcaagcatgttggtcacgatggcaagtgcgtcggacttggtggagccgatcaggcccaccgggccgcgcttggcccagccagtggcgtacagacggtcgcgcacttcgccgccgtccgcttcggtggtgatgcggccatcgccattggcgttggccaggtgagcgccgtgctcgtcgtaagtaatgccgggagcctcggccggcttgtagccgatggcgtggtagacggcctcaaccgggtagtcggtgaactcgccggtgcggctcatcttgccgtcggcactggtttcggtgcgttccacgcggatggccttgaccttgccgtcctcgccgaggatctcggtaggggcggagttgaagtgcacgtagtacttgcggtcggccgggttgccttcgaagtcgacgtcgccgtcatcttccatgtcctcggccatctcgcggatggcgaacagttcctcgaccatctggcgggtgagcttgtccttgccggccacctcgatggtctcgtcgtccaaatcgaagtcgtcctcattgatgatgagctgcacgccgggcagcttctccatctcgcgcagttcctgcacgctgaacttggcctgggccacgccacgacggatgaacaggtggagcaccttggccttgttctggccgatgccctcgtacacgttgtccggaatgtcggtcttggccttgaggtcgtcggcgttgcgcatgagttcgcgggccacgtccatggccacgttgccgccgccgatcacggcgacgttctcggccgtaagcggccattcgcgggcaccggtggggtaaccgtcataccattcgacgaacttggcggcaccgtacacaccttcaaggtcggcaccgggcaggttcagcggcttgtccttgaccgcgccggtggcgaacagcacggcgtcgtagcgggcgagcaaatcatcgagggttacgtccttgccgaattccacgtcgcagtagaggtggatgttcgggttgtcgagcgtcttctcgagtgcggatgcgatgaacttgatggacgggtggtcgggggccacgccgtaacgcaccaggccgaagggcacgggcagcttctcgaacaggtcgatgcgggccttggtgccgaggccgagttcttcgcccagtttcttgagctggcgcaggaagatgtcggaggaatagacgccggccggaccagcgccgattacagcaatgcggagttcagtattcacagattcagtcacgcgctctagcctaacgcaaagccttccgttgcaacaggggtgagtggtgggaatcctgtgcctaataccctctgccagcctcacgccagcggggcaaaaccacgagtcgatcaagaaattgccccactcacagaccgccagcggagcaaaatcgcgagtaacccgaaaaattgctccgcttacagcccatcagcggagcgaaactgcgactaacccgccaaggcaccccgctgaacacccaccagcgcagcaaaaccactattagaccgtaaaatcaccccactcgcagaccacgagtggagcaaaacccctattagcccacagaatcgccccgcttacagaccgtcagcggggcaaaaccgcgactcagtcgaggagataccccgcctagtcgcggtcgatgagggcagtgagggcccagaggatgctgaccacgtcgatggcctcttggaggaaagcgccgacgatcactggaatgaggttgaaggcggcggcaatcatgccgatggtggcgagtacgagaccagcgatcacggcctgcagcatcacgcgcttggtacggcgtgcaatggcgatagcgcgcggtacagcggcaatatcgtcattcataatgaccacttgggcgctttcggaagcagcagtggaagtaccgtcggtcatggccacgccgatatcggcgacggcaagtaccggggcatcgttcacgccgtcgccgaccatcatcgtgaccggcttgcggattgcggcggcgcggctgcatcgagaacgcgacggttgagaaccatcggaccggatgccatctacggcatcggacacagggctggcggcgtgattcgcgcgcccggccggcgcggcgcttgcctccgtggcagccttgacggcggcaaccttgtcttcggggaacagctcggcgtggacctcgtcgatgccgacttcgtccgcgatgatttcggccgaggcgtgcttatcgccggtaagcatggcaagcttggtaacacccagttcgcgcagattggcgagcgcggttttggtgttggcgcgaggtacatctcgcagcacgatgcgggcgatcagttgcccgtcaacggacacgtaggaggccatttcgtccggctgtagcataccgaatcgcgtacgcagcgtttccttttccttagtgttcccggcaatcgtacggccagatcctgcctcagtatccccgcccagaggggactgtccgtgaagcgggctgaggaggtcggccgcctcctgccgtgggccatccgcccggcttacacccgctacctcggcagtcaagaacccatcctccccggctgcagcgaacgacagtcgcccgacgcggacggcatggccgttcacctcgccggacacgcccttgccggagtcctcattaatattcttgacgaccggatattcgcggccgtggccgggccagctggcctctggttcggggcagagacgctggccgtccgcgaaacgctgacgcaagcgggccatcgcgtcggcaccggctttggcgatgcccttcgacaggatgtgtacggaatagctctctacaacgccggccaacatcagcacatggtcctcattaagacgggtctcagctccaggcagcatctcaacgcgcaccacttgcggctgcttgacggtaagcgtgccggttttatcgaagaatacctgggtgacgcggccaaggttttcgagcacatcctgcgccttgatgagcacaccggcggcggcgagacggccagtaccggcgatgtatgccacgggcgcggcgataagcagtggacagggcgtagccagcactaacacctgggcgaaccgcgtcggtatgccggacaccgcccaggcgacgcccgctattaccagcgacagcacagtgaacggaacggccaatcggtcggcggttttcaccacggccggacgggactcctgtgcggaagcgacgagttcgaggatgcgctggtactgggaatcggcggccacctgggtggcgcgcatggtcaaggcagtggaaccgttcactgcgccagacatcactcgggcaccggcgaacacctcgcgcggcaccggctcgccattgatgttgctcagatcgagcgtggccgagccggaaagcagttcgccgtcgaccggcacggtttcgcccggcaacaccatgagcacatcgccgagcttcacctgctcgaccggcaccgtgtcgaagcggtacgtggcggcctcagccgaccagctcccctcagtctcgctccgcgagtcagctcccctcgacggcggtacttggttcccctctccaaggggagctgtcggcgaagtcgactgaggggaggacgtcgccggaaccgagcctacacgccggaagccatcggacgaatcgtccttatcagcggcagccccacaccccacgccaggcaagttgacgacgtgcgcagtttgcggtgctgcctgcatcaatgcggtcaaactgtgctcggccttggcctgcgcgtattcctcaatggcctcgccggacgtaatcatcagcatgaccgcccagcttgcccagtactcgcggacggcaacggtggaaagaatcgccactacggccagcaaatcgacgccgacttgtccgtggcgcaaatcgtcaatcatgccacgcactgtgtcaatcacaatgattgccaccagcgcgattatcagccattggcctacaccaggattacccagcaccggcatcgcaattgtgttgccccatgggcgccaatcgcccagcaatgccagcgggattgcggcgataacaacaacgggaagcatcggcacaagtcggcagatgtcgaggatttgggtgaagaatctgatgagtccgctcatcattgctccttacgctcgtatacggagtcgattgcggcaagcgtggcccgcgcaatcggcgctgcggtcacgccttgttaacccaccggcggctttgcttagggcctttcggctccgcgcgaccatccgatacacggcgtaaagaaatcgtttttagttatgtgttgaattattgtgcgcatcgttcgagacattgcccgaatcagcgcttggcctaccctatcagcggcctgaacgcgacatgccgggcggcgaaactacgttggcagctcagtcggaaggcatcaatcgccccccctcctacgattccgccaagaattcccgtgcatatgaggggctcgcagcccttatgcgcctgcagctgacgtcctgccagaacgattcccgtgcatacaaaagcccacggaacaagatatctgccgccgctccggccgacccagccaaacgcttcccgcgtatacgaaaggcccgcagcaggagttgctcactgctgcggacctttgcctatctgacacggcgttcaacggttaccgctcaacgccgtgtgacgcgctgaaccagctttaccacaggccgaacgggtcggagaagccgccgccatcaccggtgccgccatcgttgttgccgttgccattgccgtaaccattccggccgttgccgttctggttgttctgcttattctggctgttaccgttggaatcggagctggacgaaccgttcaccgacgactcctcctgatcgagcgtcacgtccacatccatggtcttgccgtcgcgcacgatggtcagcgtcaccttgtctcccaaagccgcggcacgaacgtaaccaagcagcgagtagttgttgttcaccgcgttgccgttgaaggccacgatggtgtcgccctccttgaggccggccttgtcggccgggccgccggagacgaccgcgctgccggtggcgctggacttggtgatggtcgcgccgccgcgggtcacgccgtcggcttcaaccgtgtcggacttgatgaccacgccgagggcaacgtgcttgaccttgccgtccttgatgatttcgtcggccacacgcttgacgaggttggacgggatggcgaagccgatgccgatcgaacccgcggagtcggatgaggtggcggtcgaggcgatggacgagttgatgccgatcacctggccggccgcgttgaaggtcgggccgccggagttgccggggttgatggccgcgtcgatctggacggcgttggtgacgatctcgttgttgttatcgtcggtcacggtcaccgggcggttcagggcggagacgatgccggtggtggcggtgtcgtcgtagccgagtgggttgccgatggccatcacgttctcgccgacggcgagcttgtcggaatcggcgaatttcacggccttgaggtcgctcggcgggttgtcgagcttgatgaccgcaagatcggtggtggtgtcggtgccgacgagcgtggcggaatacatgttgccgttggcaagcgtcacctgaatctgctgggcaccggagatcacgtggttgttggtgatgatgtggccttcggtgtcgatgatggcgccggagcccttggcggtgccgttgctcaacgcggtctggatggagaccacggagccggagacatcgctggcgacagtctgccagtcgggggcttcgccgctcttggcggtggcggacccggagccggacttattcgagctgacgttggacagcgaattgctggtcggcaaggtgatcaggccgctggtgagggcgccgtaaccgaggcccaggcagagggccgcagccagaacggcggcgaccacggcgatgaggatgttgctcgccgtcttggacatgccctgcttggcggggccgggctgaccgggctgtcccggctgggccgggccttgaccgttcggcgtaccggtaccgggagtgccgaaaccgaacagaccgccctgctggggctgctggccattccggccattctgaccggactggctggcaaacgggttgccgttgttctgctgcggctgcgtgggcggattgaacggattgccgttgccctgcggctgcgggttattggtgtagtagggattgcggttgccctgctggccctgcggggtttgctgtgcaggctgaccgaacgggaattgctgcgtgggctgggcattgctgccggcctggccgccctgctggccctgtgcctgagtcggggtcggaccataagcgccatattccggggccggacgatacagcggagttgtggccgaggtctggcctgcggccggtgctgccggagaagccggcgaggaggagaccaccgtgctctcgcccttggcggaggcgtagtccgggatgggctcggtggcggcagtgtcggtagcggcttgcgtaggctgctgatcggcagcgagggcggccgaggaaaccggggcttgctgctcgctggaatcgctggcgttgccggcatcaaccgagtcgccacccacaaacgggttcttcggctcggcgttgccggtatcggcagtactattggggttttcgttattccgcggggtctggtcgacgccctgcgggttaaattcgtcagccattgctgctccttttcctaaattcctatcacgtctgttcggcggctattcgggcacttgcccattgccacttctcgtgtgctacctcagtagtaaaggcagtcaatctggaggttttctgaacgttgattgaaagtctatgcgtaatcatcgcagagtcttatgggcatctcggcttcgaggggctgatttcctgtttcgggaacatctacttgcacttcaaggggctgttcgcgcggtcaattccgagtatcaagggccctcatttaacgccattccgccatttttgcagccggcctacttgaccgggagccccttgaagcggaagtagacgttcgggagcggcgaaatccgcccctcgaaaccgagttcttcacaatttccggcccttttctggcccttctgcctaaagtgaacatatgacgatcagccttcttgaacatccgttgggcgcacagcccggacagcccggcgaccgcagcgccttccatttcgaaacgatcacccgcctgccatccacggccagcgggcttgggcgagacggtgcccgatacggccgcaccggcatcattcacacgccccacggcgatattcgcacgcctgccttcgtgccggtgggcacgcaagccgcgatgaaggccgtgttgcccgagcagatgaaggatctaggcgcacagtgcctgctggccaacgccttccacctgttcgagcgcccgggcgaggacgtgctggacgcggccggcggcttggcgcgtttcatgaactgggatgggcccacgttcaccgattctggcggtttccaggtcatgtcgctgggcgtcggcttcaagaagacgctggcgatggacgtgaccggcatgaagtcggacgacatcatcgccaagggcaaggaacgcatggcctgggtggatgaggacggcgtgacgttcaagtcgcctttgaatggtgacgcacatcgtttctccgctgagatttcgatgggcatccagcacaaaatcggcgcagacatcatgttcgcgttcgacgaactcaccacgctgatgaacacccgctcctaccaggaggactcggtggagcgcaccttccgctgggcccgccgatgcgtggacgagcaccagcggctgacggctgagcggctgggcaagccctatcaggcgctgtatggcgtggtgcagggcgcgaattacgaggatctacgccggcgcgcggcctcgcagatcgcctcgctggacttcgacggcgtgggaatcggcggcgcaatcgagaagcgcatcattggagacacctgcgcgtggatctgcgacgcgatgccggagaaccgcccgcgccatgtgctgggcatcgcctccgtggacgatatcttcgcgtgcgtggagaacggcggcgacaccttcgactgcgtggcccccgcgcgctgcgcccgcaacggcgcgatctacacgcgcgccggccggtacaacatcaagcgcgcccagcataagttcgatttcgggccgctggaggagggatgcgactgctacacatgccagcattattcgcgcgcgtacgtcgaccacctgctgcgcgcccgcgagttcaacgggtttacgttggccacgatccataacgagcatttcttcgtgaagctgctagacgacatccgcgcctcgatcgacggcggatactttgatgagttccgcgacgaagcgttggcccacttctacggcaacggcgagcgccggccagggttgtgagtttttctccttcgttgcggcttgtgccgaacttctctctgctcccctcgctgaggctgagacgttaagcaaacagcccagtgggctgtttgtagtcgaaggtgagacgatagtcgaaccagcaggttgcaggcaaggcccgtccttaattgcggacgagctgtcacgaagtgactgaggggagtgccgccaccctcaaagatcacggcgcccgcaggagacccacaagcgatatatccctgcctcccatgcgacacgccgaagattgcatgattacccagccgggtgtaagttagtcgattgtctgcgagtgtggcggaatggtagacgcgctgtcttcaggtggcagtgagtgtatgctcgtgggggttcaactccccccactcgcaccagcaactaaagggctggaatcggaaggttccagcccttttgctttgtccgggcaagcgccgtttttcaggggggctttaggacttgagacttatggcccaactttcgtggcggaaaatgtcccggtacctgcatcaatcgtttgacgttcaagccaggccagaatccgctgtcccggttcgcgatttcgggcgatctttgcaaaccgggacaatttttgttgccccggtataaatgtcaatcgatttatgcgaaaaccgggacaacgtgccaattccagaatcggccttattccgccgattccgtctgccagacgatatgagttgaggaaaccggagtgtcccggttcacgaaaacaagccgaaatcgccgaccgggacagcggattctgccccggtcggcaggtcaaacgattgacatatgaactgggacaaatacagatcagagagaagctcatgaagcagatttaactttcctcaactttccattcgccataaactagcattacataacatcatgaaccgagacgaaaccaacgaagtatctggagtcgccgacgaccggctcggccgaacggccgagccgtacgaatccggcaattagcagggcggcgtcgagagcatcattcgcagcaatccgaaatcaggaaccgacacaagtcggacccagcagacacgcataatacgagttcacagactcagcggtgtattccgcaaccgcaccaccgaataccacaccacggaagaactgtaagcattacgaaatcaaccttgattattgcgcgggcctatactaggttacggtagcgtaggttagtggtcgggagagcgtcgccggccatagcgaggtgatcagtatgagcgtttccatcagcacgccatctggacgaaccatggcttccgccgcaacagttgcgccttccgcaaccgcgagtcaaaaatccagcgcaaacgccaaccccaccgcactggaccgtgcatcggcccgatacagggccgcgcaatcgcgctaccgccaagccaaggccgcactgaaggcgatcaagcgccagatcgtccccgtggatgcattcggcaatcgcaagccgcgactgcgcggatggcttcacctcgccaccctgccgctgtgcatcgcggcgtccatcgtactcatctgcatcgcgccggccggctcggtcaaagcggcctgcgcggtgtacggcgcctcggccatgctgctgttcggcaacagcgcgctgctgcacgtcgtgccatggcgcagcgcgaaggtgactcgcgtgctgtgcggcatcgattattcgaacatcttcctcatcatcgccggcaccaacacacccgtgctgttcgcgctcagcccggcgattcgccggccatatctcacggtaatctggacgaccgcggcgattggcacgatactgcatatcgtctggctgcggacgccgaactgggtgttcaccaccgtatacgtcgtgttgggactggccccggtaacgcttattccgcagctctggacggctcccgcagtaggcccggcgccgaccgtgctcatcgcgtgcggaggcgccgcgtacatcgccggcgctgtatgcttcgcgctgcgcaagccgaaccccgtccccggctggttcgagtttcacgaggtgtttcacttgggcacggtcatcgggtatgcctgccacgtcgtggcgatttatctgattgtctgtgcgctgtaggttcgctcgcccagcaccgaggcgggccttcatacgttacgagataggtccttgatcagccagccgtgacggccgccttcatagacttcatcggtgagtcgatagccgcactgctcatagaacttgtagtggtcgttctccgagtgcacggcggccatggttccgccggcttgcgcgatgcggcgttcggcgtcggccagcagccgcgagccgatgtgcctgccttgcgcctcgggcagcaccgccagtcgcgcgatgatgtatcgcccgggttggtcgggatggtcggggtccgcatagaaccggcaagtcgccacggggcgattctggtcgggctggccggactgaatcggcgagggcgattgcgcggaagggccggggcgatcggacgaatcgaccgaatcgaacgccagcagatgcacggacgcggcatcccattcatcgaattccggccgccagtcgcgttcgcggatgaacacctgctcgcggatggcgcgggcggcggcgggcagccggtcgtatgcttcgattcgtatggtcatgagcgtcagtgtaatgcgtcacgataaccgacaaagcccggctcggtggacgagctcgggcccaagctcggcctgcgttcgataggctcaggccgtacgcgcgatctgcacggcggtgccggacgcggtgaccatcagcataccgttgtcggcgccgagcacctcgtagtcgatgtccacgccgaccacggcgtgcgcgcccatcgcctccgcacgctgctgcatctcggcgatggcctcgttgcgggcacgcatcagctcttcctcatagccctggctgcggccgccgaacatgttacgcaggcccgcgccaagatccttgaacatgttcacaccggataccacttcgccgaagacgatgccctggtaattggtgatggtgtatccgtcgacggacggggtggtggtgacgaggatcatggcgaggctcctttggcttgtctgcgtagataaatcactgccgagagtcggaccgttcccgaatctcacctcggaaacggatcgcttctcttggctaccacaatagtcgagagcgcctttcccgacatcttcaatccacgcgattgcgtaatcaaatgcgtgtttcgccgccaaaaaatgctggtagatgtcataggaggagcgcgccacagcgaatacgcatacgatttcatagcaagcagcacgtacactagtaccagtgaatgtcagaaatcggaaaggaacagggcatgactggtgcatccagcggggctacccgtatcggctcaaccgcaccacaagcgcttgagttctttgccggcatagggcttgcccgcctaggcctcgaagaggctggcttccacgtggcgtggtcgaacgatatagatcacgccaaatgccagatgtataggaaccagttcggcaacaatgagcaggaacataccctgatcgagggggacatgggtgagctacatggctctgacttgcctcacaatatctccattgcttggggctcctccccttgtaccgatatatctctggctggaacccgtacagggttgaacggcaaacagtccagcgctttctggcagtatatccgcctcctggaagagatgggcaacaataggccacctgtagccgtacttgagaatgtcgcaggtcttgctacgtctcactcaggcgaggatatagcagcagcagtaagcgcattcaaccaactgggatattcagttgacgcgctgtcaatcgacgctcggcgttttgtgccccagtcccgccccagactgttcttggtcggcctaaccaatcctcctgagggctcgcaagccaattccccactacggccagattggttgcaacaggtgtttgccgatacctccctgcgtatgcacagggcagttctgccggaaccgccggaaccacttatggcgggctttggcatgtacgccgaagagatgtcagacgatgattcccgatggtggcctaagggcaagctaacggcatttcttgactcactgtccgctgtgcaatcagagagagtgatgaagctgaaggacaatccgttcatctcttatcgaacggcatacaggcgcactcggaacgggaaacccacgtgggaagtccgagcggatgacatttcgggatgtctacgaacagctcgcgggggttcttcaagacaagccgtggtacgactcggcaaggggtcgacggcagtgcgctggatgactccaaaggagtacgcggcacttatgggcgcatctcattacaaccttaatggtctgcgcaccaaccaagccttgttcggcttcggtgacgcagtggcagtacctgtagtcgaatggcttggcgagcactacttcatgccagcacttcgcggtacattggacaaggcaaagcagcaacacgagctacggtcagcttgatagtcgtcgaaggagagcgagcatgggtattgacgccatcgaggagtttcgaaagagccacggcattaacaccaaaggcaacctagccggcatactgcagctcaaccgcgccttctcgaaagatacattgccaatcaatcccgatgattatctcacgggtaaagaaggacaggtcaaaggactgagtggtgcgaactgccaaagcattttagaggagtaccacatcaagagggtgctcgcgtccgaaggtggtcgaactagccgcggccttatgggcataatgaaagattatgcagcgctcattaatgaagagcggccgtccagcaaagatttcagcgagatagagcgtttttggattgatcgtatacgcaagttcttcaatagcaagccattcaggctagaggccgatgagtcactctcaatcaccgcagcagtaggcaatctgttagagcaggccaagaagcggcaaaaagagaatcccggtaccatgtacgagggcacggtgctgcagcagctcgtggcagcaaagctgtctattatcatgccggaagtggaaatcaacggagcttcagtagcagatgaccccaccgggcgaggcggcgacttcaatatcggagataccgccatacactgcactaccgctccagccacgttgcttatggagaaatgccagcgcaatatcaagaatggccttcatccaatcattatcacggtgaaagaccgagtgaaaactgcttgggatttggcagcggatatgggcttcgctgaacgattggaggtctgggatattcagtcattcctgtcaaccaatgtccatgagcatggtcattttagccaagatgaacgcaaaacaatgctcactgatttggtcacctcttacaacaagattattgacacatacgagacagaccccagcttgcgtattgagtacagtaattagaaagatgcttatactagccgccaatcttaattgattatccgaaaaccgttcttaacgtccgttacattagattttgcaagcaactttaagcacatcgaggtatcactgtgagagaacgaacatgtgcgccaaatcccaacctgctggagtccatgcgttctgttgggtatgacttgaatactgcgatagccgatatcatcgataattcgatagctgcgaatgccactaaaatcagtattctgtacttcgggcagggcgaggaaccatacattgctattgtggatgacggcgatggcatggatgatcaaaccgcattcgaagctatgcagcttgccggcaatagcctgaatgagaaccgtgcatcgaatgatctgggccggtttgggcttggcctgaaaaccgcttccctctctcaagcgcgatctttactcatgacaacgcttcaggacggagcacgtaccacactgcgctgggatttggacgctgtagcacgcgcaggcgaatggacgttggaacaattgaacgagaaagagactctgtcggcgttgccccaaagagtccacgacgccatgcctgtctcacacggtacttgtatcctgtggcgcaatctcgacaagcttgagactcttacgggcagatctctcagagagatcgacaaggctatggatgaactcaccggataccttgcattggtatttcaccggtttacgcacccccatcccgacgatgatatccgacagatcgtcatcgacattaacggatatccgattccgcaacgagacccattccttcgcgataatccggcagtacaaaccaccggagtgcagcgcatcggcaatttaggagccacgctgcgcggctatacattgccgtatcaaaaccgtctgcgtgacgaagacaaaaagcttttggatctcagcgagcaacgaggcaaaacactgaccgacactcaaggtttttatgtataccgcgcttaccgactaatcacttggggtagctggttccgtatgcttcccaaaaaacaggccactaagctgagtcgcgtgcaagtggatattccaaatagcttagatgctgagtggactcttgacatcaaaaagtcacgggccacgccaccgaaaatcatcagtgacgtcatgaaacgatatgtagatcgtttggcaaaaccaagtcgcagagcccaacaattccgaggtcgcaggaagaacgatgaccccttagctcctgtgtgggatgtcgtagatgaccgcgatggcgcattccgctacgaaatcaaccggaacaacccatatatcgcgtcgtttctggattctctgtccccagaacagcaaggtgcatttattaacatagttaatgtgctgtcaatgacgatcccctatgaggatatgcaatcaagatttgcaatggacaaacgtccagaatcttttagtgtcacggatgagcaggcaagagtttttgcagagcagatgtggcttttgaacagcattggcgggttatccccacaacaattcgtcagcagattcagaaacgtcgaacctatctcactatgccataacggagagtcgatccttaaggaggtatctcatgcccggtagctggtccagcgccaaacaaatggtaacgatattctacgctagcgtagagaagacacccgatgaaggcgatatcgtccagatgctgaaacaagccgcaaagatgcagaggctcagttcgaacggcaaagagttcgaacaggcattccgcgaattgcgtagccagcttcttgataaagttcctgaagggacaactctcactgataacgaaaagacagtttgggaagagtggcttcccgagatgaaagcatccgaactttccttcccccgatggctcgcctactatcaatatctccagaagaaacaaggggcggactatatccagctccaaaccttaggcaggtccacagaacgaatcctcggcctgcttgcagacccccgcagagatcatccaccagtccaacgcaaaggtcttgtacttggcgatgtgcaatccggcaagacccgcacgtacatggcattgatgaacaaggccgtggactgcgagtacaaactgatcgtcgtgctcaccagttctgacgagagtctccggggacagacgcagaagcgaatcaactccgacttcatcggattcgacttcgcgcgaaaggtcaccggaatcggcgaatatctcgggaaagaggcagtgacggtgacgccgttgaccaacgacgacgactttatcaaggctcaaagtagcgcattcaagacccatccacgtcctacgtgggaccgagctcctctcgtcgcagtaatgaagaagaatggccaagttctggataaattcaacaaatggctcgacaaccctgaatttcccaaagacctacctgtactcgtcatcgacgatgagagcgactatgcatcagtcaactccgccaaagccgaagactcgcctacaagaatcaactcgttgatatgcaaactctgtaggatcagcaaacggacctcgtacgtggcagtaactgccacgccattcgccaacgtgttcatcgacgatgagttagaagatgacttattccccaaagatttcatccatattctaccaacgccggcagcctacatcggagccaagaagctgtttggagatcttgacacgccagcaacagacagcagctgtatccacgaattggagtggggcagaaaaagagatcttgataaatggctgccactgacgcataagaaggagtataaattcactacgaataagctggatccacaaattgaatatgctgtggactgcttcctcatcgcctgcgcactcagagcaaacagcgaacgcaaacgtcaatcaatgctacttcacttgtcgcggttcactgctgttcagcagcaaatagccgacatggtcaatgattacttggacaatatgaccaatgtgctgcaatatcatctccaaaatgaagccgacgaacgtattattgcgctccgtcgcgcgtataagtccgaatatgcaggatatgcatccacacacggcataacatggaacatactctgtcgacgaatgcaatctctggccggaagcggacgactactggttaggctcgtcaactccgacgccaaggactggaatctcgctcgctcggttccaagcaaactcacacccaatgaatgcaccatctatgtgggaggaaatcaaatttctcgcggcatgaccttggacgggcttgtctgcagcgtcttttaccgcaatgtgacatctgcggacacactcctgcagatgggacgatggtttggataccgtcctggctacgacgctctgcaacgaatctggctgctaaggcggtccatcgacgatttccgctacgcatgctccattgtcgaagatatcaaagatacagccaacaaaatgtccgagtacggaatgacaccacagcaactcggtatttccatccaaggcaatccaagtcgcggagtgcgtatcaccagtgccaataagatgcgaaacgctactaagaccaacggcccgctcgagacattcgatctggcaaaccagatcatcgaatcagttaggcttgacgttgacccggaacgtaacgagaccaataacaaggcactcgatattctgatcacagactgcatatccaatgaacacatcactgcaagtcgtcccgaacaaggcacgacaaagattttccagaacgtgcccagcaagaccataatcgattttctatcggcttaccgcgcgggctacaacgacacatactttggcccaacactgatgcgctacaagaatcgagagccattggaatctaacaccaccatgatggctcagttcgccagaacacggcaaagtaacatccccggcaccacttggactattgcgttcatcaacggcgaaggcgccatcgtttccgggaacgtcccttttacctggaaggaggtagtccgcaccagcgatttctacgatgatgaccatatgtactggaagatcagcggcgacaagctccgtcttgccggctccacggactatcgcaaggtcgccgatatactccatccaaagaatgtctatccggggaacaagtcggaaagggaatactatttgacaaagtatttcggcgacgaccctgtgcttatgctctatcgtgtccatgtgaaaacaagacatcccgattcacaagctgagaaatacatcccatccgaaggacatggcctactgggagcaaaaattatcattccaactgtcgactacattgataggggaaagcgaaggacaagcgtaacctactatagcaacactgtcgccactcgcctgacatacgaaagtcttgagaggcaagaagaggagaatgacgagcaatgaccaactaccagaatgcggcttcagtcgaagagctttggcgccgcatggccgagcggcccggccgcgagaaccgggagttggatctgacgctacaagtaccgttgatcattggatgtacaccagatgcccgtccctacatcatgattttatcccaaaagcggccttggccaataaacggattagaagccatcgatgtgcaggtgggctcacgcacgtcaccgattggcgaaaactggtcgctaacgttcatcctacgggattggagcctactacacgcattcgccgaaatctgtctcgcttttgcagatcgtatccgcactgcatcttcaagaaactctgcactacgtgagatttactcaactgtagaccagtggcatcgactcttgaaaagcatcacacacacgaaccgtcaagctattttacgtggtgtgtgcggtgaacttcttgccgcggagaaagtcatgaggctgtcaggcagaccattggagaccgtgatgcaagcatggaccggcccctatggagcacctcaggattattcgttcgatgctgaacaccgatattgggagatcaagacagtacacagttccgcacgccgaatcactatttcttctcccgaacagctcaacatcgccgacaaacagatcagtttgatcaccatcgttctagacacacctactaacaacgatgataagcagctaatctcattaccccggattatagaacgacttcggcagttggcagacgacccttacttgatcggtcagtgcatcgacaatgggctcaatgcgctggggcttgatatacgttcagacatagccatgcatacgatgtttgaagttggcccagttagggtctacgacgtcaaagacaggttcccgcgagtcaccccatcgatgttgcctaacggagtaactaacctgacatacacagttgaacaggaatcgatcgagccattcgcaatcacaaacggcaaggcacctagcgcattggagaagtgatggagctagcagactacagacgcgaactcgtcgcaagagtccaagagaaggccatggatgaagggcttctcgatcaagaggcattcttccaagtcgtctgcgaaatgttacgcgacagcgaggccatcgctgactaccagcccgttgaaccgggatatcgatttggtgagggcacgaaccgattcatggcggtagatggatacgatcaatctgcatttgacatggacgaatccatcgttgtaattgcatgtgatgactattccaaccgtgttggagacgaacagataaataccattcaagccaaagattgtatgcgatacatcaaagctatgcgtcgttacatcaaagccgcatttgatggttccttccttgaacaggcagaggagagcagtgcggcctgggaattcgcctcattcattcacgagcacaagagaggcatttctcgattccgtctttattttgttactgaccgggaatacaccgggcgcgattccagcatcaaggaccccactgacttctattccaaaggtaaggatgaacataaggtcagcctcgaagcccatgtatgggatttgcgccacctcatggaagcatcacaagctgcagcccctctcgaacacctcactgtgaaccttggagccgagggcattccagccgtcaaggcacccgaggctggcaacaatatggacacctacctcatgttcttgtccggtcaaacgctttccagctggtacaaaaaacatggctccaaacttatggaggccaacgtccgttcgttcctatctttgcgaggaaaggtcaaccgcggtatccgcaacacattaagcacggaacctgatcgattcgtcgcttataacaacggcttatctgcgaccgccagccgagtcgatatgaacgaacgaggaaacattacggcaatccatgacttgcagattgtcaacggcggccagaccacggcatccattttttacagtcaaaagaaagacagcctcgacctgtccgcagtcgtagtcccggtcaaactcgttgtggtacgtgaggatattgcctgcgagcttgtcccatacatttcccgatacaccaacagtcaaaacaaggtcgccgagaccgatttctcatctaacagcgagtatcaggtcaaactgtcccagctctctcagcaagttctcatgcctccgctgcccggtagaaacccaacgcattggtattacgagcgtacccgcggtcagtacgatagtgagagaaaccgtagggacaccgctgatcgtaagcaattcgaaaagctcaatccttccaagcagcgcatcaagatgattgatgcaccaaaatatctcatgtgttgggatgggtatcctcacatcgccagcctcggatcccagaaatgtttcgctcgattcgtcgaaaatgaatcaaagaaagggcaagaaagcgttaaggcactcgacgccgagttcttcaaacagctggtgtgcaagcgtattctcttcgacaccgtgtacaagcacatcaagatggcggattggtataagggtgcttaccaaggcaatatcgcagaatatgccgtcgcaaagtatgcactcgatctgaaacggttccatgctgatttcgattttgagacaatttggcgcacacaacgcatcaacgatgctatcctcggatgccttatgaaggccgccgaacaggccagtaatgttttgaacgactcgaatcgttccacccaaaatatcggcgagtgggcgaaaaaagaagcctgctgggattcgctgcggcgacgaccgtcttgtctcgatgcggtgcaacctttgccctcaccagtgttcgaggcggccgctgtcccagccacagaagaaagtacgcccgtcgcagcccaacaaaccatcgcgaagaccgaaaatcccactcctgcttttgttccggtgccctcatccgtaccgcgacacaaagcaccagagcaagcagaagatgcgcgtatagatgattggacagcagcaccagctggatttcttcgtgagctacacacttttgctaaggggcaaggcatactcagtcccaaagcggaaacttcactaatggcgctcattgatgacatatcgactggcatcaacactaacgctctgaattatcttctatcgcgcgccaccgaatgcggattccgatacaacccaccaagcggaaagccgacagcggtcaggaaggcagtagaggattctcctctgccgaaatcagaacccacacacagctccttggtggatatcgatcagacaattgattaccaaagagagttcctcgctgcaatcactgccgatacttggcgcacaatccttgaatgggctcgatatcgacatgctttaaccgatgaggcactggctggcgtcgcaaaaatagacaagcaaattcgattaactgatgaacagacccggtatctttggacatggcggcaaaagatgatcgacaaaggattctctgctagccaattcgcaccacgacctggtacgtattagtcgaaatatccttttacgtcgcgatcgggatcaagatactcagccaccactttggcgatttgctgcgccaaaagagggggcacagcattaccaacctgttgatattgtgcagttctgttccccataaagtagtaatcgtccgggaatgtctgcaaacgggcggcttcgcgcacagtcaggctacggcattgcgtgcaatctggatggataaagtaatgaccatctttgcagatatgcgaagtaattgtcgtcgagcatcgatccggcatctgcacgcgaaaacgatcggcaaagataactttttcccctttagcggcaccttttgcattatcgtgatccggcaatagcgacttgggaaaatcatacagtttagccggcttattatgcttcgcggcaaatgctgaacagaatagataacgctctagatcggtcgccatatggttgcgggcatgatggttcgccaataccgtacgatgcttgagatggccacggtaccagccacggtaaacgttaatgacgcccttttctacacgacttgcatcctgtgaaaatggaaggggcccacttagtaccggctgcagcacatcccataaatcatggccctcatcagtggcaagaattgctttggcagcacgacgtacatattcatcccaatcgcaatcaggttcccctttagaagtgaatccactccgcactttaggaataccagccaatgcgtcagagaccgatacacccttcctcttctgcaaggtgcatggcttgccacgttcctcatcattacggacaccaagaagaattacgcgatgacgggcctgaggaatgccataacattcagccttcacgatgaagtccttgggagtctcaggttcatcaaccactagagaatgcaacgtgtaaccggcatcctgcatatctcgttcgatatgcgcaaacacgccctgatgacggtgctgagcagaaaggatacctttcacgttctccataacgaaaaccgtagggcgtagttcttcgataaactggaggtagcacttgtagagcgtctgcttgacatcgttatccaaggcctctttgttccgcgtcctccgcgcacgccccacaagagaatacgcttgacaaggtggcccaccaataagtacaagtgggccattgtagttatcgccacaacgagccttcaacttatccttggccatatccacaaaggtgtcatcgccttccaccaaagtgcctcgaacagcttctttatcagcctcagcccactcatccggatattctagctgcatggcttggaaattgtaagctgatgggttatcaagatagttcaagtagcatttcggcaactgcccatcagacttcatgattttacgtacgaacgagcgcaaccgtagagtgtcatgtgcgttcttttccatttccaccgacatgcaaatctggaaaattagcttaccgtccagatccttgagcgacgaaaaaccctcgccaaggcctccggggcctgcgaacaggtcaataatcggtatagcgctcacgacatcctcattccttcaacaaatactctctgtcagcgaatggtccaaaaagagcgtaccaggaatattcagcacgtgatgactaccgctcacatgtttctgactgtctgcagcgtccacggaccacatcctttcgtagaccaccgcaagcgaccacggcaacgacgctaatgggccaagtgctggcaacttgacgccaccaaaaggctctcagcggcgtttgccggccaaaaactggcaggttgacgacagtggggacaccgatttgagccggcccggctgaccatcaactccgcaagcgtacggcggcggccattccgccgtcgccgtaggtggggtggagcatgaaggcttggctggcggtggtgtcaccgcacatcaacgattcccacatggttaagcggctcatggagatggcttcaacgccgaggatggcgtcggcgatgtgcgcggcgtagagatcgcggtgcttggcgatcaggaagcgcatgagatcgaggcgcttggtcatgctggtcacgtttgaggaggccggggccgtgcggtactcgatcagcggctcgggggcgatgccgatatgggccgcgtcttttgcgggattctctgtatcccaggcactcccaaaacctccgacatgctcagtaccgccagtaaccccagcaccgcagatatcgttttccaccgtcaatccgcactccaacaacgacaggaagaagtcccagtcctcgaagccgccgcgcatcgactcgtcgtagccgccgcagcgctcccacgcgacacggcgaatcatgcacgtggccgggcagcaattatgcgacacgaacgcggcggcattgccaccagtcggctgggccactgattccaggacaccgaaagtctgcagccagccggatgcggcgaccatcgttttgtcggcggacaacatcgacaacgtgcgctcaatgaaggccggccgcaaacggtcatcgccatccaacaccactacgaacggcgtttcggcggcggcgatgccacggttgcgcgcggcggaaggaccggcgtttgcctggccgatgaggtcgatggccacaccattcgcatccatcgccccgtgccggcaatcgtcgagagtggcgttcagcatctcgacggatgcgtggtcatcggacccatcgttcacgatgatgatccgttccggacgaaccgtctggggccaatgacgactcgactgcctcgtgaatcaacgggccctgattgtagctggtaattaccactgtcactgctgccatggcggcaagtctatcgggtccggacgtgggccatccaccggcgctgcgcgctgcctcccgccagtggggaggtggcgcgctatccccggctaacgctgatgcatgtgtgcgggcacgggtttggtgcggactttggtggtgaagtagtcggactcaatcttccacaccgtgacgctgcggacctgcgcatcagtgaattccacattcggcatatgcgcctgctgcgccatcagcgtctgcaagccgtggcggcattcatccagatcctcgaccagtgacgccgtgccattgccgacgatcgacttgaacgcctcaccccaattgcacgtggtgcggcccgccaccacctcgcagtcggtctgcatggtgaaagccacgggcagtcggccaccggcggcggcgcgaatcgcgtcgagcttgcggccgcgcggcgcggagtggaaccagagcgtcagcttgccagtcgcctcgtcgtaatcaaagccgaaattcagcggcacgatagtcaggccctcggcatccgcataggccacttcaacgatgtcgcaggcggcgatgatcgcggcgatccgctcgggatcggtcacctcgcggtccgcacggcgcatcatgcgatgctcgccggcgaccgtgtgctcatcctcacgcttggcgggcttgcgagcgcccgcgatattctccatgctcatgcctgatcatccccatccacaaccgcaatccagtcgccgtagccttcctcggccatgcgcgagcgcggcacgaagcgcagggcggcggaattcatgcagtagcgcaggccgccgcggtcggccgggccgtcggtgaacacgtggcccaagtgaatctgtgtgtccgacgtgcgcacttcgatgcggtcgcggcccggaatgcggtggtcctcatgctcggtcagcaagtcaccggcaatcgggcgggagaacgcgggccagccgcagccggaatcgaacttgtcttgcgacgagaacagcggttcgccactgacgatgtccacgtagatgccgggctcgaatttctcgtcgtactcgttgacgaacgggcgctcggtggcggcgttctgcgtgacggcgaactgttcgagcgtcagatcccagatgcgttccacgtacttctggcggcgttttacgttcgcgattgcggcgatcggtacatggcagtagccgccggggttgttcaccagatagtcctgatggtgtgcctcggccgggtagaagttgcgcagcggttcgaccagtacggccgggcgctgcggctggcggtcgaccagctgctccagagccgccacatacacggcgcgctgcgtctcgtccgtgtagaacatgccggtgcggtactgccggccgcggtcctcgccctgctggtccacggagaacgggtcgatgacctccaggaacagcaatgtcagcgtccgcaggctgacctgtgccgggtcaaactcgactttcacggtttcggccgcatcggtgccgcccgcgcatacctgctcgtaggtcggcgattcgacggtggattgcgcgtagccgaccgtggtgtccgtgacgccgtcgacgttctggaagtagcgctccagaccccagaagcagccgccggcgaagtatgcggtttgcgtatttccgtcattgtgttcgttacgttcgctcatacgccccacgttactacgtcgaggcggctcgcgatgcagtcaacgacacctctgcaccggcaaaaccgctttcgaggggctgatttgacccccgccggaggtctactcccgtttcaaggggctggtcggccgctagaccgcatgtaaaaacccatccgcgccaacgccattccgccgattttggagcgtgaatacttcggcatcagcccctcgaaacgggagtagacctccgggagagaccaaatcagcccctcgaaacggagatagcgcttgccgcgccctccttgtcaggctttctccgttcaaagaggtacattcgggcttctgcagaatgctatcttcgttcaaagaggcaccgaatacgggaaaccccgagtacaaacgttgtcattgcaacgctcatactcgagatttcagagttcaggcacctctttgaaggcagttagttgtcggcaaggggccaaatgtacctctctgaaagcagataccccgtctcaggctcgaatcggctaacctgcgtacccgtgtgcacaccttcacgaccgcagcgtgctgagcatgccggccacttcggcgggcgtcacgctgggcacgtaggcgcgcaccaccgcgagcccgatctgcggcaacgccgccgggtccgggtagcacacgtagaccggcgcctcggtgggctggaacttgcgcttgaagttgaacagcgagtggaagccgtaggcgggttccatccagtcggccacgatctgcagcgcgtgttggagcacctgcgtgccttcgctggccggtgccccgtcctccccggcgttgtcccgatcgggattcatgccggccaggggcgccgcggacaggctcatgaactccacggcgtgcgtgggatcggcttcgccctcgtcacgcagccgctcggccatgcgcgcgatcaggaactccatgatgccgttggggctgtcggtgcgatggcgcatgaaatccaacgtccagccgacgatgcgcccgtcgcgccaggtgggcaaccagctggtgacgcccagcacgcgcccgtccgcgtcgatggcgtaaagcagccgcacgcgcgggtcgcgcagttcctcgacgccgccgagcgtgaacttcatttccggcagcgccttgagctgcgcccactcctcggagatgtcctcgatctgttcgcgcacatcgagcgacgcttccaggaatgtggactgcacgtcggtcacgccgtcgcgcttggccttgttgatggcggtgcgcacgtcctgccatttcttgccggtcgtcttccagccgcgcgggtcgaccaccatttcgctgccgacctcgatggagttccagccggcttccagcaacgcgtcgcgctgttcccgatgcacgccgtagaacaccggcgacagcgaacgttccgcacagtgctgggagaaaccgttcagatcgtccatccattccgccggatcgccgaacggtccggtgcaggtcagggcgatgccgttgagcacgcgatacgccacggccgatctgcccgtgggggacagccagtagctgttgccttcccacgtggtcatgaagctcatcgattcgccgccggtttcgaccagacgttcggcgcgcgcccgggctcgctcgttcgattcgctcacgtcgcccatccagtggatcaccacggccagcaccacgatccagaacactaggccgacgccttggtacatgatcgaggccatcggagtgcgcggcacgaacgacagcttcatatggctcaggaagccgatgggcaggaagcgtcccggcagctcggccagcagcgacgaggccgtagcgcgtggcgagaaggtggcgggttgggcgatgccgtatatcaggtatatggcggcgcacgccagccaggccagcacgatggcgccgatgccgccgaccagcctgcaccagccgatgcggatcgggaagtgtttcatcgccgccagcagggcgatggcgaacagcagcgggggcaggacgttcgccacgcaggccacgatcgcgccgtgctgcagcagggaggccatgccgtccggcgcgaagctcagcggcacgaccagatagtaggcgacggcgatggccaccgtgaacaggttgatggccacggtgcagatggccgcgaaccgacgtccgcgatacaggccccacgccagcaccagggtcacggcggtgggcagcaacgagcgcaacaccgcgccgggcatcgaggcccgcagcagatcgaactgcaggaagcagccgccgtgcgtgtcaccggccaggcatttggccagcatgccatcgtcgacggaaaccgggctcatgagcaggccgatcgtgctgagcgggcccgcatggttatgggaggtgatggcgatgaccggccccagggccagtaccacggcgatggccgcgaatatgcgccgcgcctcgaaggaggtgctgcgcagccagtgccattcggcttcgacgtgcgcgggcggaccggccatcacacggccggcggcatggccgatcagcgcggcggcgagtatgcagtagccgctggggttgccgctgtagagcaacgtgaccaggatcgccacatagccgacgagtcggatgcgcctgcgccataggtggctgcagaacgcgctggccgccatgagcgcgccgaccggcaacaccagcgggctcaatgcgaaccgcatgcgggagacgaacagggagtcctggaacatccatccggccgccgcgcacagggtcaggcccgccagcacgccgccggccgcgcaggcgagcgcggtgacgacggtgcgcacacggccgagccatggttcggctatcgacagcatgacgagccacaggatggcgtcgaccatgagttggatgacgccgcgcgccaggaacagcgagcagatgagtttgccggcgttgaatgcggccatgctggtgctgagccgcagcggaaacgcgaatccggccatcgcggccaccagccacgccaccagattcagcgccaccagtgccgccgtggcggtgacggccagccggtggtcgtccgcccactgccgcacgtcaccggccagttcacgccagctttccgccgcatggctggaccttgccgtatgcggtttggtggcgcgggaggtcgtggcgggcttcgtccgcgagggttccgcgtcccgcaggggccgccgcgtctgcggcatggccgccggccgcgcgttcccatgctgttgttcttcgctcattgcaacacctccacttgtgggtattcctccaacgatttcgtcatttcgcccagcccggttcgcgcgccgaaccagtcgagaccggggttccagaccgcctgcaccgcatgccagtcatggtcggcgccaggcacgaccagttcggtggtctccatgccggccgcgcgggcggccgcggcgatggtgcgcatgttggctaccgacttccgatcccctttgccggcgccggcgaacagcgcctggccggccgtgccggtggcggcgatggcgttgaccggcacctgcccgtcgtaggccttgcggtcgccggcgaaatatcgccggaccatcgtctcgacgctgccgtcggtcggctcgagctcaccatccaccggcagcatcgcaccgtagatgtcggggtgacgcggcaccagctgcgtggtgcaggtgccgccttgcgagaacccgcccatcgcccacatacgggccgacttggctaccggcagcgtcgccctggcccagttcaccacgtccttggtgaggtaggtttcggcgttgcctcgggtggtgtcggcgcacaggctgttgtgcatggccgaaccgttctggtcgggtgcgagcacgatcggcgccagcccgtcatgttcggcggcgtaagcgttcatcgtggcggcgatgttgccggcgtcgatgaggcgaccgggactgcccggctgaccggcgagcagctccatcaccggcagggccggcgggcggtcggacagcgcggcgggcggcaggtagaccatcgccttgcgcgccttgaacttggattcggtgttcgggatgctgacgacgaacaccctgcccgagtcgggcatggatggcagagcgtccttgcgcgccttgtcgcgccactcgccgacgctcatcgaggctttgcgcacggtgaccgaaccgagcggggggtatggcgtatagccgacgagactgccgatggtctggtattcgccgtagatcgagtccacgccgagcgcggtggacgccagcaccagcggcaccagcacgacggccagcgcgcgacgggccccccgtaacgtcacggcggcggccagcacgaagccgaggcccgcgaagcctcccgcgacggtgaggatcaccggccagcccaacgatacgccgaacaccatgaacacgtcggacatcagccatgtggccagtagtccgcccgcgccggcgagcacggcggcggccagcgcggcggccagcggatgcaagtgacgacgttgcggcgtacgcaggccatgggaaataaacgtctcttccgtcgaagctgcggatgacgccgtagcagccgcgttcgtaggctggttggccggctggttatctgggtcgacgggcgattgggccgacgattcgccgtccggcgccaagccgtctgctgccgggccgcgcttcttgctcaatgccagcccaacaatcagtatgattgccgcgatcgcggtcagtccgaacacggtccacggcacgattccgcggaccagcgacaattccatgaacgtcttccaaacggagttcttcatccttcgtccccgcgctccaggctcctcgtcttgtaagctcacgcaatactagcgcgcgattcatagagcgtcacccaatttcacaaaaattgtcgcgagttctcatggtttccccagactccgttcagctcctgttcacatccggcctggacgtccgcagctcaaggccagtgtcggcgctggattagcggtgcgcaggcttgtcccagctttagccggaagcagggaatatgttggtggatatgactcacgcaaacgaacaacgtccagcagcgaccggcaatgtcgccgataacgtgtctgacgcccctactgaccccgcgacgagcgcggcggcaaggcccacgaccggcacggctgatggcacaacagccacaaacgccgcggccagttcaacagcaaaacccgcagccagcacctcttggaccagggaaaccaacccacgtcgagcactgttgacgattatcgtcacggtggtggttgtggtgaccatcgtactggggctcggattcttcgtgaactggggattggcggccctttcggtgatcattatgattccgggggcgatttcgctggccgttctcgccaagcaccctgaatccaccggcgggcgcagcatgttcggcatctccgatccgaatacgctgcttgacccgattcgccgcccgtccgagcgccgcggcgagtaagttgctgctgcccatcgggcggtaatttacccatggggcggtaaaaggcccatggggcggtttgaagaaattgtgaaacggcagaataaagccattttgggataccgccccatgagggttttaccgccccatgggattattaccgccccatgagcaaagccaccccgctatttgcgcgcactgaccaagtaattgagcaccgatccggcggccaccagcagcgcgccacaccaaaacggcagcgacagcgccaaacccagcagcaccgcaccggccccggtggacagcaccggcgtggcataggacgcaatagccagccgctccatagacccatgcagaatgccatagccccagcaggcataaccgccgccaatcgccgccgcagcaatcaacacaaacagccatgcgaccagactcggcggctcggccggccacccctgcccggacgcgaagtggataatccacaacgccacggccacgcaggggaagaacaatgaagtgccgtccaccccatgactcatggctggcgtgaacaccgcgtacaccgaccaagcgagcgcgcccgcgaacgccagtgcatagggcaaagggttggcggcgatatgctgcacggccgcatgccagtcaagcccggaattaccgccgaccgccagcaccacgccggcagtggccacaatcgcgcccggcagcaccttgacgaccgcgtgcttgcgatgggatacgcccgccgacagcagcaccatcatcgtgggccacagatagttgaccaggctcacttccaccgaggatgcgtcggtagaggccagacccagcgagagggatatcgacgattcgtaaaatacgaacaacaggccgccgataatcaagtatttcttggggaactcgcgaatcgggaccgggcgccggaacatcagcagcaggatgccgccgaccgtgtagatcagggccgaaccaagcgtggcaccgaagttttcggagacgatgcgcacggtgccggccatgaagctccacagcaggatcgccatcaggccgatggtcgtggcgcgcgcggatacgacgtggccgccggaacggctcgccgccggggccggcgtgccgcttgcgttctgtgcgccgttcgccatatgtccgcctctcttgcctcgtttcgaaggcattctactcatcggatgtgtacagctgcagaacggcacacgaccggcgcgcgaacagggtggggttcggtgattgaaacagcaaaatgccgggtagggtaaatccctactcggcatttgcattggctatgtttcccgccgtctgtcaggttagtcggcgttgaaagcgtagggcaggcggcgtgggaagcatggtttggttacgatttatctctcccccacccgcttcgcgggagctccctcgtcagagggggcaaagctactcgaagcgggacttcgggacgaatcaagtatcgtcagccctcaatcgcgatttggtgcttggactcgacttgcggctgggcctgcatcttcggaacctggatgcacagcgtgccgttccggtagctggcgtggatgtcggactccttcacgtcctcgccaacgtaaaaactacgcgagcaggagcccatgtagcgttcgcgacgcagccacttgcccgaatcggacgcgcaagcgcacttgctgtcggaagcctcgccctcagcggccggagccttgtcctcatgctcgctgcaacgcgaggcggacacggtcagatagccgttgttgagctcaaggttgatatcttccttcttaaagccaggcatatcgatgtcgacgtcgtaacccttgtcggtctcgcgcacatcggtggtcatcatgttggcaggcattgcggcactcatcgtgttgtccgtgttgcgccaaccctcaaagaacggatcatcgaacagatccgagaacatcgtgtcattcatcaaagccggaaacattgccataatcggtactccttgattaggagagaatcggcttggatgccggccgccaacccgtatcgcggggctagcagcggttatcgtggccggttccggaaccctcccgggctctcaacctttaaccttcacttcacccaattcccgagcgcggcaatcattccgggattatgcccacagagaaattgcggcggggaatggctgccggtaaagccggccgagccgagcgccgtgaccaccctcagccagtcttacggctgccagctcccgccagcgggagcatatatacgcacaccagtaggtgtactcatatacctctgccaacgggagcatgctggcgcgcgaacggctcacatctgccgggcgttttcgagcaaggcgtttttgaggtcggactcgatttggcgcatcttgacctgggcggcctcgcggttggccttgccttccttctggatctgcacggtctccttcagggtggcgatgagttcggcgttgatcttctccagcgtgtcgatttccaccacggaacgctggttggccttttccgcgtccaccgcacccttgtgcagggcggccgcgttacgcgccagcagcttgttggtcacatcgtcggccttgttctgcaggtcgagggccttgcgctggttggacaggcccagcgcgatcaccatctggctcttccacaccggaatcgtggtggagatggtggtgtcgatcttgtccacgatggtctggtccgcgttctggatgattttgatctgcggcgcggtctgcaaggtaaccacgctgatgcggtcgaggtcgtcgagtcgcttggcaaaacggtcgagcttggacttgaagtccttcagcacttgcgcctgcatggcgtcgccactggcggcggcctcggcctccagcgctggcagctggttggcgttgaagtcggcgagcgccttcttgccggccagtacggtcattttcagctcgcggtattgctgggcgttctgcgtgtacatcgtgtcgtacatggagatgtcggccacgagtttggcttgcgcggattggagggtggtgatgaggtgttgcatggcgtcgttgttgggcagttcggatacggccgggatctggtcgagcgtgccggccacgccgaatcggctgatcgaatcggtgccggcgaagttggccgcgcggaagccgtggcgctcccacgccagcttctgcgccgccggtgttttcaacaggttcagcagtgtgtcgcctttctcgtccaaggccatcagcgtgtgggtgctccacacggtcggcgtcgggtagacgatgaccacgtcgtccttgatctgcttgaacgcatccgtctggttcacggccaaatcaagcacatgtgatacgcgcccgaattgtccttggtcacaagtccgccgttcacgagcccgtccgccacggccttgtgcgtgtatagcacaatcggtgagttgaagacgatgtcgctttggggggccttgacgcctttcgcattgccgtattcgacggccgcgcgcgaggaggggaacatgtaatccatgcctttccggtccgcatccatcatggccagcgatccggccttgcgatagtcgatggcaatgccttgcttggcggcgagcgccttgaacttggcgtcatcgaacaggccgattttctcgccgcccaggtagccggtgatgctcacctgttcggtcggttcggccggcgctggttgcgattgccgccacaccagcgtgccgcagaccacgcccactacc

SEQ ID NO: 3141 - DNA, 55243 bp, Unknown
  R215_18m  MAG No. k141_66557
acggacggcatcacgacgaggggcagatcggtgcgttcgctctgggtttcgtaaatctcggtcatacgctccaccttagaagggcggcgggagattggaacggaacgcaccggaccgcgcatcgatcggcgcggcggccgacgcatcggccgacacaccgccctcaagcacgaaaaagccggaaaccgttggaaatcagcggttccggctctgctcgcggagtcagagggattcgaaccctcgagccgtttacacgactaacaccttagcagggtgcccctatcggccactcaggcatgactccacgttacgcaataatgcgcaacagcaaatcactgtaccacgtcctgcggatacgacgtgccgaacgacacattattgaccgtccgcgggcgcggcatcgccggagaacgtaacgataaccgcgcaaatcaccaacgccacaccgatgatttcaccaacgccgggaatctcgccaaacgccagtcccacggccaccgccatggcgggattgatggattgcattaccgaaaatgcgccggatgtggtgcgtcgcagcgtgatctgctccaccacatagggaatgaacgaggccatcagggaaatcacaaacagcagagccagcagcttcagcgagccgccgggctcaagcgcccacgtggcatcggccttggggtgaaccacatgagccacagccggcacgccaaggaacagggactggaccagccagccgatggtcacggcgatgcacagattatccagcgaattgccgccagccgccacgcgccggccggtgatgatgtacatgccccacatcgacccgccgatcaaaatcgcaatcagaccatacaaaaacgtgcccttgccggacggattggccaatgatatgccggccaacagcaccacaccgaccgccgcgatgccgataccgacccgctcacgccagcttttgccggtaatcaccgccaccgaaagcggtcccaaaaattcgatagacacggcaatgcccatatccatattgctgatggccacataaaacagggtattcatcagcaccagcgagcagccgagcagtacgaccagcccccagccgcgggcgtcgcggtgaaacagctgcgctcgcttagccttgctccagggcctgcaccacagcagcaacagcaccgccatgaatcccacgcggtaccacaccgaatacagcgggtcgagctgggtgaacgcaagtttggcgacggccgtagccaaataaatcaccagtgcctcaccaatcacgataagcaccacgggaacacggttgaggataccgaccactgccttcttcacgaggtttacgctactcggagagtcgggacagcgcgcagcgacttggaaggcgttacgggcagtgacgcaatgtggacgattccgtggaatcgcacccaccatgcgaaacagccgcacagtgcgcaaacccttggaattccggcgatattcggcattacgacaatgagcgccgcgccatgcgcgccacatagtgagcatgacctcgttcggcattcctacaatggtggcatgagcaccgcaccgagacttgaggccgccaaacgcgattggggtcacgacgagaccggatgcaccgtgctgcatatcgacatggatgccttctatgcctcattggaggtggcgcgcaaccccgggttcaaaggcaagccggtgatcatcggcaccgggccgcgcgcggtggtgtccgccgcgagctacgaagcccggagatacggcatcaattcggcgatgccggccgcgcgcgcccatcagttgtgcccgaacggcgtctttctgccggtggatatggcgtattaccgcatgatgtcgcaccgaatcatgcatgaggtgtttttgaccgtcaccgaccggttcgagcaggtttcggtggacgagggctatatggatgtgtccgccgcactgctggagtgggggcggccgagcgcaatcggcgcgtggattcgcgctcaggtggccgagcgcttccacgtgacgtgttcggtgggcatcgcctgcaacaaactggtggccaaaatggcctcgaccaatgccaagccggacggcatgctgctgattccggcggcccgctcggctgagttcgtgcagatgatgccattgcgcggcattccaggcatcgggccgtctttggagaagcggcttaatgcttggggcgtgcattcggtggctgaattggctcagctggatgaagctgcattgactcgcgccactggctccccggctgcggcacgtggattatgggcggcctcgcacgggttggattcccgcaaaatcaccacggtgcgcgaggagaaatccattggatccgaggaaaccttggccgaggatacacgcgatatgcgcgtggtgtgtgggctactgcgttcggcctgcgacgaagtagccagcacgctgcggcgcaaggggctggtggcgcgcacgctgacggtgaagttgcggttcgccgacctgagctatcagacccggtcttttacgatggagcggccgaccgatacggccggcgtgctgtacccggaatgcgtgcggcagctaaaagtcatgctggggctaccggcctcggcggagtctgccactcccctgcccaaaactattcgcttggccggtatgagcacgtcttcgctcagtgaggcggcggctacggccgtgcagccttcactggatgacatgttcgaagaggccgacaatgcccgcggccagacctcacaggcacgtttgcatgatgccgaggccgcactggatgccgtacgccgcaaattcggctgcaaggccgcccagtttggggcgtgaacggctcaacgccacttgcgatctcattacgccgtgagacgttcgcaggcggagcggatggcctcgtcggtggcggtggcggagaaacgcaggtaggcgggagcgccgtagaattcgccggggctggggatgatgccgatcttggcgagctcggccatatcggcccagcagtcgccggacttggccttgacccatacgtacagcgcgccggagggcatttgcgccgaatagccatatgccttcagtgcgtcaaccagcgcggataggcggcgacggtaacgcccccattgctcgtgcacggcggctgtgtccttcagacccgcagccatggcggcctgcaccggtccggggataatctggccgatctgcttgcggtattcggccatttccttgaccagccggtaatcgccggcaatcagagccgtacggtagccggccatgttggactgcttggacagcgagtagagcaccaggatgccagctgccgaaccttcacacacatgtgaattcagggcacatggcgtggcggagagactgaatgcggtatcggaggcgggctcgttggattcggccaccggtgcggcaggcacagacgcagcagatgcagacgcggcaggcgcataggacgcggctgtattgcggcgcaccgaacgccagtccattaacgcatagcattcgtcggagagcaccacggcaccgatgcgacgggcagcagccacgatgtcggtcagccagtcagcggagatgacctcgccggaaggattacacggcgagttgatccagatggccttgacattcggaatattcacccaggaatcgacgtcggtcacatcatcgactttgaccacggtggcgccggcaagttgggtaccgatttcgtaagtcgggtaggagacggccggttggacgaccacatcgccttcgccaaggtgcagcaggctggccatcagtgccacggcctccttggaacccacggtgggtacggcggcagcgttgatggacttcagatccacaccgcgcagttcgcggaaccatgtatcgatagcggccttaaggtcggcgctgccggcggtgaccgggtatccatgggcgttgggggcgtctgcgccggcaaccagcgcctgctggacactgctcggcaccgggtccacgggcgagcctacggacaggtcgatcatgccacccggcacggttttggcggtggctttgaagccggcgatacgagaccagtcgtatggcgacgaatatgcgtggaagcccatgagaacccctttcttggacggtatgttcctaagatacgacgaaccctcggccgtgatagaccgagggttcaatccgaactatgcgctgtgtgcagcgcttatccgcaaatcagcttactggttctgcggcggcagcgcggcgacctgttccgggtctttgccgattgggccattggcggaagcgccgcccaaatcgccgacttcagcgaagaagttgacagcggcatccttgtaccaagcccactcgtccggcagatcatcctcatagaagatggcctcggtggggcacaccggttcgcatgcaccgcaatcgacgcactcgttggggttgatgtacagcgagcgggaaccctcgtagatgcagtcgacggggcactcgtccacgcaagccttgtccttgacatccacgcaaggctgagcgatcacatatggcatggaatcctccttaacaaatactgatacaagggtacgcgcccgttgggacgctcctcgctctcagccgttaacggccttatcggtttcggcggacagcgtttcggtcaggtcgcccttgccgaggcgcgcatgccagtagccgtagccgaagtagatggcgacgccgaccacgagccacaccacgaaacgaatccaggtgagcacggacaggttgagcatcaaccagaagttggccacggcgatgaggatcggaatccacgggtcgccgggcatcttgaaggcgcgcggcaggtcggggcgcttcttgcgcataatcgggatggagatggccaccagcgtgaaggcggacagggtgccgatgttgaccatgtcggagagcacgccgatgtcgaagaaggcggccacgagcgccaccactgcgccgacgacgatctgcagagcggccggggtgccatgcttgccggtcttggacaggccgcgcggcagcagaccatcgcggctcatggcgaagacgatacgggtcaggccgagcaacagcaccatgaccacggtggccaggcccagcacgatgccgaagctgatgatcttggcggcccagtcggcacccaccagttcgaaggcggtggccagcgaggggctgtcttgcttggcgagatcggcataggagaccatgccggtggtcaccacggccacgagcatgtacatgacgatgatgagcagcatgcccacgccgatgccgagcggcacgttcttgtgcgggttcttggtctcctcggaggcggtggccaccacgtcgaagccgatgaacgcgaagaacacgagcgccgcgcccgaaaggatgccgggaacgccgtacacggatggggtcatgccggtggcgaactgccacagcggctgggtcatcacgccggtgacggcggaggagccttccacggtggaggccggctggctcggcggaatgaacggagtgaagttggaggccttgacgtagaagaagccgacgatcaccacaaagaacacgatggcgatcttgagcacggtcatagcaccgtccacgcgggcgccgatcttggtgccgaatacgagcagcgtggtaaagaacgccacgatgatgatcggggcgatatcgatatggaaggagccgaacgccaggttggtgttggcgttccagcccatcaggcgcatgaaatcgttgaggtatacgccccaatatttggaaatcacggagccggccatcagcatttccagaatcagatcccagccgatgatccaggccatgatctcgccgaccgtggtgtaggtgaaggtgtaggcggagccggccaccggaatcatcgaagcgaattcggcgtagcacatcacggctgcgccgcacacgatgccggcgatcaggaagctgatgatcacggccgggccggcgtggaaggcggcggcctgcgcgcccaccgagaagatgccggcgcccacggctacggccacgcccatgattgacagatcccaccaagtcaggttgcgcttgagcttgcggccctcttcacccgtttcggcaatggtctgttcgacggatttcgtacggaacagttgcatagtgctcttctttttctctgttgtttgcgcaccgaatgcgcacaataccgacaatcgagtatagaagagcccgcgtgtcttgtctattaataagacttagagtccgcaatatatgggattaatatccaactccatcaatcaatagcgcgattacagcacgccgacgcagaccggttcgggcaccaagtccactccgaacgcgctcttgaccgcctgctgaaccgcacgcgccaaagctgcgatatcggccgcgctcgctcccccacgattggtcaaggccagcgtgtgctgcgtggatagactggccggcgcgtacgcatcgaccttatatcccttatggcagccggcatggtcgatgagccaagcggcggacgtcttggtgccgggagtgccgtcaggcagagtcgcgtcgaacttcggcgcatcttcgggcagggccgccgcttggccggcggtcagaatcggattcataaagaacgagccgcagctgtggcgattgtagtcgggagcaggcaggccgtcatcgccaacgggaatgccggcggcctcattgagggaggccagacgctccagatcggtcaggatattggccccgcgcttggcggtggccatgtcgggcaaggcgtagcgagtgggatcctcaagcatgcccttggcggcacgtactgcgagcacggctttgcggatgtcggcggtggccatacggtcgcccacttcgacgccaagcgctttggcaagctgtccgtaacctaccgtgccttcggccgagtgggtcagggcaaaggtgacggagagcaccacgtaacgtggcgtcgggaagaatcggtcggccggccggccgggaccggcgtacatgctggccttcagtgcggagtatcgatagccgaatcgaagatcggcgggtgtgaggtcgcgcgttgttttggtgtctcgatcccagacttccaccgattcgaccgaagtggcgacttcctgtccgtaggcaccgatgttctgcaccacggaagcgccgactgtgccgggaatgccggacagtccctcgacgccctcgagcccgagctctacggtgaaggccacgaaatcatcccaattggcaccggcctcggcattgacatgcacggtgcgatcctcgccctctaccggtgcagcctcgtccggcacagtgatgaggcgtcgggcgtctcgaaccaccacgccgtcaaaaggcttatcggaaacaagcaggttggagccgccaccgataacgaccaagggcaggcctttggaatcggcatcctccacggcttcgatgagccccacgcgcgtggtcggctcgatgaaatgggcgatggggccgcccacgcccatggtggtgatgtctgcaaagcttgtcatgacttcctatcttagtggcgcaggtgcgatatcggggcaatcatcggctgaaacggcagaacgcccgcgaggggttcgttcagacgcgggatttctgccatttctcacgcgatgcggatactgattccgcaccctaccactcggctctggagtcaatacacaaaaacccggccgaatgggccgggttttgtaaagctgtgatgcttgcgatcaacgagtctcgcggtgcacggtctgcttgccgcagcgcgggcagaacttcttgagctcaagacggtcgggcgtattacgacggttcttagtcgtaatgtagttacgctccttgcactcggtgcaggccagcgtgatgcccggacggatgtcggcgctcttagccattgtcattcacctctgtgttcttaggtatagtgcgcgcccaccggttagcgggcgcgatttgtagcgaggaagaggctcgaactcttgaccttacgattatgagtcgtacgctctagccagctgagctaccccgccagagagccccgagtgagaattggactcacgacctcttccttaccaaggaagtgctctaccactgagctatcggggcgtggcggatagtggattcgaaccactgaagcacgaagcggctgatttacagtcagctccctttgaccgcttgggaaatccgccagtctgtttcccgccgcggtgtttgacctcaacaggcaacttggctatataaccacatattttccaagtacgcaaatcgacctctacgcgaaccttgttttaccgcggaattctgcggttttatcggcgtgtctcacagcgtggtttcagggtccgcttcggccctgcaaacagccccgaccaaggctgcaccccgcacttctaccaatcatttttcttatatggtgttccagaaccttgcaatggcgcggttttcgagtggcgccgcctgcttgcggcggcacagcgcatgccggcatgctgggcgcatggcttctgatcttgtacatcacggacaatcattcgacgaccagccgctcggattcggcacgctggccattcacctcggcaacggggtcgacgccgaaaccggcgcgatccgtcgccccatcacgctggcgaacatctacgcactgccctacgacgcctcggccttggcgattgccaagcatctcgaatcgctggatgtggtgcgtttcgtggcgtaccccggtctggaatcgcacctgcaccacgaggtggcggccagccagctggcccgcccggactccgggttcggcggcgtgctgtcgttcggcctcgacaccgaccacgacgggcacaaccgattcgtttccaagctcaatgtgattacgtctgccgtctcgctcggccatgactaatcgctgatcgtgttcctcggtgaggatgacgagcgccagtacctgtacccgcctgagttccaccgcggcttcttccgtctggccgtgggtctggaggatacggacgatttgattcgcgacatcgatcacgcgctggtggaggccggattcgaggtgtgagaccgcaccgcgcgcatgatttcggcctcttccgccctgctgccgccgtcagtgagtcacaagatggctcggtgacgacgatggctgggctttttacgtcggcacagggacaatacctggcggtctgccgacgatgacggcacttatcgtcggcagaccgccagtttttggaccgtcgccggcacaaaacgccgatttgccgtcggcaatggtccaaaaactggccctataacgacgccaacgcggctcagcatcggcacatcgccatttcgtggcccactgccgacgctggcctcatgccacggcactcagcatcggtagagagacaaccattggcacagcgacgacaccacgaacctgcgacacggaaaaaacaacataccgtcgacctactgccgtcttgtgcaaaatgtcttaagccgctcggccaagtcgccgactgagcctcttccatagggaccccaatccgttacccagtgtagatgcggtgcaacgccgaactcaactacgttgcgcgcatgcacctttatgcatagcaggcatggctgggcgtttggcgggagcggttttcggctcccctctctgaggggagcccctttccgcctgacaagagaaaaccccgactgttcgtgggaacagtcggggttgttgaagttcgctaggcgactaatcagccgaggatggcgagaatgtcgcgcgcgccgacgatgaggtagtcctcaccctcgtagtggacttcggtgccgccgtacttggagtacagcaccttgtcgccgaccttgacatccatcgggatgcgctcgcccttgtcgtcacgacggcccgggccaacggccaggacttcaccctgctgcggcttctccttggcgttgtccggaatatacagaccggaagcggtctgggtctgggcctcggcctgcttgacgatgatcttgtcttccaacggtgtgagcttaatcgacactgtgggtcacctcgtatctacttgtagttcgataatgccgcgccagaacgcctcaagaggctgacgatcacttgcgttgtccctttgcgctaggacacatcgtagcgcgattattagcactctgccaactcgagtgctaacgctgtgagagaaaatcggcgaatcgcaacgctcagttgccgcggcgggcaagaatggagtccaggcctgcgcccaacgaatcggtggtcgccgctggcgcttcgacgtcggcacgctcctcggattcgtggaatgcggctcgctgggcggcgtttgcagcctcgtcatcggcgtccgtagcggcgttcgtatcggcatcatcgcgctgctccgactcagtgtctacagcgtttccggcactgacagccttgcccgcatcggcggccttggcatcgtccgcggccttgacggctcgggcctcgtcaatcaacttttccgccactgcgggttcgacaggttccgccttggacacctgacgggtcgacttgatctccaagctttccggagcgttgtcggcgttatgttccccgcccaaagtgaaggagatgagatcctgcgagatggccatatcgaagacatccagtgctcgggcagggcgtacgctgaccagttccgacgtagcgtcggcagcggcatcgtcgcgctcatcacgctcatcacgcaccgtaagcgatggttcaactcgaggggcgacggacttatccgacttagtcgacttatccgtgcgagcggaggcatcgggcgcggcggaagattcactggtttcggcagcggacttacggtcagcggattcatcgaccatagcagacggttcggcggcaggcttatcggcggcggactgtgcagtatcagacttctcagactgtttggcgtgctccgccgcggcctgatatgcggcggcggactgacgcaacgccttggccttggcctgctcaatctcggcatcgcgtaacgcgcggcgaatctgccgctgttccatgacctcggtggcagcatcctcaacatgctcggaaagctccttggcaggcgcagttacggccgcaaccggttcggccttgttcacacgcttgctgtccttggactcggcagacggtttcttggaccagcccgtaccgctatgagtccgctcgtagcggaccaccttgcgttcccattgccgggcctggcgtgaggcattggctcccagcaccagcaccagcagtaacagcacgaacggaataagagcaagcagcgggctgaaatgcagggggaacgatacggcaaacaccaacacggttatggcaagcaggcatacggcgagaatctgccggcggcggatggccgcgcggcgcagttcccgcacatgggcgatgtgctcaggtgtcagcctcgctgacggtgttgatgctggcattgctgcccctttcgccttatgcggcttgatgtctccgaatcgtctgccgttctctgcatcaacgatatgcagggaaggcgaataacgatcctgccggtgctcgtccacacgtttcatgccgttggccgtacgtacgggcagccatacaacgataataatcgccacaatcaccagcacgacgacagtgctcagtgactcataacccatagagtcaaggataggagacgtaccgacgaactggggctttccgtccgggcgtgtcggagcggaattcttccggtcgacgcttatctggaaccggtggcggcgagtctggcagagaacccttgccccatatcttcagccaacagcgcaaatgttacgtggtcgcgccactggccattgacatacatataccgctcgcgcagtccctcatgatgggctccgaccttacgcactacagccaaagagcgcgcgttatccggaagaatggcgatttccagccgatgcaacgcgggcccgaatgggtctccgagtgcccaatcggcaagcatggccagtgccatcggcgcaaatccgtggccggcgtaccgttggtcaacccaatatccgaccacaccggtgcgcatggcaccatacgcgatggctcccaacgaaatctggccgacgatacgcatctggtattcgatggcgaaaatcacgccgacgccatgctgctcattacggcgctgtcgctgcacccattgattgaaggtgatggagccgccatgcatcgggtcgccggattcccaaggcgccagccagtcgttgttgcgccagcgcacttcgttccagccgtcctcatcgtccatggtcagggggcgcaggattatcgggaaaccgggatgggtgaggcgcggcggacggatctggtggtccagcttgaacgcctctttaatcgactggaaaactgacacggcctttattgtagccatatgaagggcttgcgccttcgcctcggccactttcgttttacggtggaaacactagattgtgcggtatgagcgaagcggacaatggcatgaatatcggcagcgaccacagcggcacggagaaaacagaaaagatggataaagcgacgctgcgccaccatatactgtctcggcgcaagcgcattccagcggaagaacgtggagcggccggtgaattgctggtgcgacggttcccggcacacatgattcaggatggttccacagtggcggcatatgtgtcgatgggttcggaaatcgaaacccggccactgttgcgatggctgttggctcatggctgccacgtgttggtgccacgattgggatctgggttggaaattggctggagtgtgctggattcattggaatccttgcgctcgatggatgcagtgggtggcgcgaacaatgccggtagctgcagctctcccagcaccgtccatcacagacccgatgagccaactggcgcagttctaccgcccgaagcgttggagaaggccgatctggtcatcgccccggctttggcagtggacccgcaaggcaatcgtctggggcgtggagccggctggtatgaccgggccttggctcgacgcaagcccgcgtgccccctgattgcggtgtgctggccgtgggaggtgttggacaccgatttgccggccgaaccacatgatgtgccggccgacggagtgctgacgccggggggataccggcggcttggcgaatcgggccggctgagttgaccggccggccaagatactcggcgcaagccagactgaccaaccagccacgcacactggccgatggaaccagagtggcaaaagcaggctggctagtaagaccgtaacgccaatgtgtcagggcggcgactaggatatgaacggttgcacggcatggtgttgcacgccatgcgcgagaaatatgactttgttggaggaatccgttgcctacctatcattaccgttgcaagaactgcggctatgacttcaccgaacagcagtcgttcaatgacgacccgattaccgtgtgccccaagtgctcgcaggagcaggtgcgcaaggtgtattccgccgtgccgattgagttcaagggtcacggattctaccgcaccgacaaatccggcaagtaaggtcggctccccgtttttcctctgtaaacgacggtgtcgacggcggtatgccgcggatattggcactacgggcactgtctgttgcacgggtttgaagcgttgtggataacttggcaagctagaaccacataggtcgattcagcttgcgcttacgaaaaacttcaggtcaccatggttgcatggtgaccttttcgtttattaagccgcctgcgcgcggctcattgcggcgacggcgcatggcggatgccttgcgccgactcactgctgcgttgtgcgtgggactcgcagtgttgtttgggcttgaagccgtattggccgtggtggagaccgagccgatggtggtggccgctcgctcgattcgacggggtgacattattctggccgccgacgttcagttggctgatatgccggtatctgcgataggcccatcttgggcgtgcaatattgaggatgtggtgggcaaggtggcgcaaatcgatatcgaagcagccgatcccatttccacgcatatggccagagatgcgcccgtagcaccgaccggcactacggtgattgaagtccgcttggccagtagcgtcgacgatgtattggccggcgatcaggtgagactggtttccgccgtcggttgcgaaggtgccgattgcacgctggccgagaacgccacggtgatgaatgtcgacaaaccggatacgactggcgcattgggaagcaacgaccgactggtgtcgttcgcgatgccgccggaggccgcggccaaggttatggagctgcaacaggccggagcgattatggccgttgtgcggtaggaagcggaatcggccttcggccgatgttgtgttttccgcagccatacggctgcggaaaacacaacatcagagcgcacagagtgcgcctcaactcctactcgcgctcgttgaaaacagcccagtgtggaggcagttcgccgaggatgcgtttgtcgtcgtcggattgccgttgttggtcggtctgcatgtctccgggctcgagtttgacgccgtcagcgtcaaactgctcagtgcctttcatcaccacgcgcttgtgcttgcgcggtgtgcgccgtgtagccgagtattccgccatgattattcaacctcgcggtagatctcgccgatacggctgacgatacggtcgacttccttatcggggttcacgaaggcggcgacactccagacagtcatcacattccagcccaaggaaatgagatcctgtgccgacaaacgatgacgcctgcgcgtggattgcacggacataaagttcgcgtcatcggtctgcacggccaaggcaaacggcttgtccttcaatcccaccacgagcggaatcttcacgcccttgtcgaatccataatcaacagcagcgttcagtcctcgcgcgcgcaacctgtcggcgatatcgtcgaacagcacgttgccgcctgccgcaccacgcaacggaagcaccggacggtcgtcaagctgttcggcccacgtcaacatggtcttcaggaaccgaggaccggactggtgcagtcgttcttcatccaaatcttcggaaccaaaggccgacacaatatccaagctgtggtccgccaatgccagggcatccagcaacagtccgcgaccgcctgtgctttcgagcggaccgaactgctgaagcagacgtccgtgcgtggttttcgcatagcacatcgacagaatcacgtcagtggcacgacctccggccacgtcacgcaaggaaaccagccgcacatggcgcaggaatcggcccatcgccttggatttgcctgccaacgacttcaattcggcacccaagcgtgtgcggaatgcgtcggtcaacatcacgaccacaagtcgatagctggaaggaaccacagcaaaaccggcggcacgttgcgtaatcagacgcaccacttcatcaatctccgactggctggattccaccagaccagaagacataaccggcacaccgctcgcttccacacggtggaaccgcaccccaccggcagccggctcggtggccacatcatagcgaacaggaccatatccctcggattcaaggaatgcggacaggcgcggcgcacggcgagacggggcagcatccacctcgatatgaggcaacgtgtcgatcagctgcttgacgctttcgctggttaccgtcgcgcagtgggcgatcaccaccacctgctgcacgcggccgatgatggacagcaactcgatagcgggaatgtgcgcgcacgcatcgagaatcgccacatcagccagcacacccggctcggtgagtgcggcgagcgtacccggcgaggccaccagaatcggcttggccgcggccagaatctccggatgatcacggcgaatcctgctcagcgacacactggcgcgccctgccagcacggtgtgcatctggttggcttcctgagtgcgggagaacagcatgtcgcacaggcggcgcatggattcctgcgacaccatcggtccgatggagcgcacgtgctccacatcgacctgtgcgaagcggtcggatgcggtctgcagcgcagcaccatcctggttggagatgatggcggaagaacgcacaatgtcctcgaacacggtggtccaccatgccagctgcacttcgccacgcacctgctccacgcccacccggcgagcgttgagatcggcgaccaactcgttcagaccggcagaagcgaattcctgctccagcaggcaacgctccggcaaggtgtccagtgccttgcgatcatccagcagtgctttcaggcgtgcttccaccttctcgaaatcggcggtttccagattgccgccggcgggtgtggtggaaagcacggtatccagcgcggtcatattgctgaccagcgcctcttgggtggagatgatctcgtcgagcttgctgggcagcaccggccaaccgccgtgaggcacgaactgatgccactgctccccttgcttggcgactaccttcaacgcttcgtgcaagtcctcgacctgcgcgccgacgcgcagcagatccttggcttccttgacgtggcggcggcgctcccagaatcccatcgacgtgccctcggccttgcgctggctcttcggcttggtggcctcgatcatggagctgatgtctcgctcgaaaatctctggctggaacacgtcaagcactcgtcgcagattcttcaaaaccgtaacctgacgctcccactcgcgagtggtgggaggaaccgggaatccgcaggtctgcacggtgcgtgccacctgctcacgggtggcgggcaggaagcgacgcagcaaatcgtccacgcgctggtaagcggttaccgcttgttcttcagtggtgatggacgccttgtaccatgcggtgtcttccgggccgatggtgtattcgccgagctcgccggcacgttccatcttgctgatccatgtgtcaatatcgttggcgacgctcagggcacttgactcgtcaagtcgaacgtgggtggcggggtgtgtcgggagcacggagatacgggccaggttctgaatggtctcgtatgcggacacattccacttatcgttgcccccgtgcaggtcgcccagatagcgggtcaagcgcgagcgcacgcccacgagttcgtcggccagctggtcgaatcgctgggtggcgactccgggctggaatccgactgcggcaatcagctgcttatcaagcgcagcgttggcgtgttcatcggatacatccagtacctgcgccttcatctcattggcggaggccgtctggatgaacagacgcttctgctcggccacgccgggcacgtacagcacggaacgaccattcatcaggcagcgcgatgcgatggccacagcctgctccgcggtgcccttcgggaaggtgccgtcgaccacgatgctatggccattggcagcaagtgacgcggcatatcgcaccgtattgtccacatcgccgacttcgtactcagcatgcgggtctacgtcgaaaggactgtattgcggaatattggcatctttgagcgcggtgcgggcggatttgtcgccggcaagcgcgtccaacagcacattgccggtggggccattctccagctggtcgatgaactgtcggctttcgctgatcatctgcgacgaggggtccatgaagcatccgagcacaatctggcgctcgatggcgaagccggagatacgctccgatgcttcggacgaaatacgggcgaacatcgcggaagtttcgggagtgccactgtcatagctggcaccgtcaaacagggaatcctcatccaggaacaccccctgctcacgcaatgcattgacgaacgcggcgttcagggtcacgcgaccggtgaatcgaatggtggtcgacaagccatcatcctcgatcgtgacgctcaccgggtacaacagcaccggcagcgcgttgcccctccacgtggccacaccaaccacgagcgacaactccgccacgccggaaatcctgcgcttggcggcctggtcatccagtacgcgcccgatatggcgttcggcggccttaagcacacccgtgtcacggaacaacgaatccaaccgaacatggccggaagcgaacagctgggcgatgccggagggatgggcatgggtcatctccagcttcgcggccagttgattcacatcctcgagcggcgatggcggctgcatgctgcggtattggtcacgccagcgacggatgcgattcagaccttccgtgagattctggttctgagtctggctctgggtcatctctcgactcactttccaaccgcttcgcggtattcctgatagcccttgttgtgagacagggcttcgtcaatatcggcctcgccacgggcggcgagccaagaatacatgtcgtcgtacaggtacggattcatggcgaggaacgccagtaattcgggatgacgggcgacttcgaactgaacgttgaaatcttgcgtggtttttgcctcgtcagaggtcaggccatcgacttcgactgccggctcctgtgctttcagctcgcccttggccacacgctcgaacaccgagccgggctcgaagaccggagtgtgtacgcccgtggagtagatatcagacgcttcatacgcttcggagaccgactgctgggcggtttcggtttcggtcgccagctgctgatcctcgggtgcgtcggttgccggttgagcggtttcaggctgggtggttgtcggctgggcggtctcagactgagtgttttcagactgggcggcttcggactgagtgccttcagaatgctgtgcaacagcgtccaccggctgagaatcgtcggtattcggagcggactgaacgttttcggctgacttgcttgcgccagccaccacatcggattcaacaaccgccgccgacgccactgccggctcgcttgtgctgggagcgtgcttaacaacggcatgggcgatggcatctaccgggacaataccggagatcctgctgtgcttggatgcgggcgttacagtcgtcgactcaggttcggtctgctgcttcggcagtaccacggagtccatggcctgctggtttttgcgttcggtctcctgctcggcatgctgggccaacgcatccgcgaacaggtcacggggtatggccggctcatcgtttttcgtcactggctgcgtgatattcagcgagccaagttcaagctcgtcgaccttgcgtcgaacattatccgcgctgaagatggcggtcggctcgccggcccgcaaatcaagaatatcgtcgacagacatatccgccgcgtccggctcctgcggtgcttcgtgaaccgcatagccaaacaaatcaggcaccttaaggtcgagtggctttgccactggatcgtcgatacgaatgaagtccgcaggcacatcaccgaactgcatgcgcatgggagacgtcggcaacaggaactcgacattggccggcaagcgcaacaaatcaccattttcccgcaccacatacgatccattggtcgatccaagatcgcggaccgaagccgtaccattgctttttaccgtgaacatggcgtgccgtttggacatcgatttggtctgatcggcgacgtcaaggcgggtgttgccatcatcggcaagggggcgtaacggcttacggccgatttccacgcactcccccggcttgacgctgatccggtcgacaccgttgatcttcaccgtccactcgctcaccgtgaccgccttcctggacacactatttgaccacactacgtgccattgtgtcatcttttaccggcttttggcggattactgggcacagaattgacaactttcgctcattgccagctttgtgattccacgccggatcgcgttctccgcctcgccctcgtcaactagtctactcagtatgcggaaaccccgcagcctgaaacacaggtgcggggttcctcgaaaagctgtgattgcggcttatgccgcacaaatcacttgagctcgacggaggcaccagcctcttccagctgagccttggccttctcggcatcttccttcttggccttctcgaggacggccttcggagcgccgtcgacgagagccttggcctcggccaggccgagggaggtgatggcgcggacagccttgatgacctggatcttcttgtcgccgacggcggataggatgacgtcgaactcatccttctcttcctcagccggagcagcagcgccagcaacagcggcaacagcggcaaccggagcggcagcctcgacgtcgaacttctcctcgaaggccttcacgaactcggagagctcgaccagggtcatctcgccgaaggcttccagcagctcatcgttggtgtacttagccattatggcttcctttcaatcttggcggcggacgaagtggtagatccgctgcctaataaaccttattgtttaaattatcgaagcgactgattcatgccgtgagggcgtaaatcaggcagccttctcctgcttttcgcgcagggcgtcgatcgtacgcacagccttggtaggcagggcgttgaacaggtacgcggccttggccatcgatgccttgatgtcgccggcgaattcggcaagcagctgcgggcgggacttgaggtctgccagcttcttggcgccctcggcatcgtagacagtgccgtcagcggcggcacccttgatgacaagagccttgttgtccttggcgaagtcacggatgaccttcgcagcctcgatgaagtcgcccttcacgaaggtgatggcggtcgggccggagagaatctcgtcgagaccctcgatgcccgcttccttggcggcgatgcgtgccagcgtgttctttgccacggtgtaggaagtatcgcggcctagcttttcacgcagatcggaaatctgcggaacggtaagcccgcggtactcggtcaggtagacggcgtcagcgttacggaattcttccgtaagctgagcgactaccgcttccttttcgggcctcttcatggcgttccttcctaagtcggccgttgacttggagttcggaactttcggccgggcaacaaaaaagccctgcgcacaggcagagcaatataatctcgcgaagcgaccttcgccggcccttgacgggcttatatctctcaacctgcgctggcttggcgaaccaaacttcggaaatgcactcgcgcgcacttcagccaacggtctgtggtttacggatgattagattacggatggtcagcgacattgcagaattcgggcgtgtcgcaaggcattacaacgtggcggcgtactgggctacggacgcggtgacttccttcagatagtcgagcgagcgacgccagtggccgggcacctcgatcgaatggttggcatccgggtattcgtgcacgtgcggggtgagcgcgttggcgcgggctcgatcgtagaacgggtcggcggtgccggcgcagatcagcggtgccgggccggagtatcgggagctggcggcgtgcgactggtcggccagttctgcgcggatgatcgcccttgcttcggccacgctcggagcctcggattcggcgacgatatcatcgccgacagccggcaccggaatcacccgggcggatggatcgaagtcggcgtgatgcagcaccggggtcagcagcacgaacggcagaccgtagtgtgaggccacatgtgggtaggtcatcgtcgtcagcgacttgccgatcagcaacaggcgagggccggacggggtgtcggaatcacggttcggcgagccagctgcgccatcggccagcacggtagcagaatcatcggcggcaacgccatccccggaatcaccggctttccccgcgccggactcgcgcgcggcggccatccagccgtcaatcgcctgattgaggaccggaatcaccgtggacaggtcgtcggaagcgttgcgtacgttcatgcggtcgattcgccagccggcctcgaccagagcctgggccgaccagtagagcagcggacggtcgcagttgtagccggtgccaggcatcagcagtacgcggccgtactcctgaccgggcttgacgacattcttcttccaagaggtgatgctgacttcgacggccggtttcatcgcgcgccttccttccacgggtgtgccctgcgtgtccctgagttgttccgaattattctggcagtcagtctactcccggacccgttcacgttacctccacaagctataatcggccacggttctgattggatgcgcagcgcctgacgcgcgttgggcaggccgatcagggcgagtcgcaattctcgccggggccagccgcagcattatgcgcgcggtgcgcagccccgcataaaaccaaggaagtagagagtaaatggagaagttcttccatttgaaggaaaacggcacgaccgtctcgactgagattctggccggcctgaccacgttcttcgcgatggcctacatcatcgtcgtcaacccgcagatcctgtcgcagacgggtatgccgtggggcggcgtgttcctggccaccatcatcgcggccatcatcggcaccctggtcatgggcctgttcgccaatgtgccgtacgcccaggccgccggcatgggcctcaacgcgttcttcacctacaccgtgtgcttcggcctcggcttcagctggcagcagaccatgtgcatggtgttcctgtgcggcctgatcaacatcctcatcaccgtcaccaagatccgcaagatgatcatcatggccatcccggagtccctgcaacacgccatcggcggcggcatcggcctgttcgtggcctatgtgggcatgctgaacgtcggactgatcaagttcacccccggcgacccgaaagccgcggccaagggaggcgccgtggcggcgaccccgagtctggccgacttcaacgacaaggtgctgtgggtcttcctgatcggcctcgtactggccattgtgttcaccgtgatgaaggttaagggcggcatgctgctggccatcgccatcaccaccgtgatcggcatcccgttcggcgttaccacctggtccaactcgcagtccatcagcgaaaccttctcccagctgccgcagaccttcggcgcgatcttctccgctgagggcttcccggcgctgttctccgacgtctccaagctgcctctggtcatcgtgaccatcttcgccttctccatgtccgatacgttcgacaccctgggcactttcatcggcaccggccgccgcaccggcatcttctccgccgaggatgagaaggctctggagaacggccacggcttctcctccaagatggacaaggccctgttcgccgactccatcgccacctccattggcgctatctgcggcacctcgaacaccaccacctacgtcgagtcttccgccggcatcgccgcaggcggccgcaccggcctgacctccgtggttgtggcgatctgcttcgccctgtccgcgttcctggccccggtcgtctccgccgtgccgtccgccgcaaccgccggcgtgctggtgatcgtcggctgcatgatggccgcttccctgaaggaagtcaagtgggacgacatcgccgaagccatcccggcgttcttcgcagccgtgttcatggccttctcctactccatctcctacggcatcgccggcggcttcatcatgtactgcatcgtgaagacctgcaagggcaaggccaaggaggttcacccgatcatctggattgtggccgcgctgttcattctggacttcgtgtgcatggcgattctgtaacgctgattgacaacggattagcctttaaggattaatccgccgccatacggcataaaggccgggctctcacaagggcccggcctttgttgttgccacagtgatcaacgcccatgagtaccttcgatgatcatccgccattcaatcaacggctggccatgactcggacatggcgcggcacggcaagcggattttgctgttgggcataacaacagacgagagaatagatccggtcgtgagcaacaggataggtgccatgcggtgccgtgtacaaactgttgtcagttgtcaacgctttttagcgtggctccaatcatcttaatggctgttttccgccattcttgatgcatgagaatagttgtcaactgacaactgaatgtacatggcagcagcacgagtgccctattcaacatcgaaatatgtagcgcgaagaagccgaaaaaccaaaaggcttctataccgaatgaaacggtatagaagccttttggtttgcgattaagctcttctcacccgagagaagctaaagaacgatcagtcctcgaatgccgaaccgttaagcgggaagccctgcgggcttcccgtaggtgagggggcggctatgccgcgaccgatccgtgagagggctttagtcctcgaacggatcaaagtcgcgacggacgcggcgacgcgggcgctcagtgcgctcttcgcggtcggcgcggtagtcgtcgtagttgtcgtcggtggcgtagcgcgggttgcggtccgagccacggccacggccgccacggaaaccgccacggcggtcatcacgatcgccacggtcatcgcgatcggaagagcgacggcgacgcggacgatcatcatctcgggagtcgcgagcatcacggtcatcgcgatcgtcgaagtcacggtcggcagaacgacggcgacgcggacgatcatcatcgcgatcatcgcgatcgaagtcacggtcatcggagcgacggcgacgcggacggtcgtcgtaatcatcctcgaagtcatcggagcgacggcgacgcggacggtcgtcacgatcgtcgaagtcacggtcatcgcgatcggagcgacggccacggctgccacggcgatcgtcacggtcaccacggccacggccgccacggcggtcatcgcgatcgccacggctcgggcgggcgttgttctcctgatcctcgaaaccagggatggccagggagatcttgccgcgatcatcgacaccctgaacgatcacctcaacggtgtcgccttccttgagcacgtcttcgacggcgtcaatacgctcgccgttggccaggttgcggatctgggagatgtgcagcaggccgtcagtgccgggggtgaggttcacgaaagcgccgaacgacgtggtcttgacgaccttgccgttgtaggtttcgccggcctcgggcacgtgcgggttggcgatggaatcgatgatggacttggccttcttagcggcctcgccaccctcggaggagatgaagacggtaccgtcatcctcgatggcaatttcagcgccggtatcttcctgaatctggttgatcatcttgcccttcgggccgatgacctcgccgatcttctcgaccggaacggtggtggtgatgatgcgcggagcgaactcgctcatctcggccgggccgtcgatgcactcgttgatgacctcgagaatcgtggcgcgggcttccttggcctgctgcaaagcggcggccaggatgtcggcggggatgccgtcgagcttggtgtcgagctgcagggcagtgatgaactcggaagtaccggccaccttgaagtccatgtcgccgaaggcatcctcggcacccaggatatcggtgagggtcttgaagatgtgcttgccatcaacgtcgccggacacgaggcccatggcgatgccggcaaccggggccttcagcggcacgccggcagccaaaaggctcagcgtggaggcgcacacggaacccatcgaagtggaaccgttggaaccgatggcctcggagacctggcggatggcgtaggggaactcttcacggctcggcagcaccggcacgagagccttctcagcgagggcgccgtggccgatttcgcggcgcttcggggagccgacgcggccggtctcaccagtggagtacggcggcatctcgtagttgtgcatgtagcgcttggactgcggaccggacagcgcgtcgatctgctgctccatcttgagcatgttcagggtggtgacgcccagaatctgggtctcgccacgctggaacagggcggaaccgtgcacgcgaggcacaatgtccacctcggcggacagggtgcggatgtcgcgcaggccacggccgtcgatgcgataatcctcggtcaggatgcggcgacgcacgatctggcgctgcagttccttgaaggcgttgcccagctccttgtccttctcggcgtcgtccatgtcggtgaactcgtccgcgagcacctcgcgcacgtgctccttgatctcatggatgcgatcctgacgcggcagcttctcggcgatggagagtgcctcgttcagatcctgatgggcgatctcgtcgatacgggcatacagctcgtcggtgtactccgggaagagctggaattccttggtgtccttggcggcgatcttcttgagctcgtcctgagcctcgcagatcaccttgatgaacggcttggcggcttcaagaccaccggccacgacctcctcatcgggcttggtctgaccctcgtcatagatgaggtgccaggcgttcttgccggcacccgcctcgatcatggcgatggcgacgtcaccgttctcgaccacacggccggcgaccacgatctcgaacacggcgcgctcacgctcgctccaacgcgggaaggcgacccactggccgtcgatcaacgccagacgcacaccggacaccgggccttcgaacggcaggccggagatcatggtggaggcggaggcggcgttcagggcgatgacatcgtaagcgtcatcagggttcacggcgagcacggtctcgacgacctgcacttcgttgcgcagggtgtgcgggaacagcgggcgcagcgggcggtcgatgatgcggcaggcgaggatggcctcggagctcggacggccttcacggcggaagaacgagcctggaatcttgccggcggcgtacatcttctcttcaacatcgacggtcagcgggaagaagtcgtagttctccttcgggctggaaccggcggtggtggtggacagaatcatggaatcgtcgtcgaggtaggcggccacagcgccatcggcctgctgggcgaggcggccggtctcgaagcgcagcgtgcgcttgccaaacgatccattgtcgattacggcctcaacggccttgatttcgggaccctccatagggttcctccttctttaattttctaattattcctacatactgtgctgcggtttggcgactcgcttgaaccgcaactgtcctcttcagcggacgtcacataccttgtttcgactggccccttggccgccgttcctcgtgtcaacctcttcattcgggttctcctgtcggcctcacctgctggcctatcctctaaccctcttgccgttgttgccgttggctggcgatatgtaaacgcccgggcaccatcctaggtgctcgggcggaagtcttcaattatcgacgcagacccagacgctcgatgagggaacggtaacgctcgatgtcgacgcgcttgaggtagtcaagcaggcgacgacggtcaccgatcatcagctgcataccacgacgggagtggtggtcgtgcttgtgctccttgaggtgctcggtcaggtcggcgatacgcttggacagcagagccacctggacctcgggggaaccggtgtcaccttcgtgcgtcgcgtactcgttgataatctgggtcttctcgtcagccgtcagtgccacggcgtcctccttattgtgtcgttgcgcggtgtttcgtgcaggttcgctcgaaacgctctctatccgcgggcgaaattacgccaaatgaaaactatacggcaggggccggactggggcacacgcgctcacacagtggtgagcaatccgccaaacaacaccacgagcagggcgatggtttcaatcacgaagtacagaatgaagctcgcccagcttttggtcagtacgttcagcggcgaggtcttccggataatcaccagcagacccacgaacatcagggcatatacggcgatgccgatcgccgcacccataatgcccagattcgcggcattcgccaggccggcctgcttaccgtagaccacgtacgtggaataccagaaattgagattgagcatactgagtcccgcgatgaactgctcgccggccaacccgatcacgaacacgatcaaccacggccaggacggcgagacgaccaccgccatcgccaatccgacgtacgcaatcaccacggtcacccaaccgaccagtgcgatgccttgcggagacactcccccgagcacggccacaatggagtcagtattatttaccgccaacgaacggccgaaccagtacggcgcaacgatggcgcacagtacggcaagaataatcagcgcccaacgcaacggatgcgaacgacggcgctcgatatccgccagagacaaatcggtctcgggtatggaagcctcggggtgcttggaaacctcgacggtctctactttgccgcctacgatttccgtcgcctcgttaggttcttgctcgttggattcctgctccatgcaccgcctcgccgattacctgctcattgccgattattgcgatgcccatcttagcgtgtgtgttaggcaagtctccgatacgatcgattactcgccatggccctcaccatgatcctcgctacgattctccttatccgaatccgcgggagcaacgtcattattgcccgcagacaagccgcaccattcgaggaattccgggagtactgcgtcgagcgttggcgcatttctgcagcatgtcgtcggttatgccggtgagcgacgtgatgaatgggtcgagatgttgtttcgggttgatgagtttttggtattttgcaatgggtttgcgccccacgaccttgactgcaccgatttcgatgatttcgtcatctgcgtatcgcttaccggtggtttcgaggtcgaggacaacgtaatcatcaggcaagaggccctgctttgtctgcctcgcggggatctcaggcgatgcatgaggcttgggttccgcgtatccggggtttgcgcggccgtcccagtgaccattggccgctcgttttcgctcgcgttcgctatcctcgtccagcacgatactgggatctttcgcggccctgacggcacactgttcggcccgaatcttttcgtggtcgtgaatcatgtcaccgatgacccacagcatccatccgatgaatgagatgattagcgcaattatcgtgcatgtcaggaaatcggtgctcaatccgccgacgaaaatcagcagggcgaatatacacgctccgattgccaaaatccggaatatgaccatgccgacggttctgggcatcgacgcctttcgcttggcctgacgttttccgggcatcatgcctccaacctcgttgttcgttcggtcgactcgatgcggcttgtttagatcctaccgccgtatatacggaatcgccccaatcgctctctgcgagcgtcggggcttttttgcttgtgccgacacaccttcatacgctttgcctcgggcggattcggcttattttgtctttttctgagttagactatagatggacttggggctgtcgcgcgtggtctgggtccggtgagggtggcgcccccgctgattcgtcgggcttcttctcttcggagctaggggctgatggcgatgactgcgggggtgcgcttttctttttgtggtagttgatgccgaatttgaggaaatcgagtattcggatgtctttgcgcatgtctgaacccagtgtttgtttttcctcgatgagttgttttgcctttgctttcagtaggtcttcgagttcgtcggtatcgatttcggactgattcagcaggtagaggtgtttgtacgcgtcttctccgaattgttggcgcagcccggcgacgctccttattgtcagttttccggcttctttccactggtcgcggcgttttctttgcgtgggactgaggtatgcgttgacgctgtcttttctgtttacctcgtcacgggtttttgcactaagcggcccatcgtaattattgaggtagtagtacatcgggcttccgccctgtggaatgtatttgtcgatgtaggtgttcacgatgagtgatgcgggaaggtttttgttgtggaagaggaagtcggcatgtagctcttcggatgacactggtatgccgtacccctttttcccgatgccgatgactatatccatgtcctgcgggagttcgtctatgtttccgatctcctcgaatatgactttttcggcgcttcctccggtgtatgacgcctcaaatagttgtttggtgatctggttgaggagtttgggagcgtatcgcatgttcgtggatgctatggcttcgtagatcggtgtgaagtcctgtgtgcttatcgccgtcatttcgacgatttgtccatcgttgacggcgtagttggtggtcttaatcgatttgtcggctgaatattgcacgaagatgaatcgttcggccatttcgcgggcgcgttgttcacccgcacacagggcaattgatgagataatgtcccgaatgtcctggtccttcagcgagtatcccaagaagatgattgggtattcgccgaagatggtgaggatctttgacagcaggtagctttgcctttctgccagccgacggtagtcgcgttcgtcgataatcatggaatcgggggaatcggacgagccgtgaatcttgtatatctcgccgatgccagccagcggggagaagagaaggtcgctttggttggcgaatgtgtcgtatttcgggaaaaccgattccatgaggccgtcgtagttcgtcgtgattaccccggccacgtgccgcgcagctccgcgtagcacatccagttcatcaagattcatcgagggtcggaattcggccagatgttcggctatgtatattttcatggccggcgttccagtctccatctcggcacggtgtgcctccgcccaatcggcgagaggaccgtccagcgccccgatgaagtcggcttccatcagcgtcgccattcgtggatataggatgttctttcctgtatcttcactacctgcggctaactgcttgtacagatagaagggtttcatcggctttccgacggattcgtgtacccatttgagcaggccttcccagtcttcggcacccatgtaccttcgggagatgccggagcccacgaacaagaacggcaccctattggcggccttcagaagggaagccaccgcgtttctcacatcgtcgttaaaattttcgccgtcgatcatcaccgtttcccgtctatattgtgactacataataccgctggcagtcatcgccataccgtcgatcaccgcaccaagtaaaaggcagccgatgtattcgagccgccccagcgcactagggcctctatacctgcgtcacatgattgccgaatatgccggattcaacgaatatgcgcgatattagattcaagtgtcttcggcctatctgtggcgtgttgcattcccggaattcgcataacttacttagtcgagctataattattgtgtaggcaaaacagaatagcgaaaggaggtgatgcggttgagatgggatatggtctcggtcatcctcacggcggcgatgctcctgctccagctgatcgatttcatcatcgacaagctcgacaggcggcgtaaaccgaagcatcggcgctccaagaagtagagtccgggggattccagatatcggtagtatccagaatccccctctatcccaatcttcccgcaatcatcatgaaaaacaaaatcaatgcgatatccagcatgctgctgggagcggccacggcgtgcggcgcgttcgccggcttcgacccgtgggtgcttgccgttatggccgtcgccaccggcttcctcggcctcatggccggctctacaggaggggacaggaaagatgactgaacgttatctgagcctcaaggaggtcggcgagcgcatcggttcgagcaatccggcggcgaggggctatcatctgccggaaccggacgctctcatcggttcgactcgcggctggctgccggagacgatcgatgcttggaacgccgcccgtcccggtcgtgggtcgggcggcggacggccacgcaagcgtcgtgaggatcaggccgattcggagaccgcctgacgagccttgtcggcgagcgccgcaaggctcgcggcggaccagtgggtgtatccggccgtcgtgctgatttttgcgtggcccatcatcgcttttctcgcgccttctggggctctggcttcggcgaggtgcgtggagaagaagtggcgggcgcttcggatggtgacgtagggcagtccggcgtcttcgagagagcgtttccagcggcggcgttccacggtgttggtgagcgggtgtccctcgcgcgtgaatatgagttgtccgtgtttgcattgtctgcggccgacgagcgcccagagtccgagccatgtctggttgctgacgggcacgaaccggttgccctgcttgctttttggttcgacgagccagaagcatccctcgtaatggcgtgcgcggagccagttgggcacttcggtgtctgatctgaagcgttggagctcccacatgatctggatgccgtgcacaccgtcgacggtggcgagctcttcgggcaggatggcgaatctttcggcctctctcatgccggtctcgaacatgatgttccacatgaggctccacatttcgcggtcgtcgtcggtgtcggccaggtggctgtatttgcggcgagcggggtcgagtgcggcctgcgctgcccgggccggctgtccgggttcgaggatctgggtggcctgcgactcgtagcgcggcggcgttgcggcgagcgccgggttcgatgggatgaggcgttcgcggaccgctgcgtcgagcacctgcttgagtctgagatagtggttgtggacggttttgcttcggtgttccttggcgagtttggcgcacattccgtcgatggtggcgggggttattctgtcgagtcgcattccgccgatgacgctgcggatggtgttgcagtcggatcggtaggtttcgagggtgcggggtttgacgttgggcgctatggtgttgagccatcggtccatccattcgccgagcgttggggttccgggcagaggcatatcgccctcgcgctgcagtcttttgattttttcttggagccgttgccgggcggcggtcttggtgggggcctgtgcctcgaccatgcggcgtttgccggtgcgcgggtttggtgcgatctctttgcgcgcgtgccatgttccgcgtttgtcttgccattcgctgccgcttcctcgcggtctgcgtggtggtgttttgggcgtcgtcgttttgttttgttcgggcatcatgcctcttccttggtcatgctatgtggcagctggaggtcatgctataggtcatgctatcgaggtcacaatcaggcacgtttggcccaaatcttgcaatctcgatgattcggcacccgaatatgcggaaggccggaaacccttgagattccttgggtttccggcctttgtcagtggagcggatgacgggaatcgaacccgcgtaatcagtttggaagactgaggctctaccattgagctacatccgcgttaagcgtcgcttttggcgacttgagttattatacatatttcttcggggatggcaaacgcgtgtggctgcagcaggaccagccaatctagttgatggattgtggctttgccgaggactcccctcagccgcctacggcgacagctcccttcaaagaggggagctggaaaccgtcgaaatcacaaatggatgagctgggactcgtatggttggaggtcggcgcccatcgcattcagaatcacgaaccagcagttttcgggcagcgagtagagcttgtcgatctggttcttgagcaggcgcacgtcgcggctggtgagcgcgccccacaggttaaccatgatggagacgttgtacagcatgtagcactcgggggcctcgggcgctattccacagaaatcgtcaccaccgcggaggcaatcggaccatcgtggctcagggaaatatggatatgcggcatcgaccccgcaccgatagtcgagcgctgcgccgaacgcgcattccgccgctcctgcatcactgtataaggcccgatatcggaagcagaggaataagcaggggaatagcgagcgccggcagccgaattcgcgtaatcagtttggaagactgacgccgcccccttacccagagacacatgcggcacaccacgggaatcgtccaagatctcgatttcaggccacgggaaattatcaagcgtgaacggatagggggcatcgccaagataatcgcaccaggctttgaggaacgcctccttgcccgcccacttggcggccagatgcacggcctccccgtcattcttctggcgcgcgcggtcggatgcctgccgcacctcacgcacggagaacagagcacgcatgcgagaccccggctccgccaactgttcggcgaatgcggccacatccaccacgtcatgccccaaaccacaagtattcatgcttcctattgtgtaccgcttcgcgcgtaatctctacacctcatcagaattggggcctgatttccatttcggggggaaaagattcactatgctggatgacctcgcgcaataccgcaaacatcttgggctggctgcctagccgtccaaaaaacatccgcgccccgccccggaggtctatctccgtttcgaggggcggattttgaccgttccggaggtctacttccgtttcaaggggctggtcatcctccataccacgagtatccgcagcataacgccaacgccattccgccgtttttacgccttgtctacttgggcaacagccccttgaaacggaagtagacctccggcgaatgccaaatcagccccttgaaacgcagaaagctcactccgagggaggggctttcgtatgttctgcatatttctctcactgagtttgtgccagcgagaaagctccaggggaaactcccctcacccgcttcgcgggagctcccctcaaagaggggagccgagatccggtgcgctactggctcccatcaaccgaggggagccagaggaatcaggcctcgtagtagccgtcggcaccgaggcgggcgtccgggttgaggagcatcgccttttcgacctcgtggtggtcgtagccacggtgatcctcgcggaagcgacggttgtcgatcggctcgtagagcgcggcgcgacccatcatgccttcctcgagatgacgctggccggcggccaggcgggcgttggcacgctcacgccaggcttccagcgcggcctcgccatcggccttggccacggccgcttcgaaggcacccggatgaaccagggccacgaagccggaaacatgtccgaagccgagcgaggtggccagaccggccttgaccgggcgaccagcggtctcgcgaccgaactcgtcctcgccaccgccgatgcgcaggggcttcctaacccagaccatgtggtcgtcgcgctggagcttcggatccacgcaatcgagcgctgcgttcgccggaatcacgccggacttgaacagctgcgtcagaccgttgacctggaagatgcaggcaccacccttggcgtggccggtaagcgtcttctgcgagatcacgaacagcgggttgccgtcggtgcggccgatggcgtgggccagcgtgttgtgcagctcggattcgttcgggtcgttggcgttggtggacgtgtcgtgcttggagaccacggcgatgtcgtcggctgagacgccgagcttagccaggtcgtgcacgagcttggaatccttgccaccgaggccggcagccagggcaccgaggcccggagccgggatcgaggtgtgggcaccatccgcgtaggagtggatgaagccgaccacggccgcgaccggcaggccgagcttttcggcgatgtcaccgcgggtcacaaggatcgtgccgccgccctgggattccaggaagccgccacggcgacgatcgttcgcgcggctgaagaagcgcgcgtcgatgcccttgccgtacatttcctccgaattggcggtggcgttcatgttgccgaagccgatcacggattccacgccgatgtcgtcgatcgcgccggtgaccacgaaatcggccttgcctagggcgatcttgtcgacgccctcttcaagggagacggccgcggtggcgcaggcggagacgggctggatcatgttgccgtaaccgccgatgtaggactgcatcacgtgagccgcgaccacattcggcagggcctcctgcaggatgtctgtcgggatctcgtggttgaggaagcggtcgaggtacagcttgcgcatcgacatcatgccgccaaagccggtgccctgggtcgaagccaccagcgaggggtggatggactcgaggatttcggccggggtgaagccggcgcccaggtaggcgtccacagtggtgacgatgttccacagggcgatcttgtcgacgtcgccgaccatcgaggcgggaatgccccatcgggtcgggtcgaagcccttcgggaactggccgccgactgtgcgggtcatggtggcgcggcgcggcacgcggatcatcgagccggcgtggcgggtcacgttccattcgccggattcctcatccggggcgatggtggtgtgcgcctcgtccaacttgacgtattcggcggcgacttcgcgggtgggcacagagaaggtgacgtcgtggtcgaggaagacctcggcttcttcttcgtcagcaccgtccttgtagtcgttgcccatgccttcctcgaacgggcggatgccggagcgggccacgacctcgtcgtggtagcgctcggcgatgtcctcttcgggcacgaggttgccgtcggtgtcgtaccagccgggcttcgggctgtcggcccaagtcagcagacccatgttccacgcaagttcgagcactgcgccggcgctcaggtcgacggtgccgtccgagtggatgccgagctcggcctgggtgcgcgtacgaccggagccccacgggcccagctcaccgacggaaacgatgacgatttcgtcttccggcttggcggtgacgttggtccagtcggcaaggtcgaccgaagcctgcttggtgacgatcggggtgggcagcgccttgatttgctgcccacgcgaggagtcggacagtccagtggactgtccggcgacggagccatccgtttcctgagacgaggccgcagcagcttccttctcgacgtcggccatggcttcggcacgcagggccttgatgtcgatgggctcggagccgaggccaccggtcaggtccacatcgagcggggccttgagggcttgctcgcgcgattcggcagtgcacaggtcgagcagcttggccgcaatctgtgcggtggagtaggtgtggatgccgtgacgctcaacgacggcgaccagcgggtcgttaccgcccatcaggccggtgccacgcacccagccgatcttcgggtgagcgaaggtgacgcggctcgaccacaccttttcggcgcgggcgcggttgacgatggcgtcaaaggcgctcttgacttcgccgtaggcaccgtcgccgccgaatacgccgcggttcggggagccgggcagcaccacgtggagcttgtgctgcacgttggtgtcggcaccgatgtggctgaagccggcgatggcgcgttccacgccccacagcatcagtcgcgcctgtgattcgaacaggtcgccggagtcggcgagcgtgccatggaccggcggagcggcgaacgggaagaacagggtcggctcccacgcgggcttcagaatcgtggtggtggcaccggaggtcttcttctgctcgtggcccacccagtcgaccagagcgtcgacgtcgcggtagctggagaggttggccggaaccagccacagcttggcgttgccggtggcgtgctcgcggtaggcctgcttggcccaagccttgatggacggcttgaagctgtgcgaggtggccaccacagtggcaccgcctgcgagcaggccttcgaccacctgagcggcaatcgagttcgggctcacgccggtgacgatggcgatatcattcgcgtaacgggaggcgttcttgttggaagcgacctgttcgagggcctcggagccggccttctggaaggcggccttaagctcctcgctctccgactcgttggcgaaccactgggcttcggcggcgatggtcttgccgaggccgatgaagctgccgttcaaggcggcggggtcgttgccgtagtaggcgcgggcgaggtcttcacgggcggaggcccaccggtcatcgaagaggatggccttgttggcgtcgaagcgcggagcgacctgcttgggccagtcggagccaagttcggcttcgaccgcggccacgacggcggcgttctcgtcctcggattcttccggagccggagcggccacgccgagctcgttcagcacgaagcgggcggtggcggcgagcacgccgttggaaccggtgaccttctcggcgaaggcgtcgagcgcggcggaatcgaccacagcgccaccagcggcaccaccggcggacggcagggccacggcaacacccttgagctgggcgacgacctcaacggccgcatcgatcagcttgtcggcttccggcttgttctgcacggcggcggtgggcagcttggccaggtcgccgccacgggagctggcaccctcgcgagtgtcgagcagcagtgcggcgagcacgctggccacccagccttcgccgagctgccatacgttggtcacgcggtcgcggatgtactgctgtttgacgccggcggcaccgaacagcgagcgcaggcggtcgcgcagcgcctcggagagcacggcaccgaacggcttgtagttcggggcggccttgttgacgatttgggcgagcttgtcgagcgtcgcttcagcagcaccgtccacgctggcgactcccagctcggagctgatgtccatgagcagctggttgcggcgagaagagacaccgttggtcagggtgtcggtggtgtcgttgctgccgatctggtcgaggcgcaccttggcggagtaggccatgagtacgccgatagcatcggaagccttgaagggcaggtcggcgacggcggaaccagacggtgcgccagcagcggcctgccctgattgcaggccgcgcgaggagtcggacagtccagtggactgtccggcgacggagccatccgttgtctgagcagcctcagtcgcggcatttgccggagcagcacccgagccaagcttggcgacggcggaaccaccggcaggagcggtttcgaccggggccgaggccgcagcctcttccggctcgtcgtcgggaaccagcgaatcggtgtcggtcatgtagacgcggccttcatcgcgaccgacgttgtagacgaccgtatcgttgccggcgaactcgggcagacgcagggtcttggtaccgaggttggccagggtcggggcgttgccgaggccgacttcgacgtattcttccacgccgaggccgccctgttcgcgctgaccgaagagcagcgcctgggtttcaatccaacgcaccggggaggcgaactgccaggagagcagttcggtcaagagcagacggccgagcttctggtcgtcggcggcgtaggaatcccacacggccgggtcgtcgagcacggccttgatgcgttcggacggcacggcttcaaggatcttggcggcgaattccttggtcatctcgaacggggtggccaccaggttcgggatgtagcggtccaccagacggccacggtagtcgatgtaagcaggaagcagcgcgtcgagcttgtcgcggaattccggcacgcccttgcgcagtagcgtggagtggaacggcacatcgatgccgggcaccagcatgaacgcgggcttgccaccgaatgcggccacgcggcgggcggaatcggccttcagggccttgagtccggcgatcgtaccggcgatggcgtactgctggccggcgaggttgtagttcacgatctccaggaattcgccggacgccttggccacggattccacatattccttgacgtgcgcgtcgtccacaccgaactggttcgggcgcagggcacccatgcggtagttggagcgaccctgtgcgtcacgctcgatgaggtggtgcatggtggaaccacggtggaacacgagctccagcacggtttccagcggaatcacgtcggcgaacgcggacaacgcgttgtattcgccgagcgagtggccggcgaagtaggcgggccagatgtcggcgccggcttcgcgcagacgggcggtctgggcaaaagcaaccgtcgcgagcgccacctgcgtgaactgcgtcaggttgagcaggccttcggggtgacggtaggtcacgccgttggcggtgagttccttcgggttgtcacgcacgaggcccaggatcgagaagccgagcttggagcgggtgagcttgtcggcgcgctcccacacgtcgcgggcggcggcggacttggcgcgctcgtccagaaccatgccctgcttctggatgccctggccggggtagacgaaggcggcgcgcggcgcacggaccagtgcggtgccgcgggagacgagctggccgtcgatacggcaggtgacttcgagggtcatgccgccgtggcgcactttgccgacgcgctcgacggagatttcgacggtgtcgtcaagctggaccatgccgtacatgttgtaggtccagccggcaatctcgtagtgggcacccttctcgtcggtcgcctgcacggcgtgctgggcggtggcggacagccacatgccgtgcacgagcggggcggccaggccggagatgcgagcgccacgagtggaggtgtggatcgggttgaagtcgccggaagtgcgggcgaaggcggtcatgtcgcgtggggcgacgaccttcacgcggcgcagcagacggcgcggagtggcctgcactacttgcaggccgcgcgaggaggcggacagtccagtggactgtccggcgacggagccatccgcttccttattcaggagggcaccaccatactcgggggcgtctgcaggcaaagcatcggagtagacgcggccgcggatcgcgaaacgctcggtttcgcgggcaagcggcgtgccgtcggcggcggtgtgggtcacgtggatggtgaccacgcggccggaggcggactcgaagtaatcctcggcccaagacttcagggtgatggtttcgccggtgtgcttgagcaggtcctcctcgttcacctcaagttcgatgaggtggtcgaggtggacggcgttgagcaggccttcaatcaccgggtagcccttgacgtacacggagccgagcgccgtgtagattgccggccaggcagggccgaccagcgcatcgggggcgatgcggctgggctgcagggtggtcggcagagcggcgccagtggccgcttcgtggtcgaagccgaggttggcggatagggtgtaggttgcggttgcggtaccgaacggacgctcgtcagaggtcttgtcgtcaagctgcggcatctcggtgagcttgtcgccggtgatggcggtgttgccgatgcctgcggtggcggcgagcatcgcgtagacgtccggaatcaggcgttcgcggtccacgaccggcacacggccgggctcggtgccttccacgatgagcgggatgacaatatcgcgcacggcgtgcttggaggtgccgccgtccgggtcgttgtcccagtaggtgtcgaggtggatgtccagatcgtacttgccggccgcggcgtcaaacgcgcggatttcgtagtactggtcgcccagggcggtgccgtaggccgggttgtcggtgatgtggccgacccaggagatgttcggggacttgcggatgaagtcttcggcgctggtggcctcgccaagtgcggcgaaatcgtcgttctcagcggcatcggcggcttgctgttcgtcctgcacgcgcttgatggcggcggtttcgaagcggccgaggatgtcggcgatcggctcgtcgatggtggtgatgccggcaacggagatcgggccggggatggcacgcacggaatcggcggagtagcgctggtcttcggactgccagagctggtcctgaccccaccaacgcagcaggtcgttgtcgatgacgggtacgaacggcatgggcttggggtattcgcgcacgagcaccgggaaccaagccacgtcggtcgggaccaccttgagttcggcggtctgcgggtaggccagtgcgagcttttcgagcgcgggggccgggtcggcgagaatgtcgtcgtgggtcagcaggccagcggcagctgcctcttcagcagaaacgccatcagcggcgaacaacttggaggtgaattcgccggagtccgtgtcgttcacacgggcttcgatgcgctgcagcaggtgctggaagcggtcggcgtaagtcgggtcgacccacgggaaggcgagttcggcgaagcgctgcgcccactcaaggtaggtcatggaggccaggtcgccgaagtaaggcttggcggtcttgttcagggcttcgatgatttccttgcggcgggagtcgagctcttcggggtgcttcatgacgcgcacgagcagacggccgcattcggcggagtcgttctcgagctcgtaaatgtcggcgtgcaggtggctcaggccggaggacatgccaccgacggacttgccggacggcacccagtgggcggcctgcggggcgaacacgtcgtcggacttggcgtcggccggaataccgggcgtcttgacgagcagctgcttgacttcggggctggtgtgagcctccttggcggtcatcgcggcggtaccgataagcacgccgtcgaccggcatgtcgggcaggccgtaggcgtgggcccactggccggaaatgtagtcggccgcgcgttcgggggtgccgatgccgccgccggcgaccagcacgaggttgtcgcaggcgcgcacttcggcgtaggtggcggcaagcaggtcgtccagcgcttcccagctgtggtggccgccggcttcaccgccctcgacctgaaccatgatggtggtgggggacacggccttggcgatgcgcacgacctggcgaatctggtccacggtgccgggcttgaaactcacgtacggcagaccgtccgcctgcagcgacttgatcagggccacggcttcgtccagctcggggatgccggcggagacgaccacgccgtcgatcggcgcgccggatgcgcgcttcttgggcacgatgcgggaggagccgaactgcaggttccacaggtaacggtccatgaacatcgcgttgaattcgaccgtgcggccttcctccagctcgtcttcgagggcggcgatgtggcggtcgaacacttcggcggtcacctggccgccgccggcgagctcggcccagtaaccggcgttggccgcggcggccacgatttccggttccacggtggtgggggtcatgccgggcagcagtaccggcggcttgccggtgagcttggagaacttggtgaccagcttggcgccggccggggtgttgatgacgcgcggggcgaatgccttccagttctgggtgcgctcaggctcgctttccagcgtggagagcgtggagcgttcggacagcgtggtggcttcgaccacgccgatgccggtgccctgcaccacgttgccgatcagcttgccaagcgtgttgccgggaccaaggtccacaatccacagcttggccgggtcggcggcgtcgaacagcgccttgacgcgggcattccagtccacatggttgagcagcacttccgcagcgagtgcgcgggtgcgatcctggtcaaagccgcaggcgccggcccaggccacggtctgctcgacggcttcggccatgagcggagagtggaagggcagggtgacttcgaggtattcgagggtcgggttgaacacagtgccgccgtggagcttctgttcacgcagcttggcctggtgcttgtgctcgcgctcggcttcgagggcgagtgctgccaggtcttccgggtagccggaaagcacgtggtggttgtcggagttggtgacggcgatggagatcgggcctcgggcgttgttcacgcgcttgaccagagcctcaacctgttcgcgggtggcgcccttgacggagagcatcggactggcttcgccatacttggggttcaggcccagttcgcgcacacggcgggttccggcggcgccgatcagggcggcgacggccagaatctcgtcgagggtcttgccggcggcctcgatggagctggcggcctcgatggcgcgggccatgtgcacggcgagcacgccctgggagtggccgagcacggcgagcggcttggcctgggccacactgtagccaaggtgttccaagtcgagcagggcgccgagctgggtcagtgccacgccttccacggacgcggtggcgtcggctgcggcgccgaggcgggccgggttcggagtgaagccgaacaggtcgaccggacgtccggtggtggtcagcaggtcggcggcgaccggggtgagcagtcggttggctgcggcgatgtggccgcgcagggcctcgtcaaggctgggatcggtggtctggtctgccagggctaccggccacggggtggactggccggcgaaggcgagcgcatggggctcggtggccaggcgattgaggaagaaggtggtcattgctttccttacttgtgtttggttgatgtcttcagaaatcagaggggctggttgtcgtggtgtttggtggtgcgcttgacgcgccgcttggtggcgagcgtggccagcgattcgacgatcacctcacgggtctgttcggggtcgatcatgccgtcgatctgcccgatttccagcgacaggttcgcgttgacggtgctggtctcgtactccttgatgtacttggcccgcagcgcatcgacgtcctgcccggaggctttggccttggccaggtcgtggcggtggatgatgttcaccgcgccggccgcgccgagcaccgcgatctgggaggagggccacgcgaagttcaggtccgcgccgatggctttggagcccatcacgatgtacgcgccgccgaacgccttgcgcaacaccacggtcaccatcggcacttgcgcgttggcgtaggcgtagatcaccttggcgccgcggcggatgatgccggcgtgttcctggtcggagccgggcttgtagccgggcacatccacgagggtgaccacgggcaggttgaacgcgtcgcacaggcgtacgaatcgggcgaccttctcggacgagtcgacgtccaggatgccggcgagcacgttcggctggttcgccacgatgccgaccggcttgccgtcgatgcaggcgaagccgacgagcgcggaggcgccgaacagttcctgcacctgcacgaattcgccgtaatcgacgatgcaacgaatcacttcgagcatgtcgtagggctgacgttcgttggcgggcacgatggtggcgagtcgcttggcggtctcgcgttcggcgcgggtgacggcgtaggcgtagaccggcggcttgctttcgctgttggacggcaggtaggcgagcacggtgcgcgcatagtcgatggcgtcggattcgtcctcgccgaggtagtgggccacgccggacacccggttatgcacttcgccgccgccaaggtcggccatggagatggtctcgccggtcgaggccttgaccacgtccggcccggtgacgaacatgttcgagttctcacgggtcatgatgatgaggtccgtcagggccgggcagtagacggcaccgccggcgcaggggccgagaatcaggctcagctggggcacgaagccgctggcctcgcaagtcttgcggaagatgcggccgtactgggtcagagcggccacgccctcctgtatgcgggcgccgccggagtccacgatggccacgatcggcactttgaggtcgatggccatgtccatcagtcggcagatcttctcgccttcggcggtgccgagggtgccgcccttgacggagaagtcctgggcgtagacggccactttgcggccgtagacctggccgaagccggtgatgacagctgcaccggcgttgccgccggcgatgttgccgccctggaagcggccgatctcctcgaacgtgccggtgtcgaagagcaggtcgaggcgttcgcgcgcggttttcttgcctttagcgtgctgcttgtcgcgggcgcgctcttcggcggcgcgggccagttcggcggccttgaccacggcggtgcgcagcggctggtgggccgagggctgggcggcgttggcggccgaggccgcagccgcggccttcacggccggcgaatccatgatgtcagtcattgccgccctccttcttggtgtcggcggccttggccttgccggcgttcacgtccagcgtgaccagcgtgtcgccggcctccacgccatcggccgggccaacgaaaatcttcttcacttcgccggcggccggcgcgtacacgtagttctccatcttcatggattcgagcaccaccagaaggtcgcccttggccacttgctggccttcggacacgttgatgcgcgtgaccacggcctgcatcggggaggcgatgacgccggatttggcaccgtcgttggccgtggcggcaccggaggccacgttgtgcaagcctgcgccgcgcaacggctgggtggggcgcttggcaccgcgggcgcgggccgagccggtgatgttctccacgatgtcgagtggcacggtgagcttgacgcggcggttgttcatctcgatgacgaacgtctccgacttggacttgtcgggcgcggccggggcagcggcacccggggcggtggccaaggaggccggctggccggaggcggcggaagccggtgtgcggttcaggtacgtgcgctccagccacttggtggacacggcgaacggatggccatgctcggcggtgaagtcgtcgttgcggaagatctccttgaacagcggaatcggcgtgggcacgccttcgatcacgagctcgtcgagcacgcggcgcacacgggccacggcatcgagacggttctgggcagtgacgatgaccttgcccatcatcgaatcgaacttcggggagatggtgtcgccctgttccacaccggtatcgatgcgcacgccggggccggccggccactggatcttctccaaggtgccggagccgggggtcaggttggtggccgggtcttcgctggtgatgcgcagttcgaagctgtggccgcgcggttcgggggcgcgggtgagctcgccaccggcggcgatattgagctgttcgcgcaccaggtcgaggccgctgacctcttcggagacggtgtgctccacctgcagacgcgggttgacttccaggaagtacactttgccgttcggtgtcaccatgaattcgcaggtcccgaggcccacgtagccgaccgtggtgaacaggcggcgggagtattcctccagcgtgctgacgatttcctcggacaggaagggcgcgggcgcctcttccacgagtttctggttgcggcgctgcagcgagcagtcacgggtggagtacacggtgaagttgccgtgcgagtcgcgcccggactgggtctcgacgtggcgtgccttgtccacgaacttctcgatgaagtattccttcagatcgccgccttgcagcgcgtcgtggttcatgtagaagcggcgcagctcctcgtcgtcatgcaccacggtgatgccgtggccgccaccgccatcagtgcgcttcatcatgatcgggtagccgtgggtgtgtgcgaagtcgagcagcgttcgcacgtcggtcaccggttcggacaggccaggcaccggcggcactttggcgcgcaaggccactcggcgggcggtgatcttgtcgcccaaatccaccagcgcggtgtgatgcggacccacccagatggcaccggcatcctcgaccttctgcgcgaagctcggcacttcggaaaggaatccgtagccggggtgcacggcgtccgcaccggttttgtgcaggatgtcgatcagcagatcctcgttgaggtacgtgtccttgtaggtgtcgccggagagcaggtatgcctcgtcggccatgtccacatagcggctattgcggtcctgttcggagtagacggccacggtggagatacccatctccttggccgtgcgcaccacgcgcagagcgatctcacctcggttcgcaatcagcagttttttgacagtatgagccatagtgtcaaattgtgctctccatataaaggagagggcaagccgcgttcgcacaaaagctttcacgcccttttgtaggctacgaacaaacgcgcgcgtaggttccggcaacgtaaccgttggcgccggctatcaaaaacgttgcaaatccgccgattgcacatccttgcgcgccggttcaagaagttgacgttacggttgcgttcgtcaacttatgacaaatcgaaatcgacaattttgtaagttggtacgaaaccgcacgaaatcgaacacctctacgatggcaaccgtaagttcgggggaaggctcatctgcgggcgaacggaaggcgaccggaccggcatcggtccatcgccgcacgatccgcccgcacagggccggattcatttgggaccgtccaccatatggacggttcgggctgtcggggataccgcacggcccgccggaacctcccctcatccatcgcataccgcccgccgttcacggcgatatcacacaacataggggttattgatatgcagacttcacacaccaccgcatccgcagcggccaccacgccgctcgcccgtcgtatcgtcgccgcatcctggaagccggtgctgttcgccgtgctgatgtggctgtccgcggccgccggcgagattccgattccgggcacgccggtgccgatcacgctgcagacgttcgtggtgatgctcgccggtctcatgctgccgtggcgtcaggccggtgccgccgtcgccacctatctggcggccggtgcggtcggcctgccggtgttcgccggcggcacctccacgctggccctggtcggcccgagcgccggcttcctcttcggcttcctgccgggtgtggtggtcatcgccctgctgcgcggcaagtccgacacttcgtccttcgcggccgccgcgcgcaccgcgggccgctacctgctggccgcgctggtcggcggcgtcgtggtggtgtacgccttcggcttcatcatccagtccgcgttgaccggtgcgccgctcgccgccgtggccctggcctccatgggcttcgtcgtcggcgacgccatcaaggccgtggtggcctctctggccgccgccggcctgtccaagctcggtcgctgacctgagctactagctagctactggccggctattacagcactcccacatcggcggtgcggaccgtatggtccgtgccgtcttgtgttctcaggatcagtgaggcgtcttcgttgaggccgatggcttcgccggtcagcgtggtgccgtccgtgaaatgcgcctcgacctgacggccgcgcgcccagcacaccgccttcatttcctcgcgcaacgactcggcctggcccttcgggtcggcgatgaacttcgccagtcgttcacggaagccctcgacctgacgttcggccaccgcatcgcgcatctcgccaaacgacggcaagcccgtgacatgcagctgcagcgaagtcgactgcggcgtgggcagccaacaggcacccagcgccagattcaggcctacgccgaacacgatgacgacgtcgtcatcggcatcagcatcagtaccggacgacggcggaatcaccagttccgagagcagcccgcccagcttgagcccgtggcagaacacgtcgttcggccatttgagttccagcaagcagtccggctggttcggcgcggcaccgtattcctcgatcatgccgttcagggcgtccagcgtgaccagtccggcgatcatctgcagccagccattgacggattcgtcggtggcgatcgcgcgcggaatgcgcacggcataggacatcgtcgagcaacggccgggctgactgatccacttgtgaccattgcggccacggccggcggcctgccggtcggcggccaccacggccaccgccagttcgccatcctggtggtcgggcagcgtcaacgacccgtcgccgatcatctgcgcggccagcgcgttggtcgaatcggtttcgtccacggcgaccacatgatccgcgacggctgtagttctgggtagctgcggcgttgcagctttcaatgcaatcatcatggacactacgttacctcggttgcgccgttttttgcccgcgatattccacggaaaagcgcacaaaatcaaccattttgggccggacagcccgtgttagcgttcacaacttcggaaattccgcattcgccgagcccacgcatgcacccggccgtcgtattggcttgcgaacaatggcgatgcccggcagacatcgaatatcaaccgttgacctgtgcggctaccatatattgtcatgacgtcaccagccaccgcgaagcttgccgccgtatccagccgccagtcccacccgcatcttgcgcgcgtgggcgctgccgcgcgctggacactggccgtgctggcctgcctgtggcttgcactgtgctcggcggtcggcccgctgtaccgggacgaggagaacggcaccctcgcccattggaactgggccaataccgcaatattcgtcgtgtcgttcctgatatatctcggaatcatcacgctgatggcgcgattcgcagcaggccagcgcatactgccgaagaccatcggcgagcgcctacgccaccatcagcagaatagcgaaacatcacggcccgccgccgatcagcaggccagccaaccagccaagacccgtcgtaccgttcgcgctatcgtcacgtccaccgtcactgttctggaccgctggatcacacgcggcacgaaccggttctggaagcttatgctggtgttttttgtcggctggctctgggtgccgaccactctgctggccgcattcggcgcggacctccgctcacagatccgcgaattcagctgggcctggaaccagtggaccggcctgaaacagccctatatcggcttcttctccttcgtgccgatggacatctaccccaccgcgcactacatgtggccgtccgatcccacgtatctgaccgaccagcacaatgtggtactcactgtgttctatggcgcgatagtcacgtttgcgaggcatctgaccggctcaaacgatgccggcatcgtgacgttggctgccctgcagacgctgttcgccgtgttctgctgcgctgccgccgccaatcgattcctgaaccggccttggataggaaaaacggcaacggattccgccgttcccccacaggccggaggattggccagattcctgattctgctgttcttcatggtctgcccgctggccgtgttttccactatctccatcaccaaatcgccgctgttcgcgttctcgttcgtctggtggttcagcgtctggtatgaactcgtccagacctggcaccccgccggcacccgcaaacatcctcagacccctgccatcgccacgcccgtccacttgccgtgccacagcttcatcgccttcatcctggccacgtcggtgatgctgatttccgcgaaatatgcgtggtacatcatcgctctgcaaatcgtgctggctctgatcgccgaccgcaaacgctgggcgacttacgtcgtggcgctgctcatccccaccgtactgattcacggcggcatctccttcgccatctcctctggtgcgatcatcggcggcgatccaatcgaaagccgcggcgtacagctgcaaatgatcgcccgcgtggctcagcgcaatccggacggtatttcagacgaagccaaaaagaacctcgcgcccgtcttcaatctcgatcagatggccgacgcttactcccagcaggatgccgacccggtgaaatcctccggtattcaggccaagaaggtcagctacaagtggcgcacggtgacgcccgaggatatgaccaatttcaacaaggcatggttcgaaatcgtcaaggacaatccgatcatcgcgctggatgcgttgctggccaaatgcttcggatacttcaatgtgaacgatcagccgtacgtatcgatggattattacgtggccagcgattacgtgcagaaaaactccacatggatcaaggattacaaccatgactggcgtgagcacatcgccggcttcactcgcgtatggggcagtattcccgtgctcggctggcttacgcacggcaatttctacgtggtgatgacattgctgatcggcgcggccgaggtgattcgccgacgttggctcaccctcatgacccatattccgctgctactgctgatgggcgtgatgattaccgcgccggccaataatttcgagcggcacatgttgccggttgcgtttgtattcggattcgtggtgctgacgtattggcgagagtctttggctgaaaggcaacgccaatcagcgacgctacactagtgactatgtcagattttctcgaacttcttgctgccgacgttgccgattcgtccggtgcacccggcatcaccgcgaccaaccgcgtacgcaccgtgctgttcgagtgcctgttcaatcatctggccgacgaacgagtggagtccctgttcaccatcctcggtttcgagcatgacttcgattgttacaccatcgccggataccctgcccggtccgccgcacgtacggccaaggaaatcgagaaaatcgtggccgatttcggcggtgtgtgtctgaccgccaagcgcccgatcggcaacagcaccgccgtagtggcgttgattcgtccggtcggtgcggccacgccggaaatcatctgcaataccatcgccccgtcgttcgccgccgatcggccaatcgccttgggtccacagcgcaccggtgccgatggcgcgatgcgttcgattcaggccacgctctactgtcttcaggccgcgccggccctggccgccaccgtgcagccattgccgcgcccgttacgcaccgacgacgccctgcccgaacgtgcgttgatcggcgacgcggacgcccgtgacgaactggtccgcgtggtctacggaagcctgaccgcggccggcccggacgatccgacgctgctcaccgtctccacattcctgaagttcggcggttcgctcgagaccacggccaaggagctcaacgtacatcccaatacgatccgctaccgtttgaagcgcgccgccgaatccaccggctgggatgccaccgacccgcgcgaggcgtacgtgctgatcaccgccatcgcgttgggtcgtgtggccgaagcgtaacggaccgcagcgtagtcgggcagaagcataaccagcagaaccgtagccggcaaaggccatagctgaccggacataaccgtccagcccgacagcctagcgggccgaatcaggctgcctgaatttcgcgtacgccatcgcgcagtaacgcggccaaggattcttgagtggctaacacttcgtccacgaatccaccggcggacaggctggcgatcacgcgaccggactcgttgtccacaatcggtacaccgacggcaccgacacccaacgtcacatcctcatccgacagtgcatatccacgttcgcgagtcaagcgaatatcctcgcgcaactgttccacactgaccagcgtgttctcgttatatgccggaaacggcactcctgcaagatagcgttcgacatcggcatcctcgaaatacgccaaggccacgcgaccggccgcgccagcatgcagaggcagcacgcggcccgggcgcaggatcagcgaatcgatggcatgaccttgcgcacattccacgcataccaattcagtgccggagaccacactgaggaatgaggtcatgccggtttgcgcggtgatggcatgcatgaccgcaatcgcaggctgccattcggtacgagacgtgcgagcggcatcagccaatcgcagccagtccagtgataatgagtagttaccatccgtatccgttacggcccaccccacatcgaccagtccatccagcacgcggtatacggaggatcgcgggatatcacaggcgtcggcgatatctgccggcgacaggccattctccgccgccaatgcgtccatcacacgactcgccttgtctaaagcgcgggtcggttcacgtttgtcttccgccatcgtcgacgttccttcccctgacttatccctgactcatcatattcaactgttcaggccaagatgatcaccactgtatccaaggcctcgcgacacctcacggccggcagtctgcaccaatcgcaccatgtcttgagccgatgccgttgccggttgcccatctaccagacaggccagctcaggttccaaggagcgggaaaggccactcagggcgattgccgcttgaatctctccggcgtgattgaataccggtacgctgatagtcacggagccggccatggtctggccgacgtcataggtgaagccgcattcgcgtatatgacgaacctgtcccattgctgtggcacgcatcgtggagaatgtgccgccgagctcgttggtataggcatagtgttccaacagctgctcgtagcgagccgggggaagccaggccgtcagtacatgagagggagcgctcatgctcagaggcaagctattgcccaccagctgtgcatagctttgcaatgtctcacgggtgcgtgtctcgatgcacaccgtgcgcaatcgcctccgaacgaacagaccccagatgccgaactggccgtgatgggcgcggaaggtacggcgagcgatctgctgaatgtccagtctgctttcgatttggccgccgatacgtacgcaatcgatgccaagccgatactcgccacgattgatgccccgttccacccaaccgactgcgacgagattatccagcaaacgatacgttgagcttacgggttcaccagtacgttcgcttatggtttttgcggtgcttggtcccagttccgccaatacatcaagtactgccttggatttcaccaatgcatctacgctacggtcatcacggcttggcgccaccatgcgcgtcacctcctgacctgtttgttgatacctcagacatcttaccgggtattcagcgggttgccgcccaaaacgcactgggccccgacgggatactcctgccggggcccaaggacgcgagatacacccccccccacgcgcaagtgtcctgatatgcgggaagccccggtacctttaaggtatcggggcttcctgtacgtgtggtgcggcggcgtgctactctcccacaccctgtcgggtgcagtaccatcgccgtgccaggccttagcttccgggttcggaatgggaccgggcgtctctcctgggccatggccgccgcaaatct

SEQ ID NO: 3142 - DNA, 43723 bp, Unknown
  R215_18m  MAG No. k141_69198
aatcgagtacgtgggttaggtcgcggtcgttgatggctttgtcggcggcgagctgggtctttggcttggcacagaacgcgagacccaggccggcggcctgaatcatcggaatatcgttggcgccatcgcccacagccacggtctggctcatcggaatacccaaacggtccgcccacgcttgcaaggcgtgcaacttcacggtcttgctcacgatttcgccgagcaccttgccggtcaagcacccatcggcaacctcaagccggttggcaatccaatagtcgatatggccctcggccgccaacatgtcaaccacttcatggaagcctccggacaccacgccgatcttccaaccgtgttcatgcagcgtgtcgataagctccagtgcacccttggtgaaatgcagcttgtcatgcaccgtgtcgaacacggagatcggcaggccctccaacagggccactcgtgcgcgcagcgcatcgcagaactccagttcgccgcgcatggcgcgtgcggtcactccggcaatctcctcaccgcagccagccaccacgcccaactcgtcgataacctcttcgtcaatgagcgtggagtccacatccataaccagcaggccgggcttgctcagcgtcggcacagaaaccgcagaatcagccgggctcccaacttcgctctcggcggacttgtcaacaaaatgcacatcttcttgcgtcatgcttctgattctgggaaaaccttgggacaatgccctctatgagtttttccatggcagccgccactattcttgcgaccgaccccacacccatctgcaccaccaccgaacccggcctgatcggcaccatcaccgactggctgatcatgctgatggaaaccatcggcggtatcggcgtggccttggccatcgccctcgaatccatcttcccgcccatcccgtccgaagtcatccttccgctctccggcttcaccgccgcacgcggcaccctgagtctgccgggcgcaatcatctgggccaccatcggctccgtactgggtgcctggaccttgtacggcatctcctgctgggtgggcctgcatcgcatcaatctcgcggcagacagaatccccggcgtcagccgcaaagacgtgagcaaagccaacgactggttcaccaaatacggcacatggtcggtgctcatcggccgcgtgattcccgtggtacgctcgctgatttcgattcccgccggattcaaccgcatgaacttcctgcacttcaccggctggaccctgctcggctcggccgtgtggaacaccatcctcgtttccgccggttacctgctcggcgaccagtggtgctcgattcaaggcgcgctcggcgtgttcgaggacgtggtcatcgcggccgtgattgtggtcatcgtatggttcgtggtgcgaaaagtgcgtactgttatacgtaacaggaaatccgccgacggcaacgaatagggtctgccgactgccataagttgccgaaaatcccggatagaagggaagcgaagaacccgcatgagcgacaccgaagatctcgccgcgctgaacgatcgcctgatggccaagaaccatgcgctcgccgaagcgctgagccgcgccggcaaggaactgaccaaggcgaagtcacagctcgcccagctcgctcagccgccgctcaccttcgccaccatggtcaaggtcgattccacccgcaccgatgaagacggcatccagcacgcgtcggccgaagtcatttccggcacccgccgcatggtggtgcccgtggcctccaacgtcaacgccgcccgcctgaccgccggggccaccgtgatgctcaacgagaagctcgtgctggtcgagcagcgcgatgctgacaccgtgggccagattcgcagtgtcaagcaggtacttgacgacggtcgactgatcgttaccgacgcctccggcaatcccgtgctcatccgccgttccggcgcgctcgcgtatgcgggcatcaatcagggcgaccgtattatcgtcgatccgtccgtccgcctcgccatcgaagtgctgcccgccgagggcgacaaggatctggtgctggaggagaccccggatgtcacgttcgccgacatcggcggcctggatagtgagatcggtcgtatcagggacgccgtccaactgccgttccagcatcgtgcgctgtttgagcgctacgatttgaagccgccaaagggcgtgctgctgtacggtccgcccggcaacggcaagacgatgattgccaaggccgtggcgaacgccctatgcgagggtggttacgattcgaatggcgacggcgcaatcagtccggccgaaacccatgtcaagggcgtgttcctgtccgtcaagggcccggaactgctcaacaaatacgtcggtgaatccgaacgactgattcgcctgattttccagcgcgcccgtgaacgcgccgcggacggcaatccggtggtcgtgttcatcgatgagatggattcgctgctacgcacccgcggctccggcgtctcctccgatgtggagaccacgattgtgccccagttcctctccgaactcgacggcgtggaatcactcgacaatgtgatggtaatcggtgcctccaaccgcgtggacatgatcgatccggctgtgttgcgaccggggcgtctcgacgtcaagattcgcgtcggccggcccaaaaccaatcaggccatcgccatcgtggaccattacctcaccgacgacctgcctctggaagatggcgtcgacgcgcacgccttgtccgccgtgctggtgcatgacatctacggaacctccgaacgccgccatctatgcgacgtgcaggaggagaacggccagtggcatgcgttgttcctggccgacgtggtctccggcgcgatgctcaagaacatcgtggaccgggccaagacccgagcggtcaaggaatccatcgaaaccggcttggacgtggcactcaccgtgccgctgctcgctgccgccgtggaagacgaataccgcgagaccagcgattccatggccgacgtggaccccgaacaatggtcgcgcatcaacggcatggacccgatccaccgcatccgcaccgccgaatagctcaagctcaaggagcactacatgaccgttaaacgagtgatgggcaccgaaaccgaatacgcggtatccctgaacaccccggaccgctacaatccggtgcaactgtccttcgacgtggtgaacggcgccgcggacagccacagcaaatccatccgctgggactaccggcaggaggacccggtcaacgacgcgcgcggcacccgtctcgaacgcgccgccgcccgcccggacatgctcaccgacgccccgcagctcaacatcaccaacgtgatcgcccccaacggcggccgcgtctatgtggaccacgcccaccccgaatactcggcgccggaaaccaccgacccgttcgaagcggtccgatacgaccacgccggagacctcatcatgcaggccgccaccgaacgcgcccgcaaacagaccggcactcccattgccctgcatcgcaacaatgtggatggcaagggctcctgctggggcacgcacgagaactatatgatggcccgcgcggtgccattcgacttggtcacacgcctgatgaccctccacttcgtcacccgccagatctacgccggctccggccgcgtagggattggcgagaacagcgagatcccgggctaccagctcagccagcgcgccgactacatccacgccaaagtcggcctgcaaaccaccttcgaacgcccgatcatcaatacgcgcgacgaatcccactccaccgatgcataccgccgtctgcacgtcatcgtcggcgacgccaatcgcatggaggtgccgcaggcactgaaactcggcaccacgagcatgctgctgtggctgctcgaacatgcggacgaggccggattcgacctgaacgccttcctcgacgaactcgaactgtctgacccagtcgaggccatacacaccgtttcccgcgacctgacgctgggggcaatcttgccgctggccaacggcggcgaaaccaacgcatggcttatccagctcaaactgcgccaagccgtctaccaggttgccgcactggtcgaaggtaccgacaccgccggcgaacccgcctggccggacaaatccaccacatccattatggcgatgtggcagcaggcgctcatcgactgcgcctccatccgccatgccgccgacgatgacgaacgtctggccatgaccggcgaggccagccgcatcgaatggctgctcaaatggcagctgctcgaaaaactgcgccgcaaaatcaccacaacgtccgcacccggcgtggccaacggatggaatgatccgcgactgaaggtcatcgacctgaaatgggcggcgctcgaccccgcggacagcatcttcaccaaactcgaaccccgcaccgaacgggtggtgagcgccgccgacatcgcacgcgccaccaccgaaccgccggaagacacccgcgcctggctcagggcaaaactcgtggcgcaattcggcgatgaggtggccgccgccagctggtcccgactcactgttcgcgacccgcgcgccgcagacgagggcgaggcggtcgaattctacggcaatgccggccatatggccgctaccgaccatcacctgttctccctcgacatctccgatccgctcgccttcaccaaggcgcactgcgaaaccgaactcaattcagccgaacacgccatcgatctgctgaagtcgctggccatcaacgccgaacgatagacttggtagctatggaagaaacacgcgaagagaccccacaggacctgcgcaaccttgcgctcaaagtcgccggcctgctcgaagaagccggccagcatgccctccacgaccaactcaatccgcgtaacctcgcccagccgagcaccgagaacgcggaccgtggcccccgctacaagcttgaagtggacaacaagatcatgcgcttcatgagcgccagaatcgccgacatcgcccacttcgacggcttctggaccacccgccccgccgaaagccgccctggccagcgttactggtacatcggcaagatcgacggtgtgatcaactacgtacgtcgcatgagcgaatggacggtgaccgccgccctgttcgaattcggcccggacaacgagcccaagccgatcatcggcatcgtgcacgccccggccctcggcctgacctacctggccgccaggggagcgggtgccgtgcgcatccacaaaaccgcggtcggcgagaagcgcgacaaggtcgtgccgtcgatgacctcctcgctggatggttctgtgctgagctacggcatgtccttcatccccagcgaatcgcagcgtgcgctcgacgtggcctcctcgctcgccggacgcccggccgacatcaagcgcgtgggccccgtctcgctcgacctgtgcaaagtggccgacggcacctatgacgcctacttcgagccgatgctgcacgtgtgggatatcgcgggcatcgccgccggcaccgtagtggtctgggaggcacagggcacgctgagccgttgggacggcgaacgcatccactggcgtcacgataacgatgtagtggcctccaatggactcatcatccgcgaactgcagcattacctgcagcagtatccgtggctcgactccatcaaccagcgataattttttgactcctccggctcccctcgggtgaggggagccgtcggccgaaggctgactgaggggagtttgacagcccaaaaagaagacaacatgccacaacaattcgaacaacctcaagcacagcaggccgcgacccaggaagacgacgccctcgccaccacgcaggccgccgcccaaaccgagtccaccgaccaagccgacgtgttggacgacatcctcgacgacatcgaatccgccttggaaaccaacgccgaggaatacgtcaacagcttcgtgcaaaaaggcggcgagtgatgccccaactgcgtgacagcggcacccgctccctgcacgccacggaacccgtaccatccgccgagatggacgggttctgccgtattttcggcgtcgaaaccgaatacggcgtggcggtcaccggtgccgaacgccccgtggacgccggccaggtggcgatgaccatgttccagcccatcgtctcccgttcccgctccaccaacacgtatctggccaatggctcacgtctgtatctggacgtcggatcccaccccgaatacgccaccgccgaagcgcgcgacccgcgcgaggccctggcccaggacctcgccggcgaacacgtgatgcgcaacctagccctgaaggcccagcgcaagctgcgcgaatcctgcggcgcacacgccacgatccatgtgttcaaaaacaacgtcgactccgccggccacgccttcggctgccacgaaaactacctggtccgccgcttcgtgccgttggagaccatcgaacaccagctgctgccgttcctcatcacccgccagctgtacaccggtgccggccgcatgaccccggacggcttccagatcacccagcgcgcggacttcctggacgaggccgtctcctcggccaccacccgctcccgcccgatggtcaacacgcgcgacgaaccgcacgccgaccccgactccttccgccggctgcatgtgatcatcggcgactcgaaccgttcgcaatggtccacatggatgaagcttgccgtcacgcaccttgtgctgtgcgcgattgaagacgccttccgccatggcgttccgtccggattcgagcagtatgcctttgctgatccggctgccgccaatcgcacggtcagtcgattccttgacgatccgcgcgccgaactgacgctcgaatcaggcgaatccgtgtccgcactgggtctgcagcgccggtattatgcggcggtcaaggccttcatcgaaacccatggcgatgcgctggcaagttcgctgccggccaccacgatcgacacgattatgggggagtggagccgcgttctggacgcgctggagcgtggtgcatacgatgcgctcgccgaccgcgtggactgggccgccaagaagcgtctgttcgacgcgctcaaacgccgtcgcccggacgtcaccttcgcccagatggaacagcttgagctcgactaccacgacatcgccaacggtcgcctgtacggttcgctcgtagcccgcaaccagatgcgtgagctgctgacaggagacaacgtggaatacgccgtgcacaatccgccgaccgacacccgtgccgccctgcgtggccggttcgtggacgcggccctgaacgtcggagcccagttctccgccgactggacccacctgaccctgaccgcccccgaacgccgggaagccatactcctcgatcccttcgaggccgagcccaccctgggattcgagcagcttatggaagcgctgaactagtccggaataatacggttggacaacacgtcacagcaccacaacaaaaagaccccgaccatctcggtcggggtctttgtcgtcagtaatgctcgaagtaatcgctacgagcagaaggtcactcggtgacggccttcttcagcagggagccagcggagatacgaacgccgtaggaagccggaatgtcaatctgctcgccagtgcgcgggttgcggccggtgcgagcggcgcgcttgacgcgctcagcggagaacaggccggtgagtttcaggccttcgccggacttcatggcctcgacgaacacatcctggaaggcgttaacagcagcctcggcctgagccttggtcaggttggacttctgggcgatcttcgaaacgaggtcagacttgttgtatgccataaagcatccttcttgggtcaggggacaagcacttttgcttagtccatgttgtcatcaatgatactagcgcatgtttctgcgaaaacccgcgttttataagggttttcacatctatttccccgaagggggtatgaaaatagacgaatcagacaagattatgcttgtcaagccacttcatggccgccgcgcccagcggaatgcgcagccagtagaacaccacgcggtgcagcaaagtggcggaaagcgccacgccctgcggcactccgaccgccacgaacgcgaatgtcagcgccgcttccacaccgcccagaccgcctggagtgggcactgcggaacccaatgcataggccagcaggaagacgaacgtcgtttcgatcggattcgatgaatggccgaacgcttgcagggccgcccagaaagcgagcccagtggtcgcgttctggaacagcgcgcccaggcagctgactgtgagctgtcggggctgggaaagcacgtccagcagctggttgatatacgtcttggccagcggcataagacgacgggtcacccagtggcgcaacggtggaatcatcatcgcaatggacagcaccacgaccacaacgcccagcacgataaccaacgtgtttgtcgggattgcgccggagaacatgttgcggccggtgaacaggccgatgatgaccagcatggagaagtacacggcgtaatacaccacgagcgcggcgctcataattgcggtcgcctgggtgttgcgatagccggatttgcgcaggaactgcaggttgacgaacgaggggcccacgccggctggcatggatacggtggcgaagccgcctgccacctggctcatgaagacgcccatattgtcacgcttgtgccgcgccatcagggaaccgagcgaaatcgacgagccgatccagccgcagacaccgaacgcgagcgtcaccaccgccatcaacgggttggcgttggtcagcgcggtgatgatctcctcgggcttcagttgggtgaagaccacgaccacggccacgatgaccagcagcatggtgatcatcgaacgccaggagaatcgggccagcgtcaccggttcggcggattccaccgtctcctcgtcagccagcgcggtgatacgactcctcaggcccttgagcagctgcttgtcccaggattccagcgcgcgcgtgggggaggggaccgcgaccttctgaatgaacggggccaaggccgtcagagtcgtgtctccccacgcctcgcgggcggcctccaccgccggttccacgccgatcagcgcggcgaacagcactagcagctgaactttgtcgagcgcggtgttggccggaccggaagcgttgtcgccgttgagccagccggcaatcacggcggtgccgtcttcaagccgggcgagcgtgtccggcgtgatgcgccggtgcgtatagccgcgccggctcgccacggacaggtagcgcatgtaggccacggcatccgccttggtaagcgtgttcaggttggcgggcagttcgatggtgtgtgcatccagcaccagaatcgcggattcgtcggtatcggcgatgccgtagggtgcgggcgcgggcagtttgatattgtgcagacccagcagcatggcgaaatgatgctggacggcgtcacgcacggaacggtcacgtcggatggacacactggtgaaacgcacccagtcccacaactgcttcagatagccgacggtatgggtctgcgcgtcgatgacggaaacgatgaaacgacggttgtccgtggtatccagatcgtagatgcgcgagccttcggccagatcgtcgtccagcgtgacggccagtgaaccgtggccgacgccgggctcctgatgccgaatcagcgaggcggtgtccagtccgatgcctttcagggcggcgaccagatcttggccccacacgcccttgttctgcgtgccgaccacgaatcggatcagcatgcccactgtgcggccggcggccatcgacaccagcatgccggtgaccgaatgccacgacagcaccaccatcaccgcagcgatggcatacaggatattccagctccatttgaccgtggagcgggtgcggcgtggcccggcggcggtcaggaaggacgccatgccggcgtagatgtcgggcaacagcccggagccgtatgaggtggcggctgagactagtgccattggcagggtgaaatcgttcagactgctgattgccgtcgatacgacccacaccatgccgtagccggcgaacatggccagcgcggacaccgcggcctgcagccattcccgggccagtagcaattgagcgagcacgatgatcacgatgacgatggtggccagctgcgtcagcacggtggaggggaagtcagccaaccagttgatgacctgggctgcggtgtgtgcgtcggattcgacaccgcgcgtcatgccgcccagatacacggcgaacaccatgaccacggcggccatcaacagcgacagaccggcccgggtcagatcgccgaagtcgcgcgtgcggcgcggagcgatgtcgtcgatgtacggtccggaatcgttgctgtcgtcggttgccgggctgtccggtccgctgacagcaaaactggccgaccggccgtcaccagaggcgatcggccggtcggtagtggaggaggtcgccttgtccgggcgatcttccgtagtggactgctcctgttcagtagtcatgaaatggttacctgacgcctgtccttgttcggttcagtttgtggtttggtttgtgactcagcgcagtagtgtggtggatgcgatgggctcgagggactcgcatcgcacctatttcagcggtcgaaagcgacgagctggctggccacaccggtgtaggtggcgggggtcagagccttcaagcgagcggcggtttccgggtcgaaggactgctggtcgatgaactgctcgacctgttccttgttgatggtgtggccgcgcataagctccttgaccttctcgtacggcttgtccatgcccggcaggcccttgagctcgcaggcgcgcatggcggtttggatcggctcgccaagcacctcccagttctcatcaagctcacgctcgatgacgtgggtgttcgggtggatggactcaaggccgcccatgaggttggtcagggcgagcaaggagtagccgagcgcggaaccgatgttgcgctgggtggtcgaatcggtcagatcgcgctgccaacgggattccaccagcgtggcggagagggtgtcgagcagcgagcagctgatttcgaagttggcttcggcgttctcgaaacgaatcgggttgaccttgtgcggcatggtggaggaaccagtggcacccttgaccggcacctgggcgaacactccacgggagatgtacatccacacgtccacacacaggttgtgcatgatgcggttggcgtgggagacggtggagtacagctcggcctgccagtcgtggctttcgatctgcgtggtcagcgggttccaggtcaggcccatgcggttggtgacgaattcgcgggagacggcgacccagtcgacatccgggcatgcggccaggtgggcgccgaacgtgccggtcgcgccgttgatcttgcccaagtactcctggttttcgatgtgcttgagctgacggttcagacggtagacgtagacggcgagctccttgccgagcgtggtcggcgtggccggctggccgtgggtgagggagagcagcggcatatccttgaattcctcggccttgccggcgaggtggtcgatgatgcgcttgaactccggggtccacacgttttccatcgcgttcttgacgcaacgggcgatggagaggttgttaatgtcttcggacgtgcaggcgaagtgcacgagggtcttcagctcgtcgttgatgttggccagctcggccggagccttgtcgatctgatcatcgatgtagtactccacggccttcacatcgtggtgggtgatggcctcatgagcggcgtgctgcttgatgccttcggcgccgaagtcctcgggaatggcgcgcaggaaggcctgctcttcggcagtgaacggcttgacgccgtcaacgattggctggttgccgttgccctcaaagccgttggccagaagaatcatccattcgacttcgacacgcatgcgttcgcggttcagggcaggttcgctcatgtattcgacgagcggggcggtggccttgtggtaacggccgtcgagcggggtcaatgcgattgcgggggaaatatcggtaagcttcataacctccaagggtacttccagccgtgaaccgagcggctacactgtggtgtggcgttcccgcccgagccgcacaggtcaaggaacgcctgtgattcgattactgtgtgcggcctttaaggctaggagatcaccatgcctgcaaccaccattcatactcttccgaaacgttcggtcgccgtatcgtcgctgaaatggcagccgttggacatcgcggtcggtgccacactgggcgcggcctgcggcgtgatcttctggggattcaacttcgcgtacatgccgatctcttcggtgtttggtgcgattctgcccggtttcgccagcatcgtgcacgccgtctggtatttctccggtacgctggcggtgctgattctgcgcaaacccggagcggcgctgtacgtgaaccttatcggcacgctggtcgaaacggtgattggtagccagttcgatttgggcttcgtgattatctcggcgctgctgcagggtgttttcgctgagattccgttcgctttgacccgttaccgcatgttcaatctgccgatttccattgcatccggtgcgttggtcgccttggaatacggcacatatctgatgctgtttcgctacgtgggtgtgtcattcgtcagcccgcgtggcatcgtgcacatgatttccgaggtcaccggcggcgtgcttatcagcggcgtgatggcctggtatctgatgctggccatcgccaaaaccggtgtgctcgaccgcctcgcatccggccgcgcactcatcgagcgacgcgcctgacactctttgcgcgccactttcccgggaatgttgcgctgatagagggggtttcgggcatgctagcgcaacaatcccgggaaagtggcgctagccgcgtctctgcggtgattgcattgtggggggggggtagccgattgatgctaagcattgacagcattgacaagttgatgtgcccgttgccgtgagaccccgagtatatcgcttatttgctgtagggcgagacccatgccatgtagttcttgtgccgcggcgcgagtttcccgcgctgcgttcgatctgcattccgcttcttccttgcgcagtcgccgagcttcatcaaggtgctcttgtacggattgcggcagttttgtctctatggtgagtgcgaaatcagcatcttgcgtcatgacggtgataaggtcgcgtgccatactttcaatctctgctgttgttcttgcctgcgtgaaaccgataccgggaatctcaagaatccagtatttttcgccaggacgaacgatgacctgatatgttttcactgctgataccagcctttcccgagtttggcttctgcttccttacaaatgatgttcgcgaggtcgttgtcgatttcgttatggcgtgggatgggaatcatgagtccatcgagttggaatatctcatgactccctctttgcctgatactctcaaacgtaatattcttgcgtttcgccgcttgcttcatcagtttgatgagccatctcctactcgtcattatattgttaactcctttcttgacaactctgtcaagtgtggtatttacttttaaccgccgaacgtgctgaactcggtggtgcgctcgccgggagcaatggttgtggactgggtcatgcggccttggtaatagcgggtttccttgagttctccgttgatgacttcctgaaaatgcgcttcgtggcgctgcacggcgggggagccgaggtcggtggcgttctgataagcggcctgatggtatttgagccaatgcgacaactctctgccgttggtcgaaccagccacgggtgcggcgtcatatggggtcagaccggtgatgggcgtcgcgccgggagtgcatgagccgtccgaatgcactgtggatggtgttgccgcgggcgcgggcgatacatgcccttgtacggtgagccagttatcggtgaccgggttggcggaaccatccagtgcggcgaccagttcatcatcgatctccacgctggtgacccatgtgcgttgcggaatcggatgattggccaccggcgatccggctgtcaccacatgctcgatggtatattcctccgcccaatccgaggcaagcgtggcggcaacgatgccaccttgggagtggccgatcagtgccacgggctcgtccttgccgatgcctgcctgacgcatcgcctcggcaaccatgcgagcgctgtccgctttcctgcggcgttcctgatcggcgctcatcagttccacgttctgcgcccagccgaatggtgagtcaggctgtccatcggtacccgggatggtgaccagccaggagttggttccatcagcccgttcatagcgttgaatggcgatggtcccatattcgagtccgctgttcagctcgattttgccgagccgctcttcggcgagtctgcgcagattctccattgactcggccaccgatccgcttgcacggacgacgtcggcattcgcctgcacctcgcgtacttccagatgattgccttggatgatgtctttcgctggtccggagaaattggcgatttttcccgcagccttgttgacctcatcggtgtgcgcaatgctcttgccgataggtacgccgccaatgattccgcccgcgccgctaagcactccttcctggaacggataggtgaacgtggacatccatgccgggttcggtttgccgtcaatagcccagccggccagaaagccgcccgccgccgcagcggcaacacccaccgcggcatatcccggtttggcctgtgtgccggcctgcaataattcggtaaacatgcgccgagccgtcatctccgcctgagaatacagagagtgtgcgcgaatcagcagatcggccgcgccacgcaggtcatcgctcaaccgctggcatgccgttgcatggtcataacaccgattgcccagcgcggcatatggtgcagtgacatggccgggaacaacggcgctcggatcgcccgactgcaaggtgacgcacatcggcgcactatgccgatgtgactgtaactgtaatgcggccgattcccaagccgtggctatggccgcaaatcctgccgcctcgtcatcgagagccttggctatggcggcatattcttcaagagtggctggcgcatatcccactccgccgtaaacggacgattccacctgccagtaatcgtgctcgctcatgatgacccccaagccaatcggtgggtggtctccatgtcttgcgcgagactggccgaatactgtgcggtgcgactgagccgcgatcggaataggtcggcggctttaccggtccacacgatgttgcgggagcggttcacggccaccgccgtctggtccgattgcgccagtgtggccgcacgttggacggacacgaggtcgcgactacgctgtaccgccgcatggcaagggcaagtgccgtaatcgaacggcgtcaccgtattgccggcaaagccgccggcgggatcgatgggtgctggggtgctggtgtaggtattcatatatccagctaaaaggacaggactcatgcttgtccagccggaacgaccaatgtggttctagcttgccgattttgggcgaatttatccccaagtgttgtgcatagtcgtaacgattatccacaaatagcctgtttgggcatacctcggatcagccatgggctatcgaaaattggacaaacgccaaagccgacagccgaaaccgggaaacagccgcgataaggccatgacccgtgaggatgtgagaaaaagagcaaccgtgaacgactgcttaccacggcttggtggccccggtacccttgttctgcgtcgctttctgcttggattgggtggtgttcgactgggtatcggtggattgctgattggccttcatcagctcctcgacctgcttcttctgctcgtcggtcaacgcgccgccctttttggcattggctgaggaactctcggattgctgcgccgattgggcttgcccggaatcggaaccgctgttctgcgcctcggcctgtttcagggtgatcttcgtcagctcggaagaaatcgaagcattggtgtcgatggcgtccttgacttgcggcaacagaagcgtacgcattcgcccggcctcggcgaattgcgcatcggtctgctgctgttgcgccttgagcgtggtgatatccgtggactcatcctgagccgctttgatattggcattcaatgatgcggtggcctgattgaacgtaatcgaagcggacaggtttactgccgccacgccggcaaccagcagcagcaatacggtgccacaagccaggacgatacgtgcccaaagcgggcatttcgcccgcatccgaatattcgccgagccatcgttcttgtggatttcgttactgtttctcacagcagcctccttgaggttgcgatccatgcaccgacttccatggcaagcaatatcgccaacgcaatggccaacggccataccaccggcgtggtgcgtgtgcgttccttgaccgtggtggtcatgcgccactgcttcgacgacttggccgaaaccgaatccgccaaagtctgtgaagcgtccacggccacatatgtgccgctgatctcgtcggcaatgtctttaaggttcttctcatccatcttggagatgccgggttcgccggtatccgggtcgaccacccagtggtccgtggtgttggaatcgccggcactgacgccatcggcgatgacgggaatcttgccgccctcggtcgagccgacgcccacggtaaacccatcattgagatactgtcgcagtgacgagaacgtacgacgcgtcacattcgaggtctgttcgccgtcagtgatgaggtacagcacaatcgcatcatccgggtgcgcttcacgaatcgacttcgcggtcagcagcaattgatcgatcggagcatccagactggatcccgccgacacggatgtggcttccaccgccaacgtgttggcccaattatcgatggccggcgcatccggggtcagcggcacatcaagtgttcccgaagcaccgaaccgtaacgccgcgaaactggcgtccgggtaagcagcggtcacatcatgcacggcctgacgcgcggcatcgatgcgggtaatggtcttctcggacccgtatgtggcatcagccaccgccatcgacccggtggtatccaccgccacgatgacgtcggtggcattgatgacctgtgaggtggtagacgataccacgctgggagtcagtaccatcaccgcgacaatgagcagcataagcgtacgtcgtatgcaagcccacacggtctcgtcactggaagcacggcggcgaacaaacaatacgatttcgagaatggccagtacggcgagcccggccgccagcagtccgtcggcgacccagcccaaggcgggggagaaggtgaatccgttcatcgcctcaacctccatgcacatacgatccagataatgagtatcacggccagagcaagcgtccacagaccgggagcgtccaccattgaggatttcgccttgttctccacatccgtatctctacgcgactgaatatcccgtaccagctcatctatcgacgcgccattcgattgggtgaggaagatgcctccatgcgactcgatcgcggacttcatatccgttatggtttggtccgattcactggctttcggcccggaatacagaccgtccacggtgattttggtctgctgggtcaagtccaacgcttcggtcagcgaataggtgggtttgcctgacacgacgttgtcggtggccagcacgatggatgccgcacgctgacggtcggcattcgcatgattggcttcaccataagcgaaaccggggagcatcgccgcgcaagacaccacgccgtcgccaatcaaggaggtggcgtccttgcggttctgcgtgccttcgagccaattggcgatgtcctgatattcggcatcggacatcttatcgatgtcatcctgcgactcgacgcctttcagcgccttgctggcggaggtcaactgtttggtgaccagttcgtagtcgtcggtcagcgggaacaccgtgcgtgaggtcgagttgaagatactcaaaccgatacgttccccctcgaaatgcttgaccagttccaaataggtatcgatgacctcgcgatcataggggagcgtggatcccgacacatccagacacaggacgatatctcggctggaagcgcgttcgtcaccggcatccacttggctggggcgagccaccagcacaatggccagcgccagcgcaagcaccagcacgctgatggcgagacggcccaaagcgcgccattgacggaacagacgggaagcgtgctcggtattgagatcgtcgtccatcgagaatacaggggtgtcgtcggcggcgttacggcgggcgaacacgacaatcagcacgataatcgccagcgctgccaagacgccggccagagcggcccaaggccaatgccatgccagcatcatgaacgccacctttccaccagattcgccacccactcggcggcctgctgcacgctggtcgtctgggcgattcggttgcgggcatcatcggcaaattccggtggatacaacgcgctaatggtctgcttcaatgcgtccaatccttggcgattcgcgggcgtgcgattcaggtacgccaaatcggtcagcgtactggaactaagctccttgcctgatgcggcaccggcgaaatcacgggcgatgacggccaattcgacgaaagcctcatgccggggcagtgctccggattcatgacgggccaccacatcgtcgatgcgggcacgccactcggccttggagctggcattgctatgagtgccacgcgcacggtcgctgttccgaggtttgcgtgcggggcgagccagcatgatgatcaacgcgatcagacctaccgccagcaacaggcatgcgacgatggccatcaccaggggagtggtcaaggccaacgactccacgggcctgagatcgccgggatcagtggcgagcgggatgatggggaacatgctgtgcatcatagatcacccgccaaagtcagtccgaccagttcgggtgcagtgcccagtctattgcgtgtggtgcgggccaatgcccgggacaccagggcgacgaaacgatcgaacatggattcgctggatgcggctcgaatgatatgggaaccggcacgggtgagctcctgttccaaagccgcggccatatacgcgcgatgagtatcgacctcggccgctgccttggcgttgcgcaggaatgccggcacacgccgtgcactcaagccgtcggcgggagcgtggcgggatgagacggccttgaacggattcatcgtcgccacatcgatcagcaccatcggatgggtgcgggtaatacgacggatcgtggtgatatgccgctcctccatcgcatgctcatcggtggccaatacgatcaatgcctcacgatccttgatacggcgcgcatattccagcagcgcgtcgatattacggtgatgatcccaatcacgatcaagcgccttgtccagcgtgcgttcgaactgcgcgaacccaccgttgaacggcacgcgggtgatgctggactcatcgccgaacaccagcgaaatatcgtccgaccggcgcaacgacagtgcggcgaacatacgcagcgcattggcggcaacctgccatgcgcgttctccggaagggcatacgccagtcatctccaggccaacgtccatcagcaaccagacccgtgacgtcgacaggcgctcgcgctcgaccaccatggggcggccttggcgggcgctggtcttccaatcgataagacgggattcgtcgcctggctcataggcatgcacatccatcgcatcgccgctgccgccacgacgcccggatgcgtgttcgccctccagcacgcccaaagccttccttacggtaggcaggctcagctgagtgccaagggcctcgattttcttgcgaacggaatcggaactcacggaacaggaaccgtttcgacgatcttgtcgacgatctgatcgctgaccacgccatcggccagtgcctcgaacgtcagcataatacggtggcgcagcacctcatgagcgaacgccttgaggtcctcgggcaccacatagtcgcgcccggacagcaacgccttcgcctggccgatacgggtcaaggcgatggtggcgcgcggcgaggcacccaaacgcaccaaggacgacagtcccttgatggggcgggagccggcacctcgtgacgtggcggtgatatcgaccgcataacgcatgatcgcgtcggaaacatgcacgcggcgtgccgccttgcgcagaaaatcaacgtcagacacggaaatgcgttcgccggtgatggtgtcgggaccgatcatatcggagccacggtgggtgagcatggccagcatgcgagcctcttcgtcgggcgaaggataggtcatgacggccttcatcatgaaacgatccatctgggcttcgggcaggttgaacgtgccctcctcctcaatcggattctcggtggcgatcaccatgaacggcttgggcaaggcgatacgctgcccgccgatggtcgtggcaccctcggccatggcctcaagcatggcggactgggttttggcattcgaacggttgatctcgtccagcagtacgaaattggcgtgaatcgggccgatctgcgtggtgaacttctgtgacgcaaaatcgaagacctgcgtgcccaccagatcggatggcatgagatcaggagtgcactgcacgcgtttgaacgagccggatacgcaggtggcgagcgtctgggcggccgtggtcttggccaagcccggcacggattcgataagaatatgcccgccggccaccaaggtcacgataagcgattcgcgtagattatcctgacccaccagtgtctgggcgaacctcgcccgaatggcgtcggccaggatacgtgcgcgtttggcgtcatcggcacccagcggagccgacacgccgggcgcgggaacggtgaccggtcgtgcggcggtggtcggcgaaggtatgttcggttgcgtggggaacaaagtcatgccctcactgtaactactcacaatgactgttggtctgtctaaagagtccaatccaccgggtcggcacccatggtgactagggcttgattggctctggagaatggtttggagccgaagaatccgcgggaagcggacagcggactcggatgaggcgatttgataatgaaggcattggtcagcaatggctcgaggctttgcgcattacgcccccagagaatcgccaccagcggcttgggcttgccgtcggcgtccgtgcgcgcgttcaacgcacgaatcgcggcctcggtgacttcctcccagcctttgccctgatgcgaattcggccgcccgacgccgacggtcagacatctgttgagcaacatcacctcacgttccgtccacggtgtcagatcgccgttggtgggcatgggcaccccaaggtcgtcaaccaattccttataaatattgaccaggcttttcggcagcgggtgaacattcggcgccacgcagaagctcaaacccaccgggtgacccggggtcgggtaggggtcctggccgacaatcagcaccttgatggaatcgaacgggatggtgaacgcgcgcagaatattgtggcttgccggcagccacgggcgcccggcggcgttttccgcacgaagaaaatcgcccatatggtggatggcgggctccacgtcggccaaggcatgggcccaccccggctctaccagttcgctcaatggtttgatcatgactcaccactgtagtcaaacgtgcatatccggtgcacgaggcgtggtgtggtggactgatgagttgtttgccgattacactcatgggtagttttgacaggaagaaagggcgattatggcacgcgacatgatgacctacgaatcctatgaaccggattccttcgacaatcctccgaagggaccggtgggagttcaccgtggcgctcgttcggcagtggcccgcctctgcccgttcatcgtcgttattctggtggccgcactgtgcggtgtcggggtctgggcatggatttccggggaatgcaggaatgcaataggaggatcgtcccagactgcgaccacgtccgggactgcttccaagtccgattcgtccagcaaggctgggaccaaaaacagcaccaaggatgattcctcgtccacttcgaccgatccgtccaaggactcgacttcggattcggcaaaatccgataccaacagtgatacgacatcctcgaatgagaatcaagactccgatcagcagtctcagcagtccggagccaccgcgactgtgaataaggccacgcaggtgcgtgtggtcaacgccacaggaatccaaggatatgcaggtcagcaggccgatgtgctgcagaccgccggttacaccagcgtcgaggcgaccaatccgcgcggcacattgccggcttcttccgtggtatggtatcagaatgaagccgataaagccaccgccgaagatgtggcgaccacgcttggcatttcggctgtggagcaggtgcaaggactcgccgttcccattacggtggtgctgctcaactagcgttgttgatgcgccccctgatatcggcgtggaatacatcgaaaactgtgggcgttctcgcgtctatggaataattcgtaccgaaaatgtgccactgcggttgggattgttccctcgtcactgtacaatcgtcatctagtcgcgaggtaggggagcgcgatgcggttctttctacgttccctataggttttgtgtcgcgacgcctaagggaacaaaggaaagatcagatatggcacaaggtaccgtgaagttcttccttgccaagaaggggttcgggttcatccagccggacgacggcagcgaggacgttttcgtgcactacgcggaaatcaaggacgacggcagcaccaataagttcaagatgctgtacgagggcgatcgcgtggagtatacgcccgcttcgtccggcaaaggcacgcaggcaaaggatgttgtcaagctgtcttcgggtgaagcccgctccgagtgagcaacacgcacgcaaggatgtgcattgaaggccctgaccgtttcgacggttggggccttttcatgcccaaagcgcaatcgccgccgatgatgttggcactcggcggtcgcgagtgctaatgtctgggttagcactcggaggtcgagagtgataatcggcagctgacggctggtcgtcacgactcgacgcttgcgagtgataaccggtatacctagccatttggaggaatacgcaaccatggcaaagatcatctcttatgatgaggaagcccgtcagggcatgctggagggccttgacaagctcgccaacaccgtcaaggtcaccttgggcccgaagggccgcaacgtcgtgctcgacaagacctacggcgctccgaccatcaccaacgatggtgtgtccatcgccaaggaaatcgaccttgaagacccgtacgagcgcatcggcgccgagctggtcaaggaagtcgccaagaagaccgacgacgtcgccggtgacggcaccaccactgcgaccgtgcttgctcagtccctggttcacgagggtctgaagaacgtggtcgccggctccaacccgatcgccctgcgtcgcggcatcgagaaggccaccgaggtcatcgtcaaggaactcgtcgccgccgccaaggacgtcgagaccaaggaccagatcgctgctaccgccaccatctccgccgccgaccctgaggtcggcgagaagatcgctgaggctctggacaaggtcggccaggacggcgttgtgaccgttgaagacaacaaccgcttcggcctggacctcgacttcaccgagggcatgcgtttcgacaagggctacatcgccccgtacttcgtcaccaacgctgacgaccagaccgcagtgctcgaagatccgtacattctgctgacctccggcaaggtctcctcccagcaggacatcgtgcacgtggccgagctggtcatgaagaccggcaagccgctgctgatcatcgctgaggacgtcgacggcgaagcactgccgacccagctcctgaaaaacatccgtggcaccttcaagtcctgcgccgtcaaggccccgggctttggcgaccgtcgcaaggccatgctgcaggatatggccatcctgaccggtgctcaggttgtctccgacgaactgggcctgaagctcgagtccgtcgacacctccgtgctcggccacgccaagaaggtcatcgtctccaaggacgagaccaccatcgttcagggcgctggctccaaggaagacatcgacgctcgcgtggcccagatccgcgctgagatcgagaacaccgactccgattacgaccgtgagaagctgcaggagcgtctggccaagctggccggcggcgtggctgtcatcaaggtcggcgctgccaccgaggttgaggccaaggagcgcaagcaccgcatcgaagatgccgtgcgtaacgccaaggccgccatcgaggaaggcctgctgcccggcggtggcgtggccctcgttcaggctgctgccaaagccgagaaggccgaggccgtcgcctccctgaccggcgaagaggctaccggtgccgccatcgtgttccgcgccatcgaagccccgatcaagcagatcgccgagaacgccggcgtgtccggtgacgtggtcatcaacaccgtccgttccctgcctgatggcgaaggcttcaacgccgccaccgacacctacgaagacctgctggccgccggtgtgaccgacccggtcaaggtgacccgctccgctctgcagaacgccgcctccatcgctggtctgttcctgaccaccgaggccgtcgttgccaacaagccggagccgaagcctgctgccccggccgccggtgccgacatgggctactgatccgcaagcgatcgctagctgattgagctgaaaggggactccttcgggagtccccttttttgtattctggctcccctctttggggggagctgtcgaacgcagtgagactaaggggagctgcggtgtagggatactccctcagtttcgcttcgcgatcgagctcccctcagggaggagagccaagaaactagctggcgaacaggcgcgaagcttggatttcggcgtcagcgtacacggtggaggcttgcgtcagcgagcgttggatggactcgagtgaggcctccatctgctgttgggccgcacgccactgttcggctaccgcggtgaactgggtggccgccgaacctcgccatgcgtcctgcaaggcattgagattggtgtacatgccgcccacggcctgcctgatctgcgagatcgaagtggccactgcggccgaggatgattggattcgctcggaatctacctgatattggggcatcgttgctccttttctagagggttaatggtatgtatggcggccgcttgccaataccggccgctaaggtggaggatatgtcaacaacgaatcgggaagacggaaaaacaactattgtggtcctatcttcggagcagtcctgttcggccttcgggaatatggtccgaaaatggcttgtttgtgccatttgcgcccttgctgcagtagcgatgaacgcaatgtggataaccgcaaatgcctatggggataactcgggcgacagctctgacagctccagcagcagcaccgacagcggcgtgaccatcaccgagaacatcacggatacggaaaatctcctgggctcccatgcggccgaagtcacggatgccatcgccaaaaccgagaaggaaaccggtgtacacgtgcatctgctgtatctttccagtttcaatagtcaacagaaaccggaagactgggcggcaaccgtgatggagtccatgaatcccaagccgaacacagtgatgcttgccgtggcctcgaatgacggcaacctggtggtcgtcgtgtccaagaactccgataagtggcttctcgataacaaaaccgtcgataagctatccgaagccgcacagcagccgttactggaaaacccgccgagctggtctggcgcggcaacggcaatgatggatcaaatcgtgaaatccaaaaaaacctccacctcatcatccacggtgaccgtaggcataatcatcatgggtgtggtgttggtggcgctggtcatcatcatcgtggtcatggtggtgattcgtcggcgcaaggagatcaagaaggattccaaggccgaactccaagatgacattcaggaaacgcccagaagagcgcgacactctaggaagcatgagtaagcctattgaagcatcgattgttgttgtcgacgacgagccgtccatccgagaactgctggtcgcttccctacacttcgccggattcgaggtaaacaccgccgcttccggttccgaagccattgaggttatcgaaaaagtgcagcctgatctcatcgtgttggacgtcatgctgcctgacatcgatggatttaccgtcacccgccgcatccgccaggaaggcattaacgcccctgtgctgttcctcaccgctcgtgacgacacccaagacaagatcatgggcctgaccgtcggcggtgacgattacgtcaccaagccgttcagcctcgaggaagtcgtggctcgcatccgcgccattctgcgccgtacccgcgaacaggtggaagacgacccgattattcgcgtcgccgacttggaaatcaacgaggactcccacgatgtgacccgtgcagggcagccggttgacctgagccccaccgaatacaagctgcttcgctacctgatggacaatgagggccgagtactgtccaaggcacagattctcgaccatgtctggcaatacgactggggcggcgacgcagccatcgtcgaatcgtacatctcctacctgcgcaagaaagtcgacggcatcgaggtcgacgacggcgaaggcggcaagcgcaaggtgactccgctgatcgaaaccaagcgcggcatcggatatatgattcgcgaaccgaagaactagtcgccccatccataacgcatcgcaatctcatgagtatccccgataagcagtcaggcggcgtaccgccgagcagcacgccgaacgccgccccgaacacgaatcccatgcctgcaatgccgccgttcgccgcccatttccaagagcggcgcgagcgtaagaaaaacatactgatgcggcatatcgaccgtatctcgttgagcagcaagctggtggcctgcaccatcgccgtgctgcttatcggcgtgtcggtgatttccttctccatccgcgcgttggtgaacaactacatgctgcagaaaaccgacacccagttaagctcgcaaagccagctggtggtcaacaatatcgatctgctgtcaaaaaatgactcatcggggccgaactcgtactttctgcagattcaatataccgacggcaccaaagacaaagagggcaatcctctggtcgtgaccccgctgatgccgcagatgcaggacggtatcgtatcggtgccgattctgcctacctatggcgataccaatggcatcacgctcggccaggcattcactacgcaggcagtggccaagcagatcatcacggtgcagtccgacagtgcggacagccagaacgatccggccaacggaaactccaattcctctgacaccatcaccaaggtactggccaaccccactgtcaatgccaaccatgccgccatcgtcacggcgagggcaccatggcgtattctgccggtgaccttccagcaaaacggcaaggaccgtgccgtggtgtacatcggcttgtcactggccgaccagatcgacaccgtcaacacactcacccgatactgcattgtggtcggcatcgccgtggtgctgctcggcggctccctgtccacgctgatcatccagcacacgatgacgccgctgaagcgcatcgagaaaaccgctgcaaagattgccgccggcgacctgagccaacgtatttcttccgcgccggaaaacaccgaggtcggctccctggccgcctcgctgaactccatgctcacccgaatagaatccagtttccatgaacaggaggagaccaccgacaagatgaaacggttcgtctccgacgccagccatgagctgcgcaccccgttggccgccatccatggctatgcggagctgtataagatgcagcgcgatatgcctggtgccttggagcgtgcggacgagtccatcgaacatatcgaacggtccagccagcgcatgactgttcttgttgaggatctgctgtctttggcccgtctcgatgaggggcgcggcatcgatgtgaccggcacggtgaaactctcgtcgctggtcaccgacgccgtcgacgacctgcatgcgctcgacccggaccgtgccgttcgccgcatgcagatttccctcgaaccggcgcgcgatttgaaccatcccgccgaattcaaccttgccgaaggcgattggcccgaggtcgtgctgcccggcgacgcctctcgactgcgccaggtggtgaccaacatcgtgggcaacatccaccgctacacgcctgccgattcgcctgccgaggccgcgctcggtgtgatgccggccgccatcgatccaagacagctcgctcgcatgcccgccagcgacgcgtcaatgcggcggttcatcgacgccgccgaagtaggtgcctcgatgcagaccggctatcgatacgccgtattgcgtttcgtggaccatggccccggcgtgccgcctgaatcgcgctcgaagattttcgaacgcttctacaccgcggacccatcccgtgcccgcgaaaagggtggtaccggtttgggcatggccatcgcgcaatccgtggtcaaagcacatcacggctttatctgcgccaccggcaccgatgggggaggcctgaccttcaccgtggtgctgccgattgagcagatcgtcgctcctgagcccaagcggcccaccggcaaaaccaaggacgccaaacagaagacttcttggttcagctctgagcgtaagactcaggcgactcagcccaaagcgtgaggtcaagccctgtgaggtaaactgtaccttcggtttactatttccattgaggattaaggaaggttcgcaatgcccaccggtcgagttcgttggtttgacgcagccaagggttatggcttcatcaccagtgaggaaggcaaggacgtgttcctgccggctcaggccctacccactggcgccaccacgttgcgcaagggggccaaggtggagtattccgtggtggatggccgtcgtgggccgcaggccatggatgttcgcctgatcgcctccactcccagcttggtcaaggccacccgcccgaaggcggatgacatggccgccatctgcgaggaccttatcaagatgcttgatgcggccggcaatacgttgcgccgtcaccgttacccatctgctgccgacagcaaaaagctggccacgttgctgcgtgcggtggcggatcaattcgatgtacaggactgatctgatctatgactgataccaccgaaaccatcgtgacaccggaccctcacgccatcgcgcgcgccgtgctgctcgaagtggccgacgagagcgatcaggtgggggatttcgttacctcatatgatcttgaggatcacgtcactgacttccgcttcgccgcgaatatccgtggctacgaaggatggcaatggtcggtgacgctgtatcacgacgaggagatcgactcctggaccgtcaacgaatcctccttgatccccactgagggcgcgttgatgccgcccaagtggattccttggaaagatcgccttgagcccacagatctggctcccaccgattcgatcggtaccgatccggatgacgagcgcatcgaggaaggcgaagtcgaggaatcctcgctgcaggatgtcaacgatgccgtcgagaccttccgactgacccgccgtcacgtgctgacctcgttgggtcgtgcgcaggctgccaagcgctggtatgaaggtccgcgaggccccaaagcgttgagcaccaaaaccgccgaaggcaacctgtgctccacctgtggtttcttcgtgccgctcgcgggcgaactcgaccgtatgttcggcgtgtgcgccaacaagtggagtccggatgacggccgcgtggtctccctggaccacggctgcggtgagcattccgaaatcgaacctcccgagccaagccagctgtgggtgcagtccaagccagcctttgacgatctgcatatcgacgtggttgccaaccgtccgtgcaagcaggagcaggttgcccaggacgaggccgaaggcgaaaccgacaagacaggcgagcctgccggtgatgatatcgaagcacagaagactgttgacgggaacgccgtcgatactgagcccgctgaggaggcggcaggcgacgggacctcgcaatcccagtctgccggtgatgagtccgttgcacagaacgcatccgattccgttgtggatgttgatgcagctgattccagcgacgagtccaagtctgatgctgacgacgaggccaccgaagaggacatcctcaacaacaccgttgccgatgatgatgaggatgatgagatggacgacgaagaggataacgttcgtccttcagacgatgtgactcctgaactcgaaaccgtcatcgatctcattgagcagctgcgccagaacagggcggacaaggaataaaataaacgccaatcctgctccccaacagcagaatgtactctcggatcaacttataggtctcagcgaagatgtttcctaaaaagtagatggtgatggggttgcaggaataaagaaatcctccctgcaagcccatcaccgagacgtgcgttagcactccatgccgatttcggtgcatcagtgcaccacagtcaccgtgcattcggcgaagttcacgatctgacgggacaccgatcccaggaagtgcgcgtccagaccggacaggccgcgcgaaccgaccaccagatggctggcgtaccgagatgccgcaatcagccccttggacgcgggaatatggaaggcattcgcgctgaccttgacaccatcgggaatctcggccttggccatcagcccggtgagaatctcctcggcgcggcgctgaccgaccttcaccggtgccacggcgttctcatagcccggaataacgcccaaatccttgagctgccagcagaacatcacatgcagcggcgcgtcgtgcagtcgtgccttttccagcgcgaagtcgaacgcgcggcgggaagtctcggaaccatccacaccaaccaccaccgggcggcgagccacctcgaccacgggctgtggctgcgtgtagtggaccggctggtctcctggcgtcagggcattggcgatggcatcggtcacggtctcatcctcgctgccggcgatgcgcaccacggtcaccggcacttcggcggcctcggccagcgaagcggacagggaccccatgaaccagcgggccacacggctcagcgagcggcggccgaccacgatctgctgcgcatcatggccgatctgcagcagggccgaagtgccggaggccttcaccgaggtgagcttcagattcgccggatcgaagtcgatgcctgcagcggccttgtcgacccacacacgcagctcgttggcaatatcgtggcggaccttggcccaggcctcgtcgctgtccggttcggaccccatatcccaggaatgcgtccagccaaacacggcgttgacgctctgaccggttaacgaagcctcctcaagcgcccacttcagcgcggcaaaggattcatcggaaccatccacgccgacaacgatgtcgggcttggttgtcgcttcactcatttcgagcctccttgtaatcgactacgggtgaatctagaaccagcatatcgttttcttatcctcttacggcgcaattcatggaatccgatgaataaacgtcatcgtgaatcggtagagtaagacggaatgtcaattgaggaaggacaagcatgttcgaacggtttaccgaccgtgcacggcgcgtgatcgtgttggcgcaggaagaggcgagggcccttcagcacaactacatcggcaccgaacacctgctgctcggcctgatccgcgaaggtgagggcgtggccgccaaggcgctcgcctcgaagggcgtggagctggatgccactcgcaagcaggttgaagaaatgatcggcaagggcaacgcggctccgaacgggcacatcccctttactccgcacgccaagcaggtgttggagttttcgctgcgtgaagccctgcagctgggccacagctacatcggcaccgagcacatcctgctcggcctgattcgcgaaggcgaaggcgtgggcacccaggtgctcatcaagatggacgtcgatctgggcgagttgcgtagcgcgaccatcgatatgattcgcggcaactccggcaccggcaccggtgacggcaagggcgacttggccaacgccggcggcgtgacggacaagcagaacaagtccggttccgccatcctcgatcagttcggccgcaacctgaccgccgaagccgctgaaggcaagctggacccggtcatcggccgtaccaacgagattgagcgtgttatggtcgtgctctcccgccgcaccaagaacaacccggtgctgatcggcgagcccggcgtgggcaagaccgctgtggtcgaaggcttggcccagaagatccaagccggcgacgtgccggaaaccctgaaggacaagcaggtctactcgctggacctcggttccatggtggccggctcccgctaccgtggtgatttcgaggagcgcctgaagaaggtgctgaaggaaatcaagacccgtggtgatatcgtgctgttcatcgacgagatccacaccatcgtgggcgccggctccgccgacggcgcgctgggtgcctccgacatgttgaagccgatgctggcccgtggcgagctccagaccatcggtgccaccaccaccgacgagtaccgcaagtacatcgaaaaggatgcggctctggaacgccgtttccagccgattcaggtgcacgagccgaccatcgccgagaccatcgagatcctgaagggcctgcgttcccgttacgagaaccaccaccacgtgaccatcaccgatggcgcgctgcagtccgccgccgagctgtccagccggtacatccaggaccgcaacctgcccgacaaggccatcgacctgatcgatgaggccggtgcacgcctgcgcatcaagcgcctgaccgccccgcctgagctcaaggaactcgacgagaagatcgccaagatcgccgccgacaaggacgaggccatcaagggccaggacttcgagaaggccgccgaactgcgcgacaagcaggagaagctggaagccgatcgcaagcagaaggaagactcctggcgcgaaggcgagtccgacgtcaagatggtcgtggacgaggacgtgatcgccgaggtcatcagctccaccaccggtatcccggtgttcaagctgactcaggccgagtccaagaaactgctcagcatggagacggagctgcacaagcgcatcatcggtcaagatgaagcggtttccgctttgtcacggtccatccgacgcacccgcgtgggattgaaggacccgaagcgcccgtccggttcgttcatcttcgccggccccaccggcgtcggcaagaccgagctggccaagacgctcgccgaattcctgttcgacgatgaggacgcgctgattcgcgtggatatgtccgagttctccgagaagtacgcggcttcgcgactcttcggcgcgcctccgggatacgtcggctacgaggagggcggcgagcttaccgaaaaggtgcgccgcaagccgttctccgtggtgctgttcgacgagatcgaaaaggctcatccggacatcttcaacacgctgctgcaggtgctcgatgacggccacctgaccgacggtcagggccgcaaggtggacttcaagaacaccatcatcatcctgaccaccaacctcggtacgcgagacatcgccaaggccgccaacacgggcttcaacctgggtgccaacaacgagtccagctaccagcgcatgaaggaccaggtcagctccgaattgaagcagcagttccgcccggagttcctgaaccgtctggacgacatcatcgtcttcaagcagctcaccgagccgcaggtgcgccagatcgtggatctggacgtcaagcagctcaacgaccgcctgttcgaccgtcacatgtcgctcgaactcaccgacgccgccaaggacctgctcgcgcagaagggcttcgacccgctgctaggtgcccgtccgctgcgccgcgtgattcagcgcgacatcgaggacgccatctccgagaagattctgatgggcgatctcgaagacggtcagcgcgtgattgtggatgcggaaggcgagggtatcctcggcgaattcaccttcaagggggagaagttcgaggagccggccgccgccgataagcccgccgaagacggtgccgccaccgatgccgaaacttcgtccgaagccggtgcctccactgatggcgagactccagccgacgccactccggccactgaaccagccgaatccgctcccgccgattccggtgacgctccgcagaagtagtccgtttcgatagcgtagctagcgcataccagcaaagctccccttgacaggggagctgtcagcgaagctgactgaggggtagacctacgcacacataatgtgcacgtttttggtctacccctcagttgcctctggcgatagctcccctgtcaaggggaactactgtttgttgtcgggttattgcagcagggcgagtccggtgtcgatggtctcctcgcgggtaaacagcgtgcggccggcgcgcaccgaacgcaataccgagcagcgctcatacacggcgttgaacacactatcggcgtccagcacaatgaagtttgctggcttgcccgtttccaagccgtacatatcgcgcaggcccaacgtagtggcaccgttgacggtcaggaacttcaacgcatcgtcgatttcttcaaagctcatcatctgtgccaaatgcagcacataatcaagaatgagcatcatattgccattgcccagcgggtaccacgggtcctgcattgaatcctggcccaatgacacattgacacccgcctcagtgagctccttgactcgcgtgatgccacggcgcttggggaaggtatcctgacggccctgcaaatacaggttctcggtgggggcgcaggcgaagttgatatgcgccgccttaagcagcttggtcaggtggaagaagtaggcgttgtccgccgatcccagcgaacaggtgtggctggcggtgaccttcgggccaatgccagccttatatgccaacgccgaaagcagctccacgtaacgggaattcggatcatccgtctcatcgcaatgcacgtcgatgagcttgtcgtatttcgaagccaactcaactaccgtgtgcatggaatgctcgccaaactcacggcactgttcgaaatgggggatgccgcccacgcagtcggcacccatcttgagtccttcctccaccagctcggcccccgattcgccatgcgggccctcgtaggagtacatgccctcctgcgggaagctgacgatctggagagtgaccgtatccttcaattcctccttaagctccagcagcgcctttaatgaggtcaggttcgggtcggtcacatcggcatgggagcgaatgagctgcacgccatgcagcatttctttcttaatgccgattttcgcgcgctgcttgatctcgtcgaccgtcaagtcggacttggtctcactccatcgctggatgccctcaaacaaggttccgctttcattcaccgcaccgggcttgcgggccgtgaatacgtaatcaaggtgcagatgcgtatcgcagaacggtgggcagacaagtttgccgcccagatcgaccacctcaatggccgccagatcaccaccctgagcctcatattgttgcgcgagtccggggccgaatgcggtgaacacgccatccgtgacgagaatgtcctgcaatggcagggtgcttgcagccgtgctgccgggttctccggtggcgatatgtgcgttggtgaacagtgtggtagtcatcgtcgctccttcaactggtgtgttgccgaacggttacgtgaaccgactgcccgcgtaaccaactgaggttattgtcaacagcacgctttgcggtgaggttaaccggaacgaccggtgttccgcaggggaatggacagattgtatgactgtatcgattcgcagtgcgcttcataacacgcagttcaaacgagccgatcctgtggtggaggtcgaaggcaaagacctcgatacgccagtgcgatgggtgtttaccaacgagcgagaggatgtctccagtttcctttcgggcggtgagatgctgattatcgagggtaacgctctgctcgccgccgattggcacggcacgttaggacaatatgtagcaagcctggcacaggctggtgtcgccgctctggtggtcgaactggtggagggtgtggtgcggatgccggacgaactggtgtctgcggccaggctgcatgggttgacgttgattggtctgaaatctcgcgtaccttttgtcgacatctgtcagagtgtcaataccgctatcgtgcacgaacagatgcacttgcaattggaggtggacacaatgtccacttcattacgtgagggattgtcccgtaccggcaatatcgaggctgtggccgaaaccattgcgtcgctgttcggcgaaagcgtcgccattttcgatggtgacggtctgttggccgctcgagcgggtcgtgcgttcgatgccggcaacgaatcgagcgccgtcatcgcccttgaaagtcgctcccggccggtgggagcattggagatcacgcaacgcaccatgactttcgacgccacgatgcgtcgggccatcgccaccatcgtgtctccggtggccgccctctatattgacggcggcgcgcgcatgggcatgatgcatcatctgagtatgggcccggccgacggcgtgcacgtcaatacatttgaggcgcaggaagcgcatgcgatgctcgacgcgctgggttttgccggatcatgcatctatatgccattcgcttttcggttcagatcggtggtggaaggcatcaaccatgtatcgacgatggtcgaacggttcgaagaacggtcgggatgcgccgtctcctgcatgctggaaggtgacttgatggtcggatggtgctccaccaccgattcctcagacggtgcggccgcattcggacgccattgcatggatgcgcttgccgtactggaaggcgacggtgtgtacgtggtgcatggccgagtggcattggacacggtgacgctggtcgacgggttcgcggtattgcgtgacatcgccaatcaggaaccggcatacgggcgaatcgtaagtaccatgtccgcactcgtcgaccgtttcgtcgcatcctctgatatggacaaggcgatgcgcatgctcgtggtgcagaccatcggattcgaggtcgccgcctctccgttgttgctggacacactgtgcgtctgcttcgacaacctcgatagcaaaaccggcgcgtgcgagcaattgggtatcagacggcaaaccctgtacaaccgactggacaaagtgacacaaatggtcggcgtcgactataacgacaaaccgaactggtcgatgctgctattcgccgccaaactcacgaaatcatggcaagaacagcatggtgaataatgcgccagcaccactgggcaacctgtccacttctacgccgaacgggttaatcgacgattcacgtttcagcaaatactcaagggcatagtcgaggctatcgcggcgctggtcgacctgctgcgaaacgaattcccacttgaatcccattcagtcacacgaacagcacatccttgaaaggacggtgacatcatgagttccgcaacgattactacatctgcacgactgatgaatttcacccctcaaactgaagaacaggccatggtcaggaaagtcgcggtatcttccttccttggcaacttcatcgagtggttcgactacgcctcctattcgtacttcgccaccaccatcgccctggtgttcttcccaaccgacaatcacaccgtcgccatgctgcagaccttcggcgtgttcgcgctatccttcatcctgcgtccaatcggcgcactgttctggggtagctacggagataagaaaggccgtaaagccgcattggcccactcgattatgttcatgtccggtgcgagcttcctgattggctgcctgccgtcttactcggtgatcggcgttggcgcgccgattctgcttctgctgctgcgcatggtgcaaggcttctccgcttccggtgaatatgccggtgcggccacattcctcggcgaatatgcacccacctcaaagcgtggcatctactgctcgctgattccggcgtccaccgccatcggtctgctcgctggctccacgctggccacgctgatgaccgccaacatgaactccagcgcgatggtcggttggggatggcgtgtgccgttcctgctggccggcccgctcggcctgattgtgctgtacatccgtaccaagctctccgattcccccgtgtaccagtcaatgaacgatgctcttgagtccaagagcgccgcctccgctgacggccaagtcgtttccaagagcggcatgttcgccccgctcgccgaactcttccacaaccatctcaaggccctgatcatcagcttcggagcctgcgtgctgaatgcggtcggcttctacaccgtgctcacctacctgccgacctatctgtctgacaccgtcggcatggacgccacccagtccggcaccatcaccaccatctgcttggtcgcctacgtgttcatggtgttcggcatgggccacatctccgacaaattcggccgcaagaaggtgctcatcggtgcttgcgtggcgttcatcgtcctcaccgttcctgccttcctcatcctcaacacctcccagttctggcccgtgctgctggttgagctggcaatgtgcgccaccctgaccgccaacgacggtaccctgtccagctacctgaccgagacgttccccacctccgtgcgcttcaccggattcgcgttcagcttcaatctggccaatgccatcttcggtggtacggcctcgttcatcgccactggcctgattgccctaaccggttcatccatcgccccggcctggtacatggtgggtgttgcggccatcgccttggtcgcgatgattctttcccatgaaaacaccgacaaggatctgaatcacatctgatctcctcagctccggctcctttcccgagggagccgggcgcattcattgaccatccaatccaccaccaacccaaaggagtactgcaatgggtagcaaccgccgtatggaccacatgacctggccggaattcaaggaggtgaagactcatcccgtcatcgtgccgatcggttcgaccgaacagcacggccagcatctgcccatcggtaccgacgcggtactcgccacgcgggtcgccgaagatctggcggaacgcatcgacggcaccgtgctgcccaccctgagctacggatacaagtccaagccgctctccggtggcgggccgctgttcccgggtactatcgacatgaacggcgtgacagtgatcacccaaatgcacgacgcgctgagcgaactcatcgccgatggcttcaccaagatcgtcgtcatgaacgcgcattttgaaaacgaggcgttcatcgtcgaggccatcgacctggtcacccgcgaaaccgggggagtggccaccatcgtggaaaccaattggtgggacccggttccgcagtcggttatcgacaaggtgttcgatggattggtgttccccggctgggcattggagcatgcggccgtcaccgaaacttcgttgatgctccactacgcgccggaactggtgcacatggaccgtatggtcgaggaagccggtgccacggcgaaatcctatgtacgctacccggtgcgccaaggtgacgttcccgctcacggcggactcgccaatccggccggctcaagcgccgaacgcggccgcctgattgccgaggcgtgcgtggatgcggtagctgagatctgcgtcgaggaatttgccgagtaatctccccttgccgacgcattcgtagtgacacgggttgcaaaggcctgaccctgatagtacggggtcaggcctttcccatcccaagacgccgctaagaattcacctgagagtcgccttcctaggcatggccgttcaatcgacgatcctaacgtgactggtgtgagcaggaatatgaagaaccggcggtgggccggcaagcgatcggggatcgcttttggtgcagtagcgcttatccttacggctctggtggttccttatgcttgtgcgggaaccacgggagccgttcctttttccggcgataatccatcttccggcacccgtacggtgaccatcgccgacatcactgattttcacgggcatatcgaacgtggtgcggacaacgccaccgccttcaccgtggccgacagccataatcccggcaatatgatcccggtatcgaccggcgatttagtgggaggttccccgtatgagtcggcggtggagaaggaccaacccacgctggacatggccaaagcgtggggattgacgatttcggcggtaggcaaccatgagttcgaccgcggtgtcgccgatttcaacaatcgcatcgctgatcccagcaatggcatcgactggctgtgcgccaacacgtctgccgccagtaagtcgcctgacggactgctgagccatgtacgtgactctacgattcgaacggtgaacggcaagcggatcggtttcgtgggcgcccttactgatgcgctcggctcggtagccactccgcagattacgcgtgatgccgatcttgacgaacgggcggtggacgcgatcaatcgcgtggcccgtgaactcaaacgctccggaaaggtggatgcggtggtggccttgctgcacgccgatgcctcagccgccgccgatattgggcgagatgttgatgtggtatacaccggccacaatcacgcgatcaagcgtggtacgaccgctggtggtgcgcctatttacgaggcgggcagcttcgggcggaatatggccgtgcaggatttgatcatcaccggtgccgggcgtcgcgccacggtgcgagtggccgatgtggacctcggcaatggcaccagccatacggcggttgacggcgtgctgggcgtggaagggcttaatgcgcatccggcgcaagccgcttggatgtctgccggtgctgaggcgaacgatgaggtatcgcgcgctcagcatatttaccaggcggcggcaacatattcgaatcatgccggcaacgcggtgattggcaccttggcctccggcgtgaatttcgacaaacaaggttcggataagcacgggaatacggtcggtgtgctggtggcggacgcgaaccgcgagtcaatcatgaagcatgtgtatgccggaaatcgtttgccggtaatcggattttcgaataatggcagtctgcggactccacggcttgatatgaatggcgatggcaaagtcaccgtgcgcgaggtggatagtctcatggccttgcagttcaaggccgcgcatgagacgctcaccgggcgcgatgtgaagagagtgctcgccgagcaattccaccgtgacgatgggcgactggagcggcgctggctcggcatctcctcgaacgtgacgtatcggtatgccgaatgcggtacgaccggtgggagcggcaatgccgatgccgccgctgataccgatgccgccgctgataccaacgctgacgctgacgagtgtgctgccgacgaacatgcggcggttcgtatcgtgaacctcgccgttgacggtcgaccgattgcggacgatgacctggtgattatcgcatccaattcatatctgcttcagggcggcgacagttaccccgccttccgtgccggaaccaattacggcgagctgaatatgccatacagccagccgttgcatgaatatctggccgcacatcaagggctcacggcaattgttgcagcaccggtagggactcaggcgtaagacaccaattgctgggtgactgaggaactatggggtggagttatgagtatagggcagaagaaaacggcataaatatgacgaagctcccctcgctgaggggagctgtcgccgtaggcgactgaggggagcttgcggtataaccgtaaactcccctcagtcagccttgctgccggcttccctcagaggggaacctggcacgagacccttacttgatggcgttcagccactgctccttggtggccttctcggcttcgagcttggccttcttcttcgggtcggattcggccgcgatcttggcgtcgagctcgacgagctgggcgttgagctgctcctcgaagctggacttgcgggcgtcggcctccgggtcggtctgcttccaagcggcatcctcgatggccttgatctgcttgtcaacggcgtcgagacggttctcgatgcggcgcatatcgtcacgcggcacgtaaccgatctgatcccactcttcctgaatcttggccagctcctggcgggccttcttggcctcggcgtcggtcttcaccggcaccagagcctcggccttgaccagcagagcctccttggcagccagattctccttctcggaggagttgatctgatcgcgatcagcctgacgggcgttgaagaaggtgtcggcggcttcgcggaacttggcccacagctcgtcgtcctcgttacggccagcgcggccggccttcttccaacggtccatcagatcgttgaacttgcgggaagtttcaccccaagcggtggaatccttgagctcattggcctcggcgataatcgcttccttggcttccttggcggctgtacgctcgttgtcgcgagcctgagcccacttgcggcgagcctggttgaaggtggtgcgggcggcggagaagcgcttccacagcgcctcggcctccggcttgtcgatgcgcacggtggtgcgctggtggttctgccactcgtcgaacaggttgcggaacttgtcggcggtggagcgccagttggtgttgtcgcccagggaggccgccagagcttcggccttctcgacgatggcggtgcgctcggcgacggccttggcctgagcggccttgcgcgcttcggcgatctcggccttcttggcctcgccggcggccttcagttccacgtaacgggccttgagggccgcgaggtcgcccaccaccgccggttcggcggtttcttcgcccagcagcttcacggactcgtcgatttcacgggccttgatgttcggggaagccagacgggtggccagcagatcgagcttggccttgagatccaggaaacgacgggcgtacagtgccaacgcctcttccttggagacatccgggaactggcctacctcgcgctcggcgtcgccatccttgacgaagacggtgccgttgtcatccacgcggccgaaggcctcggcggccttgacatcagcctcggaataggtggcggtggcggcggccggggcggcagcgcgcggcttggccgacggagtcttcttggcgaaggcggcgggggagggcgcgtgcggtttcg

SEQ ID NO: 3143 - DNA, 2669 bp, Unknown
  R215_18m  MAG No. k141_69375
aaagaagtagtacaaacacgctcttgagttctcaaaccaccaccacaccagcaagacaggaaaccaaccagaggaaggaacccgccgcgttgagcggcaacaggtgaataacttacacgcaaccacgccacaacgcaaatcaaagcgcacaagaacccaaggaatcggcataacagcgcggttccttcggcgtgtcgcacagagcccaatttgctctgatagggctagcgtaacccctcgaatgtttccggaaaacatcgaatccattattcggctggcgtgtcgcacgagttttcggactgtcagctccatgttcatcgttcggcaaccacaccaccggcgcacaatcaatgcatggcaacaacgctccatcatcggatttcgttcatgaatcacgggtatacctgtagttatgaccaagaagattgctgtattaaccggggcgggcatttccacgtccgctggcatccctgatttccgcggtccagacggtgtgtggaccaagcatcctgaccaaatgagcgtttacgacatcgatctgtttctgcgtaacaaagaggaccgtgagtactcctggcgctggcagaaggaatcaccagtatggaacgcacagcccggcaccgcgcataaggcgctggtcaagctggaacaagccggcatgctgacgctgctggccacgcagaacttcgatgcgctgcatgagaaggccggcaacagcgacagcgtcatcgtgaacctgcacggcaccatcggcacctcgcattgcatgaagtgccatcaggaatatgccacggcggacatcatggcccgtttggatgaagaacccgatccacattgccatcgcaaactgaagtatcgcggcgatatgccatgcaatggcattatcaaaactgatgtggtgtatttcggtgaggcactgccggacggagcgatggagaagtcgtacagcttggccaccaaagccgacgaactatgggtaatcggatcgacccttgaggtgtacccggcagcgagcattgtgccggtggccgcgcaggcgggcgtgcccatcaccatcatgaatatgggtcacacgcaatatgaccatcttgcgagccgcttgattcatgaggatatcgccgtcgcgctgccgaagttggtggacgagacgattgcggagaacaagtagtcctcagcataacgaaagcgccggtgggtggttaagcaactgatgattgttggttaaccacccaccggcgctttcgcgccacctcccgctagcgggaggtattggagcacacttctgcgcggcctcccgccagcggtattggaatcagtagatgcgcttgggctggaatccagcttccctgagtgccacgaggatgcggtcgatgtgctcggggccgttggtctcgaccgtgacgccgagagacaccgcgttggtgtagtggccggatgccttgaactggtcgtggtcaagctgaatgacgttggcgcgctgctcggcaagcagggtggccaccttgacgagctggcccggagtatccggcagctcgacctcgaagttcatgatgcgaccgcgggcgatcatacctttctgaatcaccgcgcccatggtcaccgtgtcgatgttgccgccggacatgatcggcaccaccacgtgcgggccggtggcggcggcgaacttgcgcgaacgcagattcagatgctccaacgcggccagcgagacggcaccggccgcctcgaccaccagcttgtgcttctcgagcatgagcagaatcatttcgttgatgtcgcgctcggtgacggtgaccagatcatccaggaactcgttgatcagcgcaaacggcagatcgccgggatgcttgaccgcgacgccctcggcggaggtgaccacatggtcagccggagacacacgacccgcggccagcgagtccttccatgccggggagccctccggaatcgcaccgattacgcgcacttcaggcttgaatgtcttgatggcgagcgccacgccggcacccaggccaccgccaccgagcggcacgaccacgtcagtgacgttcggcacgtcttcgaggatctccagaccgatggtgccttggccgcagatgacttcgtaatcgtcgaacggcggcacgtaaatcatgccttccttgtcggcgagctcagcagcgtgggcggcggattcgtcgaacacatcgccgtacagcaccacatcggcgccgtaggccttggtggcatcgaccttcagcggcggggtgatctgcggcatgcagatggtggccttcgcaccacgctcacgggccgcataggccacgccctgggcatggttgcctgcggatgcggtgacgatgccacgggcgatctgctcttcggtgagcgatgcgatcttgttgtacgcgccgcgaatcttgaaggaaccggtgacctgcaggttttccggcttcaggagaatctcatgaccggtcatctcgctcaataccggcgaagggataatttccgtatgacgggcagtccctttgagacgtttggcggccagcttcagttcggctgcatgatcacgctgcagcgccttcaaaacatccttttgttccatagctttccattgtatggcgcggggacaccgaaaacagtggcttatctcgctaacgagcgctcatttacggtaattcccgttcgtaatcagc

SEQ ID NO: 3144 - DNA, 56236 bp, Unknown
  R215_18m  MAG No. k141_71135
actgatcgaacgcgcgtgttccgcctacacgcaagcaatccgagatggacataccgatccattgcttgccatcgccatgttcattctcgatttcacctgcatacatccgttcaatgacggcaacggccgcatgagtcggctactcacgctcctgatgctgtaccgcaatggctatatggtcggcaaatacatcagtatcgaacaccttatcgagcaaagtaaaagcacttattatgaggcgctggccgcaagcacccaaggatgggatgacaacgccaatgattatgcgccattcacgaactacctgcttggcatcatactgtccgcgtgcaaggaattcgacgaacgcatcaatctcacggcaggcggcagaacgcagggagcaccgcgagtagccaccaagggaatgcggattgaagcactgcttgatcaatccctagtgccactctccaaggccgatattctcgctcgtatgcccgataccagcaccaccaccattgagcgcacgctgaaatcactgttggactccggtacgatcatcaaaatcggtgccggtcgcagcacccgctatgtgaaacgccgctaaacgcatccttgtgcgcaacatctcgtcactcttccggcgctccgctggccacgcgaatcatcgcgtactgggactcgtagaggcggtagtacgcgcccttggcggcgagcagctgcgcgtgcgagccgtgctcgacgatctggccgtgatcgatgtagaagatctcgtccgcgttctcgatcgtcgacaggcggtgcgcgatgatgaagctcgtgcgtcccttgagcagatgctgcaggccggcctgcatcgcctcctcggtgcgcgtgtcgatgttgctcgtcgcctcgtccaggattaggatacgcgggtcggcgagcagcacgcgcgcgaaggcgatgagctggcgctggccggccgacagggtcgatccgcgctcctccaccaccgtgtcgtacccgtcgggcagttccatgatgaactcgtgcgcgtgcacggccttcgccgccgcctcgatttcctcgtcggtggcgtcgagcttgccgtagcggatgttctcgcgcacgttgccggagaagatgaaggtgtcctgcagcatcacgcccatctgccggcgcagcgatgcgagcgtcacgtcgcgcacgtcgtggccgtcgatcgtcaccgagccctcggacacgtcgtagaagcgcgacagcaggttgatgatcgtcgtcttgccggcgcccgtcgggccgaccagcgcgatcgtgcgccccggttcgacgtggaagtccacgaggttgaggatgttacggccgtccttctcgtagcggaacaccacgtcgttgaagtcgacgcgcccgcgaatctgcggcaggtccgccgcgtcgggcttgttgcggatctccggcgtgacgtcgagcgtctcgaagatgcgctcgaggtacgccgagcaggtgatgagctggttgtagaagttgccgatgttgatcaccggattccagaagttgttcgcgtagccgacaaacgcgatgagcacgccggtggtcacgttcacgcccccgaagcccatcacgccgacgaagtagatgaacgagatggtcatcacggagatggtctgcacgcccggccacatgaggaactggatgtgcacggcgtgcatccacgcggaacgcacctcgccctgctgctcctggaaggtcctgaactgggcctgctcctgcgcgaaggtctgcgtggtcttcacgccggcgatcgactcgtggatgtaggcgttcaggttgctctgcttgttggagagcttctggaaggcgcgccgctggaagatctgcagcacgcgcacccagatgatgagcaccgggaacaggatcaagctccacagggccagctgccagtcgatcacgaacatcacgatcagagtgatcacgaaggtgaacacgtcggagatcacgttgatcagaccggagctcagcgtgtctgaaagcgtgttcacatagttgaccacgcggatcaggatcttgccgtgcgggcgcgaatcgaagtagctgaagggcagcgtctggatatgcgtgaagatatcgcggcgcatgtccttgagcatgagctggccgacgcgcgtgatcgccaccgtgcggtagcgcagcccgaactcgtacagcacgatcagcgcggcgaggatcacggcgaggatgccgagcttgccgaggtccttgttcgggatcgcctcgtcgatcatgatcttggtcaggtacggcacggcgacgacgatgcagctcatcgagatgacgacgacgagaatgcgcgccacctgtgccatatacggtttgagatatttgccgacgcgagcgatgtcgtggaggttgatggactcctccagctcctcatcctcgcggaatgtattgcgttgtgccataagtcctcttctaaaacccctgtgcggcgccggactggagtccgagctgcttgtggtagatgtcccagtagcggccgtgtgcggccacaagttcggcgtgggtgccgcgttcgacgatacgtccgtgctcgagcaccagaatcaggtcggaatccttgaccgacgagatgcggtgggcgatggcgacgatggtcttgccgccgtccatctccttgaggtgcttctggatctccgcctcggtctccatatcgacggccgaggtcgtatcgtccataatcaggatcgacggattgtccgcgagcgcgcgggccagcgacaggcgctgcttctgcccgccggacaggcccacgccgcgttcgcccacgacggtgtcataaccctgcggcatcgacctgatgaaattgtccgcgccggcgatctgggccattttctggatatatcggtcgtcgctatcatcgctggcaccaaaaccgatgttgccgccgatggtgtcggagaacaggaacgtatcctgcgccacgatgcacacctgcgagcgcaaggtggtcagcggccagtcgcgtgcgtcgatgccgtcgatgagcacatggcccacggtcgggtcgtagaagcgggagataaggctgacgagcgtggacttgcccgcgccggtttcgccgaggatgccgagcttggagccggcgggcacggtgaagtcgaggtccttgaggatcggggtctccgggtcgtccgggaaggcgaagctgacgtggtcgaagcggatgtcgcccttgatgtgcagcgggcaggacttgcgttcggcggactgctgggcaccggatgttccggaagccccgggcgctccggtagcctcatcatcgtgcttgacttgctcgacgatcgtgaccgcctgcttgacggcttcggccgcgtcgggcttctccacgatgcgcggctgttcggtgagcagcttacgaatcttgatgcagctggcgttgaatcgctgccagtcgttgatgagccagccggactggcgcaccgggccgtcgatcatccacaggaaggagttgaaactcaccagattgccgagggtcatgtagcccttgatgacaagaaagccgccgaggccgagcgtgatgagctgcagcgagaagccgaggccgtccagccaaggcatgtacttgcgcgagttgtaggccagggccatgttgcgctgcatgtaatcgtcgttgtgctcgtcgaacttttcggtctcgtacggttcgcgcacgaatgccttgaccacacggttgccctcgatgttctcttcgaccatggagttgagggaggccagcgagttgcggatggcgaagaacagcgggtgagcgtgcgtggacaggccgcgcgtgagcacaaaaatgaacggcgtgacgcaggccaggacgagcgcgagtcgccaatcgatagcgaacatcacgcacagggcgcccacgaacatgaccacgcagtcggcgatctgatagctcacccaactcaggcagtggcggatcgcgtcggtgtcggaggtcaggcggctcatgatgtcgccggtgcgtgtgtggttgaagtacgtgaagtcgagctcgtgcagcttctcgtattcgtcggagacgaggcggtagaccgagttctggccgaaacgctccatccacatctggtagccgtatcgcgcgcccacgcgaatgatggtcatgaggatcatcagtccacacagacgtggcagttcgtcggcatgtccgccgacgatgacgcggtccacgatgataccggacagaatcggaatggtcagggccatcgtgttgttggcgatgaacagtaggagcgcgcctaccacgcggggcaggtctggtttgcagtatggcagcacccatttgagattgcttgcgctggtatcgattcccggatcgacgtacatgtgaggagatcaccgtttcttggggattgtttgcttgtggtatggtgcggcatgctcctgcgccgcacgcggcaatcgctgccgccgcgattcacgatcagccgtgcttcgcactgcgcctgtcattggccgcacgaccggagctctccttcaccggtcgaagcacgttcgactttcgcaaacgcgtactagtctagacggcctgcgtccaatcgcaacagcctacaaccctgcgtgttccccgcattagcaacgcggcacgacccgctaagcgcagcattccccggaatgtgtcgcgcgaaacgttgcgcatgcggcaatgcacgctcgagacctgttgcataccagtcgaccaaattatagaatcataattaagtaaattacgattctataatttgcgcgtgtgcgccagggcagacagcaaagcaaggagacaagggccatgttcgtcgggcgagataaggagctttcggcactggaacgccgctggagctcacagcagttcgagtgcgtcgtggtctacggccgtcgccgcgtgggcaagaccacactcatcaaccgcttcctcgaagatcgccccacgattttcttttcggcaatcgaatccagcgcttccaagaatctcgaatcgttaagccgcagcattgctctgtatgaaaagggctcagaggcgttcgagacaacgcccgtataccgcagctttgaatccgcactggaagcggtgttcgcgctggccgcaaagcaacgcatcgccttcgtcatcgacgagtacccatatctggctaaagcagaccggaccatcaattcggtcctgcagcatgccatcgaccgccataaggatgacagtcagctcatgatggtgttatgcggctcttccatgtcgttcatggagcgccaggtgcttgggtatgagagccctctatacggcagacgcaccgctcaaatcaaagtggagccattcggctacgccgatgtccgcaagttcttgccaagatacagcaacgaggacgccgctattgcttacggacttaccgacggtatcccgcagtatcttcggcaactggacgacggcatcagcatccgagacaacatccgttggaacatcctcgatccaagctgctatctgtttgaggagccagacaacttgctgaagcaggagctgcgcagtccggccgagtacaacgccgtaatccaggccattgcctccggggcatctcggtcgaacaccatcgccaccgcatgccatatggaatcgtcctcatgcgccacctatttgcgcaatctcatcgatctgggaatcgttcgcaaggagacacctttcggcgaggacgctcctcgcaagacgatctaccgtatcgaggactcgttcttccgattctggtaccgatatgtgccgaacaacatgtccctcattcaatccggtcatgccgatctcaccgccgaccgtgttatgcgcactatctccgactttatggggcaggtgttcgaagacatctgtgttcagtggatatggtcccataacggtaccgaggcattgcctttcctcatgcttgatgccggacgttggtggggcgccaatccgaccacccgcagtcaggaggaaattgacatcgtggcttcaggagaaaaaccgaaaactctcctattctgcgaatgcaaatggcgcagcgtgccatccggtctgcagcagttggaagtgctgcgcaatcgcgccagactgctgcaccccgaaaccagccattacatgctgttctccaaatcaggcttcgacgagcatgtcgccgcccgcgcggcgcaagacggtacagtgacgcttgtcgattttgcggatatggattagtcggttcactccattgcggacggtaagggtgaagtaacaggctgggtcaatggaccgaaccgctagaccgggcaacagacccaatccgtgacacattcccgggaaagtggcgcatgtcatatcacgctcaaacaacccagcatgtatatgggcaggtattcggctcgtccaacagtctccgcgttgccatcatggaacacgtaggcatgtcctcacacgcttgtatctcgtcaagaaacagcagagtcttgcccggcgtaatttccgcgccggaaagtaccgataaccgcagtatcaggtcttcggtgtccttggccttgcttaccgtttcgaccgcctgaggcatttcgatgaaattcacctcagccacatgctcataatggtctgcaccgaactgcccaatcagcgtggtcttgcccacctgccgggcacccgtgaccaataagccctacttggttttacggttcttccaattcagcaactggccgaaccatatctcgcggcttcagtcatcctttatcatcagtattcggtagcggccctaaatcagctccgccatccggctcataatcactcgccaaccacgggcggaagtagctcccgactatccacagtgggacattggtcagccaatcctgctccttgtaattccgcatcgacgtacggtaaccgtaaatcccgtgtttgtcgcacagccacttcaagctacgcttatgacgctcggtaccagcttcggcctccaacggaatgattgcgccattgcctgcaaagacaaaatcaacttctcccgtactgttcgcattcgaccagtacatcggtgtgatgccggcggccactaattgctggcaaacatactgttccgttaacgcaccacggaattcggtcagcccgccatcaccaaggaccacgcttgcgggagtcagatccagggccgctgccagcagcccaacatcatggagatacagtttgaacgcggaatcatcacggtatgacggcaatggtgccgcaggtttttcgacgcgatacacccgcaacgcaagaccagaatcgacaatctgctgaatcgcggattcatattgcgccgcccgagcgccacgagcgatgtggccaaaaataaatttataccgcaatacacacttttcctagggttgcaattcgcgtattctacatttttcctagggttaataatgcagaatactgcacttttcccagggttagtaccctgaccttccctaatcacacggtgttgtaaaggcgggcggggaaggcgtcgcggtattggccgggggtgagtccggtgcggcgcttgaagacgcgcataatagaatatctcaagcatcgatgaatacggagatgatcacaatggctgattacatcggaacagtcaacaaccaatcttcaacacagcccaacggtcacagttcacatagcaacaccaccgagtcgctatggcgcggcacggattatggcaaatggttcgtagcggattcatgcacgtcgctgtcatcaagtatccaaggtttcgcaatgccactcatcgcgcagaccgtcacgggctcacctgcacaggcgacgctgctggattcaatcatgaccatgatatcgtcggtattgcggctgccaggtggcgtggtacaagataagtacgaccgcaaaaaactgatgattgcgtttggcctgattggtttcgcactgttcggcatatgcgcggccctaggatgggcgggattactcatatacccggtgctgatggtacttgcgatatgcctcggcatacgctcaggcctcctaggaaccacgagcaacacgatgctacgaggcatcgttcccgatcaattgctgcccaaggcgtcaagcctcaatgatggccgcgatgccgccctcgaactcgccggcgcaccagtaggtggcgtattgatcggcggcggtctatggctgccattcgcagtcagcgcgctgctgaatctattggaaaccgcggcggcgatgcggatcacaaaatactggcatcgtggcgggcggaccaatacggagggccgcgcccttgccgacgatgaggccgatgagaatggcgatgcggccaacatcactcaggccgctgacgagcagacaacgaccacgacatcatccgcgtcacagtattggcgtgagatgttttccggattccgctggcttcttagcgagcgattcgaacgtcgcctgattttgtcgagcgcgctggcgttcgcgtgcttcaactcgttcctgctgattacggtgctctcgatcggctccgacccatcacatgtggtgtcagccagtttcatgaacgtttctgtgtctgtgggcgtcatcgttggctcgctcatctcttccgtgctggttcagcatgtgcgcggcggcatagtcgccgtatcgttctacgtgctgatgagcatcggcgcgctcggcgcagcgctggctccgtggattcttgcgcgtatggcgtttctggcaatttcgctgctggccctaccggccggcaatgcggtaatcaacggattccaatcattgctcatcaacaaggagcatatgggccgcgtattcgccggcatgggcatgattgagacgattgctgccccggtgatcacatttctgtctggcatcgccatgcaacactggggttactcagtcacgtccgtggctttgggcttgtgcatcgtggcggccgcgatccctgccgtgacaatgagggaactggtcacactgcctaagccggatggctgggaggaccatatccgcaaatccgggctcaccaagttctgacaacaagtaagggcgactatctcccggatttgtgacgctcggcaaccgtcagcgtcacaaatccgggaagaggaaggtggatacggtttcagccgcgcgggcagcaaggtggacaaatcgttgccgggatggaatcgcggcaagtatgcaaaagcctcccgttcgcgcgcgacgcataagcgcgcaaacgggaggcttcccaaccgcagcatcatatgcagaaataaggagagtaaggcatatgctgccgcggtcacaccccgccgggaacctgtcgcaggccgcgtccggcatcgaaagccatgcagtcgatgcgtgcggccggccgttcccggcgcggtggccatgtcagacgtcagtcagacgtcatcacttctgccagccgatgtcctgcggcaggttgccggcgaagccggacgggccgtagttggccaggcccttcttcgcaccgaggtacgaagccgggttggagaccgggatggtgccgtacagcttgagggcttccttctcggcggcgttcacagccttggtctgctcgtcatagtcggagaggctgccagccttcttgacgagctcgtcgatcttcttgctgcccacgtaggagaagttggacgggccgtcggaggtgtacagctgcggggcggacgtcacgaaggtcatggcgctcggagcctgccaagccatcggcagcacctggtagttgccggaagacacggtgtcggagaacttggactcggccacgttcacgaccttgaccttgatgccggccttcttcatcatcgcctggtaggcgttggcgagggcctgctgggtggcgttgtcaccgaagaaagtgaaggagatctcaagggtcttgccgcccttggcgtagtagccgtccttgcccatcttgtagccgtcggcctcaagggttttcttggcgttgtccacgttgtacttggcctcggcgggcaggttgttctcgtagcccttctggaacggcagcagcagctcggagcccggctgctcggccttccagttcaggccctggaactgcacgttgttgtaggtgttcacgtcgaaggcctgagtgatggccttacgcacctgcaggtcgtcaagcggcttggacttgctgttgtactccagcacgcgggtcttggtgctgtagccgatgcgcagctgggcgtccttgacggaacggatggccttgatgtcgtccttggtgttggcctccacggcgtcgatctcgccgttctggaaggcgttgagggaggcggtgtcggccatctgcttgtagacgatcttgtccagcttcggcttgttgccccaccacttctcgttcggcacgaaggtgacctgggagtcggagaaggagtcgaccttgtacggaccggcggcccactcgttgtgcgggttcttcacccagccctgggtgaaggtcttcgggtcggcggccttcgggttcaccagagcgccgaagacttcctgccacgggtagtacggggtcttgtaggtcaccttgacctgcttcgggctgtcgccctgctcaacgctagcgatacggtcgaagccgtcggtgctcggcgggttgtagtccgggttggagccgttgttggcttcccacgtggccttgaaggcggtccagtcgatgtcggagccgtcgttccacttggccttcgggttgatgtcgtactgcacgaccatcgggtccttgctcacgagcttcatgtcggtcaggaagtccgggttcaccttaatcggggagccattgacctggtcggtcatgagcaggctgggctggtaccagctccacagctcggacatgtagccggtgttgccgtcggaagacaggtagttccagttcgggccgacttcgacgatggacagggtcagcgtgccgccgtccttgacgttgtcacggctctggtggttgtcgtaacgctcggtgaccttcggcatgggcaggtcgccggtgtacgacgaatcgatgccggccggcggttcggtggcgctcgaggcgttgctggaaccgttgccattgcccgcgccgcagccggcaagcagcatggcaagcgccgcagtggccgcggcgagcgcggtcagcttacgtgtcttgttcattgttatttcctcctctatatggttccgaccgtcatgcgaaatggcatgcaacctgatggccgctcggtcgggaagtgtcatacggccgcagcgccgggcgttcgccgcggcagcgggcctgttgttcggcgctcagcttgggcatgagcgggcagcggcccatgaacgggcagccttcgaacgtctcggtggggctgggcacctcaccttcgagcacgatgcgctggcgggtgcgttccgccttcgggtccggcaccggcacggcgctgatgagcgcctgggtgtacgggtgcaacgggtgctcgaacacgtcttcggtgtcgccggattccacgatgcggcccaggtacatcaccgccacgcggctggagatatggcgcaccaccgacaggttatgggccacgaacaggtaggccacgcccagcttgttctgcaggtcctcaagcaggttgatcacgccggcctggatggacacgtccagtgcggagaccggctcgtcgagcagcacgagcttcgggttgaccgacagcgcacgcgcgatggcgatgcgctggcgctgaccgccggagaactgcgtggggaagcggtccacctggtcggggttcagctccaccagacgcatgagttcaccgatgcgttcgcggatctgctctttggagtagtgctggaccttcatcggctcggccaggatgtcgtagatcggcaggcgcgggtcgagcgaactcatcgggtcctggaagacatactgcacggccgaacgcagctcgcggcgcttctcgcgcggaatcttgtgttcgagcttggtgccgaacatctcgatctcgccgtcctgcggctgcttgaactccatgatctccatgagcgtggtggacttgcccgagccggactcgcccacgagcgccacggtctcgccttcgcgcacgtccagcgtcacgtcgtccacggccttgacctcgccgatcttacggcgcaggaatccgccggcggtcagcgggaaggtcttgcgcatgtgcttgacgtcgagcaccatcttgcgttcgtcgcgcgggatgccggcgaacttcgacttggcggcctcggccaccgtgtacacgtcgtggaaggtcaggcccttgtccacgatctcctgggtgcggtggcaggccacgaactggcccgggcggcccggcaccggctccatggccggctcggtggtgtggcatatgtcggtggccagcgggcagcgcggcgcgaacgggcagcccttgggcatgttgaccaggttcatcggggagccaggaatcggcaccaggcggctgttgcgttcgcggtcggaacgcggcacggcacccagcaggcccatggtgtacggcatggccgggtggtcgaagatggagtcgacgtccgccttctcgaccgggcggccggcgtacatgacgacgatgtcgtcggccacgccggcgatcacgcccagatcgtgggtgatgaagatgacggccgcgccggtttcacgctgggccttgcgcagcacttcgagcacctgggcctggatcgtcacgtccagtgcggtggtcggttcgtcggcgatgatcacgtccgggtcgttggcaatggccatggcgatcatcacgcgctggcgcatgccgccggagaactcgtgcgggaaggacttcaggcggtcctccgggtccgggatgccgaccaggttcatgagctcgatggagcggtcgtgaatctgctgttcggtcatcttcggattgtgggtgaccagcgcttccttgatctggtcgccgatggagaacaccggggtcagagcggagagcgggtcctggaagaccatggcgatgcccttgccacggatctcgctcatctcaagatcggacttgctgagcaattcctcgccgtggtaggtgatggagcccttgacgctggcgttcttgtccagcaggcccatgatggccatggaggtcacggacttgccggagccggactcgcccacgatgccgagggtcttgccggggtacaggtcgaagttcatgccgcgcaccgcgtgcacggtgccggcttcggaggcgaagctgacggtgaggtcgcgtactgaaatcaccggttcggatgccatgccttgcgctcctgtggtgttggggttggtgttggttgttacgttgcttgcgttgcgttcgtcgctcatgatgcccgtctcccctctcactcggccttgccgccagaacgggagtacgggtcgatggcgtcacgcagtccgtcgccgatcagctgcacggagaaggtcaggacgaccagcaccacggacgggaagatcagcacccatggcgaggtctgcaccacggactggccggcgttgagcagcgtaccgagcgaggtgtcgggcgccttgatgcccaggcccaggaagctcagcgaggtttcgctgttgaccgcaccgatcacgccgagcacggtgttgatgaccagcaccgaacccaagttcggcaccagatgacgcacgatgatggtgaaggacggcacacccatgaacttcgccgcgcggatgtattcgcgatcgcgcaggctcagggtcagcgtgcgcagcgtacgggcgtagccgatccaaccgaatgcggtcaggccgatggccagccacagccagtcgctgccgccggccgccatgccgacgatcagggcgatgagcaggaaggacggcacgacgagcagcatatccagcagccacatgcccacgcgctcgaaccagccttcgaagaacgccacggccgtgcccaccagggcggcgatgatcgtggtgccgaacgagctgaagataccgatggtcaacgaacggccgaggccgcggatgatcatcgcgtacatatccgagccaccgaccgtggtgcccagccagtgctgggcggacggcggcgaggcgagggcggcgaaatcgggctcatcgtagctccactgggagaatttcgagccgaaaatcgccaaaagaatcagcagaatcagcaccaccagacccaccacggccgaggggcggcgcatgaagcggcgcacgtacagctgcatgcggccggtgcggtggaagtcgtcggcgctggaagcctcctgggcgttcctggcgtcggcggactgcggctcgctgccctgcggatcggtgagttccatatcctgggcggcggcgtcggagaccatgttttcgttgtcgttcatcatgttagatcgtcctttgcgcggggctcagctcagtcggatacgcgggtcaagccaggcggagaagatatccgccagcagcgcgccggacagcgtgcacacgccaccgaacgcggccacggccacggcaccgttgatgtcgttgttggcgatggtctgggtgaagtacatgcccaggccgttgatggcgaacacgttttcggtgatcaccgcgccggtgaacacgccggcgatggagaaggccacatccacggcggtcggaatcagcgaggtgcgcagtgcgtggcgtcgaatggccgcgttgagcgtcaggcccttggcgcgggcggtgcgtacgtagtcggcgttcatggtgtcgagcagatacgtacgctgggtgaggtggtagcccaccatgcccggaatcgtcatcacgatggtgggcaggatcaggtgctgcagatagtcaaacacccaaagcaccgggttggagccttggtaggagtgcaggccggtcacgtagaacgcgcggctgcccacgatgttgttgaagttgatggccagcagcaccaccatcaggcccatgacggcggccgggaccaccaggaagaacgttgcggtggtgttgagcacgcggtcctgccacttgtactggcgaatggccgtgtacacgccgatgctcacgccgaagaggatggagagcacggtggcgagcgtcaccagctgcagcgaagcggagatacgggaggcgatggccggcgccaccggcgactggtccgggctcaggccccagttccactgggtgaggatgcccttgagccagcggaaatagcggatgacgaccggcgtctggtcgttgatgttggccagatcgagcgaccggttaatcgacgcgatcggcggatgcggattgcgcgacatgtagttcgaacgcggatccatgaatgcgctggccaggaaatacgtcatcgatactgccacgaacagcatgatcacgtagttcacaatgcgcttgatgatgtacttgaacacccaaccacctcccagataactgaagaagtgataccccccccccgctcaaaaccacaaattgagttcaatatatggaatatgggtattgacttttccgactttttcctgtacggaaaaccgcgaaaacacttactgtatattgggcaaacatccgtttgttaattttgtatttcctgagcctttgctggacatgccttatactttcgtgtcagcagtccgccggcccggatggtgacagtccccgccgccggcaacggattatccatcagcatcatcagcatcagacaggggcatcatgacgacagacgccagcgcacgggccatcaaacccgaacttctacgcacgtacaccgaagacttcaacaaggaccgcgccaacctgatcgcggcggacgcggcggtttcggccggcgtactcaaggcggccaccgactatcgcggcgtgcgtgcgctgccgcgcgacttctccatcgaactcaagcagggttcgatcaccaatcaggagcgttccggccgctgctggatgttcgcctccctgaacacgctgcgctacgagcttatgcatcgctggaaccttgaggacttcgagttctccgagacctacctcttcttctgggatgcgatggagaagtcgaacacctacctggagaatgtgctgcgcacgctcgacgagcccaccgactcgcgcctgttcgaggccatcaactggggcccgtccgatgacggcggctggtggcagatgttcgccgcgctggtgaacaagtacggtctggtgcccaagagcgcctacccggagtccgagaactcccgtaattccgatgatttcaagcagtacctcaactccaagctgcgcgagttcgcggctgagctgcgccgccgttcggctgcgggcgctggcgaggacgagctgcgcgcgctgaaggacgagtacatgggcaccgtgtaccgcatctgcgccgtgtcgcttggcgagccgccggagaagttcgacttcttcgcgcgcaccaaggatgacgccgaggataagaagggcgaggcctgcaagtgcaaggccgaggccgacgcagacggcaaggccgaatcctgcaagtgcggcgactcctgcaaatgcgagggcaaatccgacgccaaggcctgcaagtgcgataaggacaagtccgacaagccgaaaaccggcaaggacgagcgcccgcagattcgcgagatcggtatcaccccgctcgagttctacaagaagtacgtgccggtggacgtcaacgatttcgtgacgctggccaacgccccgctcaagaaccgcccgttcaaccggcgctaccgcatccgcttcagcgcgaacgtggccgaggcgggcgatatggagttcgtcaacgtgccgctggacgtgttcaagaaggccgcgcttgaccagctcaccgccggtcacccgatctggttcgcctgcgactgcacgcagttcgcgctgcgcaaggatggcttcttcgaccagtccgtggtgcgcgtcgaccagctgttcggcactgaattcactggcgacaaggcccacggcctcgaatacggcgacagcccgagcaaccacgccatgaccttcaccggcgtgaacctcggcgaggacggcaagccgaaccgctggaaggtggagaatagctggggcaaggacgccggcaaggacggctactacgtcatgtccgacgcctggttcgaccgttacgttaccgagctcatcatccgcaaggaatacctcgacgacgccacccgcgccctgctcgccgccgaaccggtcgagctcgacccctggcagcccctcacccgccgctgccgctgacgttccgctggcgggagcatatattcgaatgccccttctctctgttcagagagaaggggcattacgttatgcgagtacgcccggccgcacctattcgagactatcgcggctgagctgagcaaaagtgccgtcatcatcggccaattgccggtaggttccggcctcgctaattgttccgaactagttatccacagagttatccacatctcccgcaagctagagccacataccccggttttcatagcgagcatgtgaccgctgcgctacggtggcgtcatgaacgacatattgcccactccaccgcccggcgtattcgacgacgaaccgtccggctggacccggccccacacaccgggcgttgcgtctgcgcgcaccatcaatcctgagctacgttcatcaccacgtatggcgagttccgcgccaactgtgattacaggccctgtgtcgccagcaatgagcgaaaccctcacccaacgtaagcgggaaatgcttaaacgatgcacggacgccgcgcaacagctcgggcaaccggtgctcttcggcatggccacatcgctgatactgcaatccgtgccgcttcccaaggattgcgatatcgaccccgccgagctccataccgtctccgactcacaccgcacacgaatacgtgccatcgtgccgccaacgacaccacacatctggaagccgctgagcgatgcgcacaatgtgcgtatcaacaaacatgtgtacgcactggatctgatacacacttgggcacaactcgccgctcatatatcgctcgaatcgctggtcatacttggcgacgcaatccttacggcaatcgcccgcaagccgggtctggcgaacggccgcactgctgacggcatttatcaggacttcgtgcggcaagtcactggactcccgaaattcaacgcaaaatccaagtgcatgatcgctcttgcattcattacgccccgcgtggactctccgatggaatcaaagacccgcatcgcgacgacgaaatacgggcttccgccagccgtgacaaattacacggtgcccggcgcgacattcagcaacggcgcgccgataacgctcgatctcgcttggcccgaatttcgcgtcgccatcgaatatgacggcgatcatcatcgcgccgacaaaaaccagtggcggcgggacaacgacaagcgcgaactgctgcgacatcatcattggatcgtcatcatcgccactgccgcgaacatggccgatgagccatcccaagccgaactcgcctaccgggtcgggcggcagttggcattgcgaggtgccgtattcgatttcactttgacggcaacgccactcgatgagctcgcccggcggaggcgacgaagagtataacgtttatcgcgaaagtcgtacagtatccatgttgcgccgacgctgcgcgactcggtgtccgtgtccgatgtcccggtagcgatgtcaatcgatttatgtgtggaccgggccagatttcgctgtcccggttctccatttcgcccctttttgagcaaccaagacaaaatttcattcacctatcaccccaccgtgcaatattcgccatcgtacatcggcggaattccggggttttgggattacggataatgggcgtttacaaggggggctgtcccggttcccaaaaagaagccgaaatcacgaaccgggacagcgaaatctgtcccggtaatcgcgtcaatcggttgccgtcatcaccggaacatcaactgcgcataggtcgaacgcttcaatgcgcaacaggcatgcgaccatatcgcgatagcgatattccgacggaagtatgggactcaccacgcgaccaatattatttgccgagctttggagcctcgtgcttggcgtggcggatcacggcatcggggaaaccggcgtggatgtagtcggacagcatccgcaatagcctctcgtcaaaggtgtgccgctcatcgctgctggcatcgaccaggatgaaatcccatgagtattcggtgtcaccgtcgttgatgatgagtccgcggccagtgatttttgcggccagcaacgcggcgatctgtatggcgcctcgcttgaccaaggccgattccgcttgagtcaggttgcccgaaaatgtgacggtatacatcatcagccccccttctttgttattttctagaacagcaatgccttattgtaaacagacagcactctgccataatccttttttcaatatgcggcccatggcattcccagcattaaaaaaaaaaagaaacccggcggagggggccgccgggtgagagagaagagagaagaagggttcagttatggggttcgaagaacctcgccaccggtatgaacttcattccgttgacatcttctatataaccgctccatgcttggcgaattgatgtgcttgtctgggaaaagtcttggcggagtgtgacgaatttgtgacgcccgccgacaaccggcctcgcattgtcggggcttgaccgcacatacggcaacgggccacctcgcaacacttcatgtgcgaggtggcccgtcagctacgagctagcaatgccgaatcactcggcggcgagtttggccttctcggcggccagacgctcggcttcggcggcacggcgagcagccaacgcttcatcgaagcgagccagctcctcttccacggcctcggtcgggatcttggcgaagatcggtgcgggcttgggcaccacggcgccgacctcgattgcctcgctcttccacgggtgcacgttcacaccgagctcgtaatcgccggtgataatcggatacgtgaagccgggcttgtcgagatcctcgacttccttgagctcaggcagcggcgagaaggtaccggtgccgccgagcgcctcccacaccttctgtgcggagtgcggcaggaacggcgcgagcaggtggttcgcgtcagacacggcctgggcggccacgtgcagcacggtgccgagacgagcctggtcgtccttaatcttccacggttcggtggcggaaatgtacttgttgatgtcgccgaccacacgcatcgcctcggacagggcgtgcttctggtggtgggtttcgatggaggagccgaccacgtcgaacgcggcggaagcctcttccagaaggccacggtcttcgttggtcatcgaatcctcgtccagcggcggaatctcgccgaagttcttgttgatgaggttggccacgcggttcaccaggttgccccacgaggaggcgagctcctcgttgttgtggcgcacgaactcggcccaggtgaagtcggaatcagaggattcggggccggccacggaaatgtagtagcgcacggcgtccacggggtagcgggcgaggatgtccttgacgtagatcacgatgccgcgggaggagctgaacttcttgccttccatggtcatgaactcgctggccaccacctgctcaggcaggttgagcggacccatcgggccggtttcgccgcccttggagcccttgccgttgtacgccagcatttcggacggccagatctgggagtggaaggtgatgttgtccttgcccatgaagtagtaggccgggcagctcggatcgttccaccattcacgccacttctccgggtcgccctggcggcgggcccattcgatggaggccgacaggtagccgatcacggcgtcgaaccacacgtacagcttcttgttcgggttgtcgatccagcccttcaccggcaccgggataccccagtcgatgtcacgggtgatggcgcgcggcttgacctccttgaacaggcccagcgagaagttgatgacgttggtacgccagcccttgcgggtctccagccatgccttgttggcttcggcgagcgccggcaggtcgaggaagtagtgctcggtctgctcgaagcgcggggtttcgccgttaatcttggagacggggttgatgagctcgtccgggtcgagctcgttgccgcaggcgtcgcactggtcgccacgcgcaccttcggcgtggcaaatcgggcactcgccctcgatgtagcggtcgggcagggtacggccggtggacgggctaatcgccacctgctgggtgcccttgtagatgtagccgttctccaagcactgcttgaacatctcctgcaccacgtgctcgtggttaccggtggtggtgcgggtgaacaggtcgtagctcaggccgaggtcgcacagatccttggcaatcacgcggttgtaacggttggccagttcctgggcagtgaggccttccttctccgcctcgacgagaatcggggtgccgtgctcgtcggtgccggacaccatgagcacgtcattgcccttcatgcgctcgtagcgcgcgtagacgtcggagggcacaccaaatcctgcaacgtgaccgatatgacgggggccgtttgcatacggccaagcaacattcaccaaaacatgactcataaggcttgattatccggcgcggcggggacacgcccggatagctgccgcgccgccatcctcatcccactcacctatccgcccgtaacttcccccacatacttatccgtacaccgcttgcgcgcttatccgcatacgcattcgcacacgtatccgtacgtacatccgcacgcacgtccacgcacccatccgcacgcacgtccacgcacatccgcacacacttccgcctgtcgatatccaccgagttatccacatcattcgcgcacctagtgaagttatgcacttatccaccgttttcgcttatccggtggcgcgcaagccgtacttctgcatattgttcgatcatggatatcacagcaggtccgatgacggacatcacaacagtcacctcgccggcaaccgcgcagcccgcggtgccgccgatactgtttaccaaggatctgccgggaccgctcagccttaaccgtctggccgccttcggcgcgttacgtaagctcgacgattccgccggctactggatcgagcattcgggcacactgtatggtcgcgcaaaaatcgtcgcggaggtcgccccgtttggcactgtggtgtgttcgatgaccgccgcttgggtatggctgggaggccccgactttccgagcaccatagacgtgatctccacatcgcacttccgctcggcatccgtcagccgccgcatccgcgtattcaaaagattgacgttgccggagcaaatcatcaagctcggcgggctgcctgtcaccacgccagcccgtacggcttgcgacctggtgatgagtcctgaagacatccccgatccttccaccgtcaacgcactggtgtgtcagctgatgtccgcgtaccagtttcggccaaacgactgtctgcaaatcgtcaaggagcatcggcatcacaagtatgccggacgcgcacgcatgttttttgaatcggtgcagaaggagattgacgaaccggctttggagcaatgcgcatgacgaggggattcatcgccaaaggacatcgcagaggccgccatgccgctcaccgtttacggcatttgcggcaggcgcaacggttgcctcgccacgcggcggcggcacactcatccgaatccgcatcgcgcgcaatctcggatatgaccgcgccgcctgaaccacccatcagacttacgcccgcggtggcatgttcgcccgatacggatgttgccgtgctctggcacatcgcatatcacgtgcccgaactgcgtaaatggctggttgccaatcccaaagccgacgcgcctttgctggaattggtctcgcagcgtggtgggcctggggtccggcaggcgttggaaatattgttcgagtcgatggaagcgtaacggggagataatcgccggctgctgcgctatcccttgattttcagcacagccgcatacacctgcttgcgattggccaacgatccgtcagccagtggatgctcctgcaccacttgcgcgatggcgtccttgatacgcaggccttcctccaaagcacggtcgatggagagcacggccatgtcatccacgctcaacgtactgggcgcggccgcttcggcctcctcgttggacgcgccgccgatgaccagcaccatctcgccacggggcggatcatcaatcacactttggcgaatctcgccaatcgggccgcgacgaatctgctcataatccttggtgagttcgcggcacagggccatcgggcgattcgggccgaacgcgtccagcagatcgtccatcgaatcggcaatgcgatgaggcgtctcgtagaacacgatggtgcggcgttcgggcaacagcgtgcgcagatactgcacgcgctcggaatgctttcgcggcaggaagccctcgtagcagaagcggtcggtgggcaggccggagagggcgagcgcgtcgagcacagcggaggggccgggcgcgcaggtgacgggcaggccgcgttcgatggcacggcgcacgatggccaagccggggtcgttgatggtgggcatgccggcatcggacacgacgagcacggtggcgccggtttcgacctggtcgagcaggccgtcggccttgtcgcgctcgttgtggtcgtgataggcgatgacgcgaccgttcacatagacgccgaggcgacgggcgagatcgtagaggcggcgcgtgtcttcggcggccacgatatcggcccgctccaagagggccaccagacgggcggaggcgtcgccaacgttgccgatcggggttgcggcgagcaccacggtgccggcggggatggtcacggccgattcgcgggattgggtggcggcggattcgccggcatgaacttcatcattgcgttcaggcacttgcgtcacgctaccgtcagcgtcatactgctcattcaactcatctgcgcttgtcatactcccagtattgcccataccacagagcaatccacgacaatccatggcggaatcgaggcattctccctttgcaggggctgatttcacatgttccggaagtctacttccgtttcaaggggctcctcatccggtgaagcaccagtacaaacggctttgacgcaacgctattccgccattttggcggcatatctacttgaccatcagcccctcgaaacgcaagtagacctccggcaaaccccaaatcagccccttgaaacgcgagatggcagaatttcaacgaagacaaataaaaagaccctctgcggtggaatgaatgcagagggtctcgtggagctgacggtagtcgaaaccgcgacctcttcgatgcgaacgaagcgctctaccaactgagctacagccccttggatgttactttgctccgcaaagcaactcgcaacaatatagtacggagtgcggtcaaacgcaatttgacgccgaagtgtcgcagacggggtaaatcacccacaccgctccgcatggataccgcggtggcacccggcaacgtcatcatgcttccagcacatgcagcactttcttttcgttgtagaacgcgaatacgatgccacccaagccgcacagcacggccgcgcacacggcggcgatgcgatagcccgcgccggacgccatgccgatggtggagacgccggtgaacagcagcatggccacggactgccccatcttcatcgcaaaggtgcgggccgcgtagaacatgccctgacggtcctggccggtggtcttggagctggcgtcggcgatattcgccacgatggcttgcggtagaatgccgaacgcggccatcggaatcgcgccgaccaccgagagcgccaaaccctgggccatcgccggaatgaagccgagcgcggccgaaccaagggcgccggcaaatgcgaacgcacaggtgaagatcacgaaggcaaccagcagcaggcgcttcttgccgaccttattggccaagatattgaccggcagatagaacagcacagagacgccggtcatgagcacgaagtagatggtcgtggtggtttccggcagcttgagcaggctggtcacgaagaacggcagaccggtctggaaggtggtgatggccacccagtagaccacgtcggaacacacgaacttgcggaattcgccgtcgccgaacgtctgcttcagggattcgatggccgattcggaggtgggctgggagttgacgtagtccttctcgcggatggccagcggcggcaccagcatgcacacgaacgccacggcggccatgatggtgaaggtcacgcggatggcggtgatacgccccatcatcggcacgaacgcgccccaaatcaccggcgccacgtacgcgatggccgtgccggccacccaagtgaaggagatggcggtggagatggtgagttgctgcttggagtcgtggccgagttcggcgatgagcgcgttgtacggcgtgcagtagaacgtgaggacgatgtagtagccgatcacggtgacgaacaggaacgccgcgttcacccagccggtgccgttgatcggactccagaacacgagtacggtgaccaccgcgagcggcagggcggcgaatttcaggaacggcatacggcggccggattgggcgtcgcaacggtcggagagggacgccacggccgggtccacgaacgcgtcgaagaatcgggcgaaggcggtgatgccgcccaccacggtcacgatgccgagaacgaccaggccctgcggcacgaatacggtctgacctcgggagatggtctcctggtcaggttggtagaaatacacgagccagttggagatgatgccggaaagcagcgcccacccgaactggccgaccgcaaacgcccacactttggcgatggggagatctttgatggctgatttcgccggtgcaacttgcgcgcccgttacacttgctgtagtcgtattgcccattccccataacctccgaatcaacattgacacagtgtcaaaaaccagtatacaccggggttataacctgctagattgattatttgctttagtttgttttcgtgtgatataattaagtcatgcgtgtcagggaatgggcgaggcgtgagggcttcaacgagcagacggtgtggcagtggtgtcgcgagaaccgtatgcccgtcccgttcgagcgcatgaacacgggcacgattatcatccacgacccgaaatacgagaaccagcccgccgcccccacggcgaacggcaggacggtgtgttacgcgcgtgtcagctcgtccgaccaaaaggacgatttgcaacgtcaggccgaccggttgaaggcgttcgccatcaacatgggcgtcaagagccccgaggtggtcatggagaccggttcgggcatgaacgacaagcggcgcaagctcaaccggctattgtccgacccgaccgtgggcacgctgatcgtggagcgcagggacaggctcgcccgcatgaacgcgggactggtggagagcgcgttgaaggcgcagggacgccggatcatcgtggtggacgacacggagctggacgacgacttggtgcgcgacatggccgaggtgctgacctcgttctgcgcacgactgtacgggcgtcgtgccgccaagcataagacggacgcggcgttgagggcggcgcgtgatgcttgaggcggtcagggtggcgctcgacccgacgccacggcaggaacgactcttggagtcccatgccggtgcggcgcggttcgcgtacaacgcgggactcgcgcacgtcaaggacatgcttggacggcaggagaagccggaatggtcgtactacgcgctgcgcaggtggtggaacgccaacaaggacgccctcgccgtcagcatggagaccggcaagccgtggtggccggagaacagcaaggagtcgtacaacagcggcctcgaatcattggccgacgcgctgaggaacttctccaagtcccgcaaggggcagcggaaaggccgcaggatgggcttcccgcgcttcaaatccaaggacagggcggttcccggattcgcgtacacgacgggctcgtttggtctcattgactgtgacccttatgcgctgcggctcccgaagataggccgcgtgcactgcatggagaacgtatccaagcgagtgaacggcgcgaaggtgctgcgcatgagcgtatcccggcatgcgggacgctggcaggccagcctgaccgtcgaacgcgccgacctgccgattccatcgccgccgaaaggcgggagcgtcggcatcgacttgggcgtgaaggaactcgccacattgtcggacggcaccgtgatacacaacccgcacgcactcaaatcgaacctcggacggttgaagaaagcccaacggaatctgagccgcaaacggaaaggctccaaccgccgacgcaaggcgagaacgagggtcgcgcgtctgcacgcccgcgtggcggacctacgccgcgacctactggacaagaccaccaccatgctcgcccgcacctacgcggacatcagcatcgaggatttgaacgtggcgggcatggtgagaaaccataggctcgcccgctcggtagaggacgccgcgttcgcggagttccgccgacagctcgaatacaagaccgcacgcaccggcgcgaggctccacgtcatcgaccgctggtatccaagcagcaagacatgttcgaactgcgggacggtgaaagccaaactgtccctgtccgaacgtgtctaccattgcgaggagtgcgggcttgtcatcgaccgcgatctgaacgcggccatcaacatccaagtcgccgggagtgccccggagacgttaaacgcgcgcggaggaagcggaagacggaccgacgcatcgcgtcgggcaacgcggcatcctgtgaaacgcgaaccaagcgacggcgtaagccgtgtgagtcttggagctggcctcggcaacgaggccatgcagatgacttcgctctagcgacaagctaaaacaaagtcatctacaacggttttacactcaattccctgcagggcaaaaccgcacaccacaatccacaccccgagccgccttcccctcagccatccgcaggctctacgatgagagccatgactggtctggccgaacgactaccgcacgtcgccgctttccccgaagcgctgggcaccgggttgctgctgcataccgatgtcgcgctggacgacgggctcagtaactgcatcgatatgttcatcagcacctatgaagccgcattgtcccggttcaaggatgattcgacggtcggccggatgcgcacggccacgcatggcggcacgttcgattttcctgactgggcattgggtttatttggcctgcacgaccagctgtttgcgtcgactaatgggaccatcgacccatgcgtgggcgaggatttgattcggcttggctatgacgagtcgtattcgtttacgcctgcgccagatgccgctgaacatgcaggcgcgatccacggacgagccatttggtcagccgacgttgagcggcatggcacaacactggtgacgcgcggaccggtcgcgctcgatttcggcgcgtgcggtaaggggtatttggtggatttgcttgcggggatgttgggtgatggcgcgggtcaccctcaacccattcaatacgtcatcgacgccgggggtgatttgctagtgcacacggacgaaccaatcaccatcgcccttgaagatcctgccgatccggccaacgccgtaggtacggtcgaaatcagccacggcgcattctgcgcgagctcccccagccgccgccactggtctgacgccgcaggtcaccaacttcaccatctgctcaacgccatcgacggactaccggttgacgatgtagccgccacatgggtggccgtcacgccgccatcgagcgccataaccacgaagacatcgacgcatggcagcaatgcctcgacaacggcaaaccgcgataccgacgattcgtcgaacaccgttgcggcacacgtccctgtcacactggccgacggcctcgccaccgccctgttcaccaccccggccacccagctgcgcgctcacttccccttcgaatgcgccattctcaacgccaaccgcaccgccgcccaatcccccaattttcccggcggctttttcacacactaatgtacgaaatcatcagtatcacatccctcgggtggaccgatgggttgctcccctcagtcagctacgctgacagctcccctcggagaggggagccgagtatagctaatccgctaatccgctaacgcaggaaacaatccgtcagtcagcgagtgcgaactggctgttgtagaggtcggcgtaaaaaccgcccgccgccagcagctcgtcgtgcgtgccgcgctcgatcacgtcgccgtggttcatgacgagaatcatgtcggcgtcgcgaatcgtggagaggcggtgcgcgatcacaaagctcgtacgccccacggtcagtgcgtccatggccttctggatcagctcttcggtgcgggtatcgaccgaggaggtggcctcgtcgagaatcagaatcggcgcgtcctgcaccatcgcacgggcgatggtcagcagctgcttctggccctgggagagcgacgacttgtcgtcgagcacggtgtcatagccgtccggcagcgagcggatgaagtggtcgaggcccacggccttgcacgcatcctcgatctgcttgttggtcacgccgggcttggagtaggcgatgttctcgcgcacagtgccgcggaacacccacgtatcctgcagcaccatggagaactggtcgtgcacgttccagcgcggcacggacttggtgtccacgccgtcaatcgcaatcgagccgccggaaatctcatagaagcgcatgagcaggttgaccatggtggtcttgccggcaccggtcgggccgacgatggcgaccttctgcccggccttgacggaggcggagaagtcgtggatgatcggcttgcccggttcgtaaccgaactgtacgtggctgaattccacgtcgcccttcacttcgtggccgttggtcccaagcaaagcggacttgccggattcgtcctccatctccggctcctcaaggaagccgaacacgcgttcggcggccgccgcgcaacgctgcaggttctggaaggcctgggcgaactgcgccaacggctgggtgaacagacggacatacatcatgaacgccacgatcacgccgaactcgatctgcccgtcgagcgcgagcgccgcgcccaccacgcacaccaccacgtagccgaagttgcccacgaaattcatgagcggcatcatcaggccggagaggaactgcgacttccagccggactcgtagaggtccgagttgtacttctcgaagcgacgaatcgaatcggcctcgccgttgtatgccttgacgatgaggtgaccggcgtacatctcctccacgtggccgttgacgtcacccagcgccatctgctgccgggcgaagtacttctgggaggacttcatgatggccatcatgatgatcaggccgatgaggctggcaccgatggcgcacagggtcatgatcacgttgttgtagaacatcatcaccagcgcgcccacgaacagcgtcaccgaggtaatcagcgagccgagcgactggcccagcgtctggccgatggcgtccacatcgttggtgatgcgcgacagcacgtcgccgtagctaaccttgtcgaagtatttgagcggcagtttgttgattttgaccgaaatggactcgcgcagtcgctgggcggtgcgctgggtgacgttggccatcatccagctttgcacgtagccgagcacggcgtagcccacgtacagggccaccaaagtccaggcgatgtggcccaccgtgccgaaatctaccgagttcatcaccggtctgccgttgacgatggcgggcagacctttgacgatctcgttggtcatgtccttgagcctgtccgggccgacgatctggcagacagtgccggccgcgcccaggatgagcgcgatgatgatgacgggaagatagttgcggcagtagttcacgagtttgcccatgactttgccgaaatcatggggcttttcgacggcacgcctgccgcccattggtcctcttggcatttgttttactccttaaaagtccgtattgacctccctctgatgagggaggtggcgcgaagcgccggagggagagaagccgtacgcgactacccctcagtcagctgtgctgttttattcgctcgcttatcagctcgtcttcgcctgggaacagcccactgggctgttccctttacggctcagcccctgacatggggagctaccgctgccgcccccctacgccgtaagctccgactggctgagctgggattcggcgatctggcggtatacgtcgcagtgttcgagcagttcccggtgcgtgccctggcccacgaccttgccgtcgtcgagcacgacgatgcggtcggcgttcatgatggtgccgatgcgctgggccacgatgagcttggtggaatccttggcctcgcgggcgagcgcgtcgcgcacttcgcggtcggtcttgaagtcgagcgcggagaacgagtcgtcgaagatcaggatctccggatgccggtacaccgcgcgcgcgatggacagtcgctgcttctggccgccggacacgttcgagccgccctgtgcgatcgcggcggcgtatccgccgtccatgcgcgccacgaattcgctggcctgcgccacgtcggcggcggccttgacgcgctccatccgctcggccggcaggccggcgtcctgcgcggccttgtccgcggcgagcagtgcggtctcgtgcttgcggccggaggcggtggagctgtccgtcatctcgacttccgccgggtcgcccggctgatcgccgtagctcacgttggaggccacggtgcccttgaacagcacggactgctgtggcacgtagccgatcttgtcgcgcagggtcttcaggtcgtagtcgcgcacgtccacgccgtcgaccagcacctggccttcgctgacgtcatagaagcgcggcacgaggttgatcagcgacgatttgccggagccggtggagccgatgaacgccacggtctggccttgcgtggcggtgaagctgatgccttcgagcatcgcttcgcgcgagtccgggtaggtgaagccgacgttgcggaattccacggtgccgcgctggccggtcttggccacgtcggcggcggtcttggtgccgttgccgacgatcggctcggtgtcgagcacttccatgatgcgctgcgccgaaacgtcggcgcgcggccagagcacgaacaccatgctcatgagcaggaagctcatgatgacctgcacggagtagttggagaacacgaccatgttggagaacacggtgagcttgtccttgagcccggcggcgtcgatcaggtaggcgccgatccagtagacggcgagcatcagaccattcaggacggtgttcatcagcggcatcatgaacgccatgacgcggttggtgaacagctgggtttcggtgaggtccttgttggccttggtgaacttggactcctggtagtcctcggcattgtaggcgcgcaccacgcgcaggccggtgaggttttcgcgggccacgaggttgatgttgtcggtcagggcctgcatcgccttgaacttcggcatgaccatggccatcatgatggtgatggacaccagcaggaccgccacggcgatgccggtggcgagcgtccattcgaagccttcgccggcgatcttgcatacggcccatacggccatgatcggcgacttgacgatgagctgcagacccatggtgatgaacatctgcacctgcgtgatgtcgttggtggagcgggtgatgaggctggccgtggagaacttgctcatctcggccggtccgaaggattcgaccttgcggaattcgagcgagcgcagacgctgggtgaacgaggcggccacgcgcgcggctatgtagccggtgacgacggcgcacgccacggagccgagcgagatgagcagcatcttgccgcccgcgatccagatgtccttcatgtcgctgcccggcgtctcgaccaaggtggtgatgtctgacatgtagtcgggcagtttcaggtcgaagtagacctgcccgacaatggtcagcagggcgacgagcatctgaccgatctccgctttggagaggtatttcatgatgcggaacattgatttccccttgtattggtgtggttgacgtgaatgtggtgtggtgttcggttggttggattagtggtgttgatcggtttccgttgtctgaatagtttccacggtttggttacttacactgtgagatattacgcatgactctgggcattcgctgtgagcccccgggattacgctctgcgctcaaccgaggggcgaacggggccgcccgcgtccggcgcggggcagacagagcctctactgttcgtcgctccgcgcccgtccgtccggcatatgctcggccacgcgccggtcccgctcggcgaacgcctcgctcacctgctccgcggtcggcctcggctggcccggatggcagatcgacatgtatgtggtgaattccgagagcaattcgacgaacgcgcgcgtgcgccgctcccccatctgcgagaagatccagcagatcgccgaacgcatctcgtccatcatccggcgggactgctcgcggccggaatcggtaaggttcacgcggatgatgcggcgatcctcggggtcgatgtcacgcgtgacccagcctttcttctccaacgccgacaacaccgtggagatgcggccggaactggtctggagcgcggcggccagctgcgatggcgactgggttcccttgatggacagctcccggagcacgaactgctcgccgtgggccccgcgggtgaattccctctgcatcttcgaacggttgccgcatacgctggcatacagttcgctgaccgcctcctgttcgaatcccatgcgggcaccatccgtttccgttcattgtgcggcgcagcgccgcggacgcctccacaatagctcacaccgtaaacaattcaacaccgcaagccaattatcggcgccgcagggcggggcggcgcggcggtgaaccccggagccccgtcaccgtccgcggttcagcgcggccttgagatcacggctgcggtaatgctcgcgcagtacggagaacccgccgaacccgatcagccacaccagaccggcgatggccgaactgcgggtgtcgtccgccaggaacagcgtcaggtagatgaacacgaagaacacgatcgccaccgtgttgagcaccttccacgcgggcatgacgaacccgtccgcgatgaaatcggcggaacggcgatacctgcgatgcgccagcagcgtcaggatgtagatgaacaggaacaccgcggagctggcggacgagaacagcacgaacgcccccgagatgccggggatggcgttgacgatcggcgacagcaggatcagcgccgcggacaccaggatggcgcgggccggcaccttgcgggcggacaccttgccgagcttgttcagcatcgggttcggcgacacctcggacagctggtacaggtggcggccggcggaatacaacagcgaattgagcgacgaggacgcggcggtgatcaccacgaagaacaccagggcggacgcccagttcaacccggcatactggaacaccatgatgaacggggaggcgaaggagccgtcctcgttcggcttgaacgaggtccacggcacgatgcacatgatggccacgagcgcgcccacgtagaagatgagcacacgcacgatgatctcgttgacggctttgggcagcacctcacgaggattcttggtctcggagacggtgacgcccacgaactcgagcagctcataggcgaagaacaccatctggaagctcatgaggaaggccatccagccgttcggggcgaacgagaagccggagaacaggttgtcgagtccggcgtggcccgccgggctcacatgatccacgccatgaatccgcgcggccgggtaatggtagccgatcacgatcatgaccacggcggtgacgatcatcgcgccgatcagcgtgatcttgatcatcgagaaccagaattccacctcaccgaacaccttgacggcgatcaggttgacggacaccagcgacaccaggaaacacagttcgatcagccatttccaatgggtcaggtcgatgccgaacgtgtcgaagaaggtgatgaagtacgtggagacggccgtgatctcggtcatgcccaacagcacgagcgcggcccaatacgtccagccggcgaaatgcccccatccgttgcccaggtagcgggtgatgaaattgatgaaggtgtgctggctggggtcgcggtacatcatctcgccgatggcgcgcatcaggaagaacatgatgacgccgaccaggatatacacgaagacgatcgaggggccggtcagcgccagcgacttgccggaccccaggaacaatccggtgccgatggtgccgccgatggcgatgaactgcacgtggcggttgttcaggccgcgctccatctcgttggtccggtccaggctttcgacagacttgagtttgcccgtagcctgctgtgtaccaccattcacattcgtatcggccatactgatttcatttctcttctccgccgcccgattgttacgcaccggacgcgatactcgttcaaaacaagttcagactgtatcaccgaaatatgtcacgaaaacgctcagctcaagaatacatgcgatgatgctgtaagtattccgccaaaaagttcaattcaccaacaccaaattgaacttttgtctctattccacggacttgagcgagctgaccgggtctacacgatcgagcactgggttggtgaacagctgcaccagcagcgcgaacgccagcgtcgccaccacggcaatcgcatagctgtaccagtgcacttccacttcgaaatacagcgacggcatattcaacgcagcagtcagtaatccgcctatccacctgccaagcggcagaccaaccaccacacccataccggtcaatatcatcatctcgcggttcacgtagttgtgcacctcgcggtcatagaagcccagcaccttcagtgtggccatctcgcggatgcgttcggacacgttcgtattggccaacgtaaacagcaccaccagcgccagaccgccggcgagccccacaatcagcgccaccacggcacccatcagatcgaacttaaacgtggcggccagatgcgcacagctcacggccttgagcaccgacgattcctcgcccaaccgatccgcatattcggcctgttcggtctcggaacctttcagcttgacgagcatcgcgttccacgtcaaggtcgaggcagtgccatcccccgaagccgaagacgtcacaccgtcggccgaaaacttctggtcgtacagtcgctcactgatgtacacatcagagccaacaagattgcgcgtcacggctgcgacctgcaccttggcccggctgctgccgccattgcccagcgtgacggtgtcgccggcatgaatattcagcgagttggcggcggactgcgacacaatcacgccactatcgtccaacgctacagtgccaccacccgctttgccgaagatattgggcagtccgagccattcatcatcgccggcttgttccaacgtgaccatatcgttcaagatattcagcgaatcgttgggcacggtcatcagctgcacggtttcgctttcctgcgccgcattgctcatttcgccgctatccacgcgcagattcagcgtttcggtggcctggccatcttctgtcacctgcttgcgcatcgcggcggcgttatcgtcattggccaccaccatcaagtcatactggtagatctgctcatattgcttgacgccaatcgtgtcgacggtgtcgttaatcgcaaatccgcagataatcagcgctgtgcaaccggccacgccgcccacggtcataatcaaacgtgacttgaatcgaaagatattgcgcgcagtgactttgccgaggaagttcagccggctccataccgggcgaattcgctccaacaatatgcgagcgcccgtcttcggcgccttcggccgcatcagcgcggcgggcgtgtgccgtatctcctcgcggcaggcgagcgcggtgaccactcccacaccgaccacgaacagcacgatgccggccgagccgtacagccagtcgtattcaagtcgcacaccgggcaatatatacagtccctcaatcaccaccagcaggaatgccgggatgccgaggaatccgaccaacagaccgatgccgccgccgaccaggcaggcgagcaacgcgaacagcagataccggctggacacggcgagtccgccatagccgaggccaaggtaggtgccgatgagtccgcgatcttcctcgaccatgcgggtcatggtggtcaggctcatgagcacggcgaccaacaggaacacaatcgggaatgcgcggccgatggattcgatggaactgacatctgatttgagcgagctgaatccgtcgatcgaggcgcgcgtctgcacataccaacgtgcgttggccacatcgtcgatgcgccgttgctgcttggcgaactcgctttccgcttcgcttcgcatcgcatcgagtgcagactgcgcatcatccagtttcgccttgccgtccgcgagctgttgttcgccttctttcagctgccgctcgccttcttcgagctgctgcttgccgctggccagttgggcggcctgcgcttcaagttgcgccgactgggtttcgagggttgcggcattcgcttcgagttccgcggatttggtattgagctgtgcctctcctgcagccacttcctgttccttggcggtcagttgcgcgttctgctggtccaaggtggattgtgcgggggcaatggtttcgtttaatgtgcgctgcaaatcggctttctgctgggtcagaccgtctcgctgcgtttgcagttccgtttgcttggcggccagctgttgccgcagctcactgattgacggcacttcaggcagggtaatgccaaggcgcgcgagcagttgcttgatggcctgccatgtgggtgagttgaggtcgatattcgggtcaagttgcgccagtagattgtcggcctgttgaatcatggacagcatctgatcaatttgcgccacgccttggtcgatttgggtaatgccctgttcgattttcgtgcgattggcggtcagttccgtttgcgccgcatcgagctgtttgcgagccgaggtgagctgcgttttgcctgattcgagctgggtgcgcgcttcggctatctgctggcgaccttgcgcgatctgttgacgggccgatgcaatctgcgcacgtccatcggcgagctgccgttcgccatcggtaatggttgtcctgttgttctccaattcggtacggctatcttgcaatgtcgtttcgttggcttccagctcggcccagttgtcgtcgatctgcttctgggcttcgtccagctgctcgttggcctcgtctttggcatcgtccagtctgcgctgcgcgctggagacgatctgttgacgacgggctttctggcgtgtggcctgtatctgatgctcgatacggtcggccacggttttgacggcttcatcgtaggcatcggaaaacgtgtcaaaatcggacgcaccagtgacggcaaccgatatcgcagtgtatatattgccggtcacgccgtcgctgggtgcaaagaacgtatagtcctcggatgaggtggaccggaaggaggtcatgcccgaatagccgtctggattgttgaggtcgcgcgggtcgagtacgacgccggtgatggtgagtttcgtggggaactgcggggattgctcggcgtcggcgtccgtattggcgtcggacttcgcatcggatgcccaggcattggcggcgacacctaccgtatcggcattcttggaatcgtcattggaatcattattggcatcgtcagtctccgtggccgctaccgatatgacggatgaagaggtgtcttgtggcgtcacagtaatggtgccgccaatcttgagtccgctatcgttcaggaattgctgcgtaaccgccacttcgccggccttgttcggcagtttgccctgccgtatgtacggctgatcaagcccttcggcaccgatttcctgcatggtcacggttttcttggtgccgtccaccaacgtggtcaccgtctgagaacgttcgggctgcacggtttgcacaccgtcgattcggcgcagtgccgctgcatcatcaccggtcaggccgtatgtggatagcacctgcaggtcatgcagtccctgctgatcgtaaaaacgaccggccgccagaaaagcatcgcggcatccggcgtagatgccggtcagcacggccacgccaagcagcgtaatgacggcgatcgagacgaacctcttccagctgcgcagccagcaacgcaacgtatctttggcaaataccgcagaaacgcccgctcctcgaccgccgctatcgtcgaggttccgccgtttcacagaatgtttcacaggttgtttcacgaatcgcctcgcttgtttcacggggcgtttcacagagtgtcttgcagtgagcatcgccaatcacctaccattcgatatcggcgatgggctgcggcgttgcgttgacctcctcgctggtcaccttgccggagcggaagcgaatcactttatgagccatcggtgcaagcgcggaattatgcgtgatgatcatcacggtcatgccttgcgtttggcaaatatcctgcagcagctgcagtacttccttaccggtctcgtaatcgagcgcaccggtcggctcgtcacacaacagcagcttcggctttttggcaatcgcgcgggcgatggatacacgctgttgttcgccgccggacagttgcgccgggaagttccccatgcgctcccccaacccgaccttgcacaaggtttccaccgggtcgaaatggtcgggacaaatctgtgaggcaagctccacgttttccagcgcggtaaggttcggcacaagattgtagaactggaaaacgaagccgatgtcgttgcgccggtaggtcaccaaatcgcgcttgcgcaatccggtgatatcgcgatcgcccacaataacacggccggaagtcgcggtatccatgccgcccagaatgttcaacgccgtggtcttgcctgcacccgactggccgaggatgacgcttagctcaccttgatcggcggtgaaactcgcctcgtcgagcgctcgaatcacactgctgccggaggggtattccttgaccacatgatcgaattcgatatacgccatcacgcacctccgacagttcccaccacggcgcgtcacatcggcgaagccgtctgcgttcccttgttcccttccagtaaaacaacaccatgacggttgcgcaaccagcatacggatcgtgagtcgccggtctcgcccagtggcggtgggcgttgccatcacgccatacggcgttttacaatggcgggcatcgcgcatggcggggtcgccatccatgccgatagtcagaggaacctggggaagggcatcatgagcaccaacgatacgtccgaacaaccgcgcgaaaccgacgatgtgccggtgccggccacgctgcgcaagtcactgaagaaccgtcatatccagctgattgcactgggcggcgccatcggaaccggcctgttctatggttccagcgaagccatcgcgctggccggcccctcgattctgctcgcctacttggtcggcggcttcgcaatcttcatgatcgtgcgcgcgctgagcgaaatgtccgttgaggatccggaggcgggcgcgttcagctactacgccactcgctactggtccaagcgcgccggcttcatctccggttggaactactggttcaattacatcctcgtctcgatggtggagctgtcagtggtgggttcgtttgtgaactactggttcccggcgattccgacatgggtgtcggcggccgtgttcttggtgattatctgcgccgccaacctgctgggcgtctccaagttcggcgagttcgagttctggttcgccattatcaagattgtggccgtgatcgccatgattatcggcggtctggccgtcatcatcttcgctctgcccaccacatccggtatcaaagcgagctttgccaactggttcaccttggaagggggcttcttcccgaacggtctcatggagcagactaaggacggcacctggaccggtctgttgatggcgcttgtcgtggtgatgttcagcttcggcggcaccgagctcatcggcatcaccgccggcgaaaccgaggaccctcgtcgtacgattccccgcgccaccaatgacattatctggcgaattctcgtgttctacattggcgcgctcggcgtaatcatggccgtaataccgtggaacaccatcggcggagacgatgctcccagcccgttcgtgcaaatcttcgattccgtgggcatccacgcggccgccggcatcctcaacttcgtgtgcctgaccgccgtgatgagcgtctacaactccggcctgtacgccaactcccgcatgctgtattcgctggccaagcaaggcaatgcgcccgcgtatctgggcaagctcaacgctaagggcgtgccggtggccggcgtgctgacgtccgccgtgatcaccgccatcgccgtggtcgtggtgttcgtgtggcccgagttcgcgttcaactatctgatgtcgattgccaccatcgccggcatcatcaactggacgatgatcatgttcaccgaaatgaagttccgtaaggtggtcgccacgggcggcgctcccgaggattccgagctggccggcaagtccggcaaggaagcgctcgacgcgattcacttcaagctgccgttcgctaaggtgaccccgtgggtggtgttggcgttcctggcactggtggtggtgctcatgtgcttctccgccagctaccgcgtcgccgtcatcgccggcgtgatttggctcgccattctctttgcggcctaccagctcactcaggcgaagaagtagagtctcatttgcgaatagctctcagaatacgccgcttgacatttgcatctatggtctcatttgggtcaaattcctctaggtaacgcgggataccgcccagtatcgcgtaggccagcgccttatcctcgttgactgtccgctagctgcttagcgttgcatactatcgggagaatccacaggatcggcgagatatggcttgaagacgcgctcggtgacggggatatggagcatcagcatggtgccgtaaccaaggatcaccagcaggaacagtccaccgggcatgtagaaccagctggccaccagcagcgccacgaacacggcatccacgatgaccagggccacggtcatcgcgatgtgggagatgccgaagatgaaggcgttcttcaaggtgccggccgcggtgttctcgaagcgtgcctgaagcgcgaacacccattcgaagccgataagccagaggatggtcagcgcgaatttgatgatgagcagcggcgtgatctgcaggacgatccatgaccagaccagtgcaatcagcaccaccaagaacggcagccacagcagcgtggctttgatgaagttggttttgaatgacttgaagtagttggcggttacgcctttgccctcgccctcgatggagcggcggcaagcatcatggccggcagtcagggccgcaccgatggtgatgagcggaatcgaagtgaccagcatcagaatgttgatccatacgccgtcaacaagattgctccacgcgcgcatgaatttcgagtccggtgccagccagttcatcaactactccttgtgctgctcttggctcccctcaaggaggggagccagattgtcgggctcaacccttgaccgctccgccttcggccctgcaattacggactcgcctacgacgaggctcatcattagcttcgccgctgtcgcggctcagcctggagcctgctggaagcccactgggcttccagccatgggctgacgacgcgagtcgtcagcccttgacggctcccgccatgacaccagagactatatacttctggcataccaagtagaagacgatgatggggatgattgccagcaccaggcaggccatcatggcgcccatatccacggaaccgtagccgcccttgaggtattgcacggcgaccgagatggtcttgtacttgccgaggtcgagcgtcaggtacggcagcaggtaatcgttccagatccacatggcttcgaggatggccaccgagacgatcgacggcttcatgatcggcaccacgatctggaagaagatgcgcggcactgacgcgccgtcgatcatggcggactcctcaagctcctgcgggatgcccttgatcacgccggtgaagatgaacacggccagaccggccccgaaaccgaggtacacgatgcacaggccccacggggtattgagcttcagcatgtcggcgatcttggagagggtgaacatcaccatctggaacggcacgatcatgttgaacaggaacagggtgtagagcagcttcgcagcccagttgttcacgcgcacgatccaccatgcgcacatcgaggtgcacaccagaatcagcaccaccgagccgacggtgataagcagcgtccagccgaaggaggcgaagaactgcgtggtctcgatgccgcgcacatagttctcaagtcctacaaacgccttgccggcaggcagggagaaggcgttcttggagatgtacgccttctgcttgaaggagttgatcagcaccaggacgatcgggaaaacccagaacagggagacgacggcaaacagcacagtccataatgcgccatgcttcacaggcttgttctcgttcatcaggctgccacctccttgctcgtggtgagcttgttctgaatcagggcgatgacagcgaccaggatgaagaacagcacggcctttgcctggccgacgccttcccagcccatacggccgtagaaggtgcgggtgatgttcagcgccagaccttcagacatgttgctcggcgcaccgttggtcaatgcgaggttctgatcgtagagcttgaaaccgttggtcacggtcaggaaggagcacacggtgatggacggcatcatcagcgggatgatgatgcggaacatggtctgccgtccgttggcgccgtccacggccgcggcctccagcacatcggtgggcagggcctgcaggccggcgatgtagatgatcatcatgtagccgatctgctgccagcacaccaggatgaccaagccccagaacccgtaggacgccttataggtcagggcgcggccccagtgggccagtacgccgttcaggagcagcagccagatgtagcccaggatgatgccgccgataaggttcggcatgaagaataccgagcggaacagcgtggagcccttgatcgccttggtcagcatgtaggcgatggcgaaggcgatcacgttgatcacgatggtggtcacgatggtaaacgcggtggagaagccgagcgcgtgcaggaattccttgtctttcaacgctttgccatagttcttaagccccacccattcaccgtcggtaacggtggtgaattcgcagaagcttaagtagacgcccatgatgaagggcaccaggaacccgatgatgaatgcggcgaatgtggggagcgcgaacagcgcccaccatctgcgtatcgccttgccagccatgctgatcatgacttttcctcctccttgagtccgctgcgttgcgacactgcatcgtgcgccggctgcggagttcaactcaatgcgagcctgccgatcgagaaccgcatgcacggcctgttctcgttcaagcctatgttcatagtaaacgtcgaatcattatatgtcaaacgttgtcattttcagcgtttcaatctcgagcatactccagctccagcaatcttctttcaactaagataatggctatataaagccaatctgacgccgtcatagacactttgcaaacgtttgtaatacaatcgttgtcatcgccgcaaatcaatcaatcagcatgtacactgtagtcagttgtgcatgtgtattgcgattttccattcaacgcaagggggctgcaatggctacgagcattcaggatgtcgcccgcgaggccggcgtctccatctccaccgtctcacgttccttcaccagaccggatctggtgtcggccaagacccgcgagcgcgtgctcgccatcgccgacaaactcaatttctcactctcccgctcggctgcggccctgaaatccggccgcgccctgcgcatcgcagtactgatgagcggccatatccgcctgtggttcaccgcctcggtcatcgaggggctcaacgaggtgctgcacacgcagggctacgatatttcggtattccagatttccagcatcgaggagcgcaaggaattcttcgagatgttgccggtacgccgtaacgccgatgccgtgattgtggcgtctttcgatatcgacaacaacgaaatcgcgcaactggcttcggtcggcgtgccgatcgtcggcatcaattcagtcgagcccgaagcccgcggctttaccgccgccgtcaatatcgacgacgtgcagggctccacgctggccgcccgccatcttatcaatctcggacatcgccgcatcacctatatcagcaccaatcgcgaggtgtcgctgagcttctccgtgcaaagccgattcgactcattcaccgcctgctgccgcagggaaggcatcgagccgcaggtcatcgtctgcaaggtcgatgacgatggacgttatgaaatcagcgacgtggtcgaccaactcatgagccaagacgagatgcccaccgccatcgcatgccaggaggatggcatcgctttgccgcttatgttccagctggagcgcaatggattctccgtgcccggcgacgtctcgctggtcggctacgacgatagtttctacaccggcgatatcggcctgaccaccatccgccaggatccggtggaaatggcccgcgtggcagcccgcatgacgctcgatctcattgacgaaaagccgattgagcaaccctacatcgtgttcccggcccagctgaaggtccgctcctccacctcccgcgttaagtaggctcacacaacaaagcccaccatagaaaaagcgtgaggcaaccgcacaataacgctcaatcgcacattgtggagaatggcgaaaaatcgccgattcatggcctcacagcgtgcgattgagcgggtgcgtgcctcacacttttctgcggcggccgattttgtgcgagactcagcaatacaaagcggcgcccctggagaaggaaaggcaggggcgccgcggattgttgcttatcggctatgggactctatgagactcagtgcgaggcctcgtattcggaagcccaaccgtccacgaaggcggtcttgacggcatcccacttgccggtgccctgcgcgtactcgagcagcgcctggccgaccttgttcttccattcctcggacggcatcatggtgaagttccaagaaacctgggtcttgccggactcctggtcttccacggcggcctcggtcagcgggttgtcgcttttgacgtcatcgaaggtcttgaacggggtggtgaagcccatgtcctgagagagggccttcttgccggtatcagaggtgatcacccacttgaggaagtcctcggtggccttcttgtcggcgtcggaggccttgtcattgatgcaccagtagttctcggaaccggtggtcagaccctgcttctcctcgcccttgacgccgatgtagatcggcatcatgcctacctgatcggcggtcatgccggccttctgcaggtcggtccaggcccaggtgccgttctggtagaaggcggcctcgccgagcgcgaactcggagttcgcatcatctccggtcttggcgctcagctgggtgggttcggtggtggagtcggtgatgtacaggtcgaagatcttcttgtagttcggcaggtaggtgcccttgatcttggccggctgctcggtgacgttgtcgtccttgaactcgtagtaaagcggcagattggccaggtgggtcttgaagcgccagtcggagctggagtcgaagccggcggaggtgaacgcgcccttgatgccgagctcgtccttgcgggcctgcatgtcgtcggccacggccttcagggtgtcgaagttgtcgatttcgtccatggacgtggccttggcgccatccagcgcgaagtacttgttgaggatgtccttgttgtagatcaggccgtaggtttccatcacgtacggcacgccgaccaccttgtcgccatccttcagggccacatcctggttggcaagctccttgtacacatccgtattggacatgtcggcggtgtacttcttccagttctggtagccgaccgggccgttgacctggaacaaggtcggggcttcggttttggcgatttcggacttcagggtctgctcgtaggtaccggaggccgcggtctgcaccttgacctcaacgcccttttccttggtgtattccttggccagagcggtccactgatcagccgcttccggcttgaaattcaggtagtagaccttgcccttggcgtcatcgccggaggtcgagcttccgcaggccgccaaagcgccgagggacatcgcagcgacagccgccatcgcgactgctgacttgactgtacgattcatcatcgaacctttctctttcatcgtcgacccggccgtccccggtcaggacaggtacgctagcacgcacctttacgactatcgacatgcactattgtgcaacggtttgcttctttttgcaaacgatagcaatatcggcgcgtcataaatcatcattttcaggccattgtcaacaaatatcccattaattcagtcatttttgccgcattatcgcaatgcaagcgttcgcaactatgagagcgctaacatatctttcatggcaatcgattgccacttatacccatcaaaaaacaacacgacgacgctatcgtttgcaaatcatttatcgacataccgcaattcccgccacaaacaataaaggcccgcccgcagtagcgggcaggccagcgcaatcgcagcgcaaccggggctaggcgttccaccgttcgatgacgttatctcccttatagacgctgagcaccgagtagtgcgccgtatccaaacgcagcaaccgtgcgaaatgcgggtccacgcccagccattgcgaggtgaggatgcgcaggatgtgcgcatgagccaccaacagcacattatggccgtctttcagcagcggcgtaatctcgtcgatggcgctcttggcgcgtgccgccgcttcttccagcgtctcgccaggcccggcatggaccggcacctgttcgcccgaaggcaaggtctcgacccagtcgccctccagcgtgggcgtcagcgagcgcggcccgtcacgccacacatcccattcaaaaccgctggcctcactcacctgctggcgcgtacgcccctcggctcggccgtaatcccattcagcgatgccgtccaacacaccgtggtccgcaaaaccagccaattcagcggtttggcacgcccgcttcagcggactggaaaacacacagctctggctgaacccttcggggaaggcctcgcgcaggcgccttccggcatccgctgcctgctgctcgccgaccgcggtcaacgggatgtccgtgcgcccggtatactgcccggattcgctccacacggtctggccgtggcgcagcaacaccaaaaatccattgccgccacgagagttctcgacggcaacggtgccgttcacgttctgttcgctcatgcctccactctagtctgcgctcgttcatgactccaccattaacgcccatcttttgcgctgagatgattgagatgctattagactgagagtcatgagcgacgaaacgaacaccgacttcccctccagcgccgaccgcgcggtcgacagcctgcaccgcatcgacgagaaggtcaacaggctgcgcgaggaccggctcaacgaccctgattctctgggcgacaagctcatcaagtcggcagtcccagcgctggcaggcttggttgccggcaaagcattccagatgatatgggacaagggcacaagcaaacgcaatctgcgcaagggactggcggcagacgcgccgcaaagtctggcaatgagtctggcattcgccgccgtttcggccgcactcggcgcagtggtttcgcagctgtcggatcggggctccaaggcgttcgtcgaccaccgccatcgcaagcccagccgctaatcccccggttggatgatggtttctgttggctgactgatgactcatcgctggaatttcgtcaaggaaccatcagtcaatcgacaggaaccatcagtccagcacagttccgccacacaatatcggcatttcactgtgaggtaatccaccgtggcgtccggcgtctgccgtgcgacaaaagccatggttaccaacgcaacaatcgaggctcttctgggccgccgctccatccataagttcaaggacgaggccatcgacgacgatacccgcgccacgctcgaaaccgtcgcccaacatgccgcgtccagccagttccttaacgactggtccgccatccgtatcaccgacccggccaccaaagccaagctcgccgaattcggccatcagccgtatatcgccaccgcgccgttgctgtacgtgttcgtcatcgacgagcaccgcaacgcacgcatcgccgaacgcaagggtatcgatcccgcttccgacgaattccatctcaagtacagctatcgcttcacccaagctcagaacgacgccgtgctggccctgcacgccatggagaccgccgcctattcgctgggactgggctgcgtgattctcggctctctgctcaacaacatccccggccttatcgacgtgctgaatctgccggaatacacgtatccggtgctgggtctggccatcggcaagcccgatcagaacccgaccgtcaagccgcgcatgccgcgcacgatgcagttcttcgagaacacctacccggctgacgccgatggcgtactcgaccagctgcccgccttcgacgaggaagttcaccggtactacgatctgcgccaagccgaccgtccggtggacgctttcagcgatcaggtcgccacgatcagtcggcaggatgtcagccatcagacactggtcgacaaggccgccgctcagggcttccgtctggatcagtgagaccagaaccaacgagatagcctcggataggctcgtcactgagtcgtctcggtctcagcactgcgacgactcagttccaacacctcaacatttcatcaccggataccggcaaaattgcacaaccatcccgccggtgtcgcaccatcaacaaacgttcacatatcagtcccattatgcggacaaccaacggccagttttgcaagaaaacccgccaaaccagcagtatccgcaccagtggtgggaatagactgcatgtggccgcaatgactacgaaccggaaaagagggactggatgcggacggtttggcaagtctttctacgcgattgcagacgtatcttacgcaatcccgttgccgttgtggtgacgctcggcgtagcaatgctgccctcgctgtacgcatggttcaacattctcgccaactgggatccctattcagccaccggcaatctgcaagtggccgtagccaatgaagaccaaggcaccaccaacgatctggtcggccatctcgatgcgggccggcaggtcgtcaagaaactcaagcagaacgacgaactcggctggcgcttcgtagacaatgaggaacaggccgtccacggcgtggagaccggcggatactatgcagccatcgtgctgcccaaggatttcagcgccagcttggtcgaatcggtgaccggaacctccaaacagccgaaaatcaagtattacgtcaacgagaagaagaacgcgatcgcgccgaaaatcaccgacaccggcgccaccaccatcgatgagcagatcaactccgccttcgtcaccacggtagccaccaccgttgcctcggccatttccgaaaccggagacgatctcggccaagccactggcaaagtccagcacgatacgatcgatgatctcaatacggtgatgtccacgctgaacaccgttcaggattcactcaccgacttacaggacacgctggcccaatcagacacgattctcgccgacgccaaacagaccaccgcctcactcaagcagaccgtcgcggccgcgcagaatgcctcccgccagtccggcacactgttggcggaaacacaggccgggtcacaagccttctccaccacactggtcggcgcgctcgacagcagttcagcacaactctccggactggccgtccacgtcaacaacgccgccggcagcatcaccggctccttcaacagcgcgcagaactccgtcgacaccatcaccaacacactttcggccccactgaacgccacccaaacgtcaatcagcgatctgaaagacgcgctgaccaaagccggcatcggcaaagacaccaccgacccggtcggccagaacatctggaaacaaatcgatgcgctcgactcattgatcagcaaacagcagacacagctcaacaccttccataccgacaccacacagttcatcaactccggcaaagacgccaccacgaacctttccggagccatgaccaacaccaccaccggcggcatcgcggcgctgaataccgcgcgcggctcgctgaccggcaccgtaatgccgtcgctcacctcatcattgaacagtttcgccgccctgaacggcacgctggatggcacgttgacttcgttgtccggcaccttggatcaggccgacgggctgttcgaccagcttgtcgataccctgaaccaaacgaaaaccaccatcagcagcacgcaggattcgctgcgccaggcggccagcgatgtcgccaccgtacgcaccgatatcgccacgctcgatagttccgccgcttaccagaaaatccgggatacgctgcatctggatgacaagggattcggcgagttcatgggcaatcccgtcaccctgaccacgaaagtcgtgtacgccaccgacaattacgggtccgcagtcaccccgttctacacgaatctggcactgtgggtaggcggtttcgtgctgattgccatctacaagcttgaggtcgaccgcaaaggcattcgccgtatcaccgctacgcaagcatatcttggccgctggctgctgctggtcaccatcggattcctgcaagccatcatcgccaccattggcgatctggtgctcggcatccaatgcgagcatccgctgctgttcatcttggccggaatcttctgttcgttcgtctacatcaacattatttacgcgctggccgtggcgttccgccatatcggcaaagccatcgccgtaattctggtcattgtgcagatacccggtgcctccggcctgtatccgattgaaatgatgccgaacttcttccgcgaactgcacccatggctgccctttacctacggcatcaacgcgatgcgcggcccgatcgccggcctgtacgcgaaccattactggctcgacatgctgcacctgttctggtatctgccggcagcgcttttcgtgggacttgtcgtacgccggtatgcgatgaacctgaacgcgctgttcgaccatcgtttgggagataccgacctgatgatcaccgagcacaacagcatggtgaacgaacaggtgagcttgaactccgtattccgcacggtgtccgacagcaaggaactgcgcgatatcatcgctcatcgcgcgcaccggttcttcgcgcggtacccaaagatgatcgttgccggtctgacattgctgaccgtactcccgttcgtattcctggtactgctgttcgtcacccaagagaaaatcgccatgctgacctcctggattctgtcgattattcttatcgacgtctatctcattgtggttgaatacgcacgcgaaacctacgccatgcagcttggcgtcagtgccatgagtgccgacgagttccgcaatgtgatgctcaacggatatgtgtggcggcgtttccacggccacggacgtcacgaagcggcgatgggcagcaatccggatatcggcgaaaccactgaacgactcacactgttcggcgatcaggccgccgagccgactacgcacaccgcacagttcgagcagtccggtcagtccgggcagtccggtcagtccgggcagtccggtcagtctgggcagtctgggcaaggaggcgcacgatgaagcttatctggaaaatattcgtacgtgacgtgcgccaagccacccgcaatgtgatcgccgtaatcgtggctatgggattggtgattgtgccggcactgtacgcctggtacaacatcgccgccagctgggacccgtacggcaacaccaaggccttgaaggtcgccgtggcaaacgtggataagggctataagtccgatctgatgccgatcaccatcaacgtcggcgaaaccgtgaccaatacgctcagggccaatcatgaccttgactggcagtttgtggatcgtgctaaggccatcgatggcgtgaactcaggcgaatactatgccgcgctgattattccaaagagcttcagctccgatatgatgacgctgttttcaccgaagatcaagcacgccaagctcgaatactatctcaatgagaaaatcaatccgatcgctccgcatatcaccgaccagggtgctaccaccgtggccacgaccatcgaccagacatttgtgaagaccttggcgagcgtggcgctggatttggtttccaacgtggccgattacgcgcaaagcccgcaaatggagcagtacgtcaacaacgcctccagtcatattgccaccatgtcatctcgtttgaccggcactgcgtcgcagatggattcctatgccaatctgctcggggccgccaacagcatcattgattccaccgataagctgctgggatcaacaggctcagctgcggccacaaccaaaaaggcgttgaaacagacccgcaacggcgtctccagcctcgacaaggcattgtccggagccaccgatggcgtcggtacggcattgcagcaggccggttcatcctacgacaccattgccaagcagatcgatgccgcttttgccgatgtgggctcacaatcctcgcagatatcaaacaagctgaccgatatgcaatccaaagtggaggctcaggccgacagctttggaaagtatgccgccgctttacgagatctcgccaaacaagcggcttcactgcccgtgggcggagataccgttgccgctcaactgaacgcggctgcagaccaagccacaaaggcgcagcagagcatgcagcaagccgccaccgcgttgggcgatgcggccacgcacatagcaaatggtactgccgatgccgatacagcgcgtcgagatctgaaatcacaaatcgccgccgccaaacaatcgattactcaggcttcagacacgtacaagagcacgctgaaaccgcaactgaacaatctgacctcgtccatggacgaagtggccacgcaggcaagttccgtaatcgacgggcttgcgtcgaccgtcagcagcgtgtcaggtctttctggcggcgtttcagacagcctgacggatatccagtcggccttgactgacgcagctagcgctttgacccgttcggcgaagaaactcgacaacttgtcttcccaactcgcctctatcaccagtggcggcaccaacgacctgtctgtgatttcctctgcgaagcccgatgccattgcttccatgctggcggcacccgtagcggtcgaccgcatcgcgctctatcccgttgccaactatggttccgcgatggctccgttctacacgattctgtctatctgggtcggtgcgatcattctggtcgccatgttgaaagtatcgatttccgaccatgagaaggcccgtatcttagggttgggcaatgatctgccgctcggttcgggagtgggtcttcgcgaggccatgattgccgggcggattgccggaccggccgccgcgttggatgtgctgaagaagccgcgtgccgagtcttccggcaatgcgcggcagttcggtttacgcttgcgccacgaatatttcggccgatacatgattttcggtttccttgctttgctgcaaggtacgctggtgtgcctgggcgatatgttctatctcggcgtgcagtgtgagcatccgattcagtttttgatggtcgggtggttgtctgcactggtgttctcgaatattgtgtatacgctggccctatcgttcggtgatatcggcaaagccattgccgtagtactgctggttatgcaggtagccggttccggcggcacattccccattgaaacactgccgacgttcttccaggtcgtttctaaatggctactgttcccctatgcggtggatgcgatgcattcggccatggcgggctcattcggcatggaatactgggtttccatgggcaaactggcactgttccttgttccctcattgctgttgggacttatgttgcgcaagccggtaattcgcttcaacgattgggttatccgcaaccttgaaagcaccaaggtgatgtgagtgttggacggagtgtgtccgagcgccctgaacgcttagcagcctacgacctggcgtgtttggaccgtaacctgcctcagatacggcgttggcgaggcctgtggagcttctgacgctaacgtctacgtggcttgtagccctttttacgactgtgtggcttgagttgctggttcagcggtacatgccggtaactggattgtggatcgcgatgtgtgaggtgccagcatccgcaatattcgcaacggtacacccatagctcggctccacgctcgatcaggctttgatcagcggcacgctgagcctgcgccttatcgtggtacatgattttattcgacgtggcgcaacgtttaggggtgaagtaatgcatagcagaagccagtgtagagcgaccccataaccaagccagtttctggctcccctctggaggggagctgtctgcgcggcggaccgggggggccgggcgtcgggctcccacggtcgcggacgcgccgcgccgttcgccctcgccgtcggggctggccgggaatggtcccgggcgtgggtctcatgggtatgcggggaggtcccggtgcccgtgcgggttcgggccggggccggttccggatatagggaaagccccttggggcgtgtgctccgaggggcttcctgtacgtgtggtgcggcggcgtgctactctcccacaccctgtcgggtgcagtaccatcgccgtgccaggccttagcttc

SEQ ID NO: 3145 - DNA, 97475 bp, Unknown
  R215_18m  MAG No. k141_71823
caggatcaaggtcaccatccgcatggcctacggcttccaccacgcgaacaatcccatcgccctcgtcatgctccgccgcggcggactcgacatacgcccaccacaaccaagaacccaacccacgaaaacagcagaagcctcatatgtattgaacatttctgcgcagagagggaggtgtaaccgcagcattacggtgtgagaacgcaaggttacgtagctgggcattggctgtggcgttgctgggcattgaccgtcgagccggcaatcatggcgcaagcgacaatcacgacacgccgttattgacataccgccgttcaatggtactgtaattacttgtgcgcttttgaagcgtatggatcgggcccgtagctcagctggttagagcgcatccctgataaggatgaggtcggaggttcaagtcctcccgggcccacagaaaaaatgaagcggctgcgagccgctctttttttctcacggggctatagcgcagctggtagcgcatctgctttgcaagcagagggtcgccggttcgaacccggctagctccacagacaacccttggaataataccgattctgagggtttttgcgttcttgttcgagggattctcccagtccgccatggccctctccatcgaaaaaggggtggtcctgttaaggaccacccctcgaggattcagaccaaccgcgtggtcattgtcgctccgtcttcacggaacggtacacgaaaatccttcgccttgcggcgatatcgcccggacccggaggactacaccttcctctcgggtggaaggtaccggcagataattggctcttccggttttggtgtgtagggggatgcttataggtgggcttgtatggtgtgtctgaagccgccggtgtggaggaggctgcgggtcacgccaaaaccggaagagccgttttcttttccttctccggtggtttcgtcgttgaccgtgttgccggtggcttccttgcaggcttgtttgtaggcttcggctgggctggtgtggtggagggcgcggatgcgtgcagcggcgtgttcgatgtgttcgagcgtggcggatggcgcgtcggtcaggccgtggcgggcgaggacttcgttgcgccacgagtcgtagcgttgctcgcgcaccacgcgtggcttcctccgccccctgacccatgcgtcggcgtacgcccaatcgccttcctcgtagatgtcgcgtgcccaggacgccgtcggacggtcgaacgggtaggggcccgccggcagcggcaacttgtcgaccgtcgggtcgaacacagtgaatcgtcgccgttccctcgcttcgcgttcccgttccggcgctgccagcgcctccgcgacgtccgagtggaacgcggccatgcgctccttggcgccggaggacgtgaacccgtcgtcgggttcgcgcagtccgtgctcctcgagcagcgggtggatgtcgtggtccatgagccagcggagccgggacatgttgaacgcgaggatgaatgcgagcgagattgcgaccatgaggcccatcccggcccccatcagcagtgtgctcatttcagccggctccagcgttcggcgcccgcgcgcgggctgaaacgtccccgccagtcccacggtccgacgaaacgcaaggccaacagaatcggggagcatgtggcgaggaacgcccagaagaaagccaaccatccaatccagtcaggtgtggatctgccggtgtcgacccattgcgcgctcgaccagaacatccatgtcatcgctatggggaagcccgatatcgcgatgaggaacagcgtgccgacgatggggccgccgaacatgtagcgcagcttcgtggcgggcacggaggaggcgaatgccaagtcctccagcgaggcggggacgtaggtgttcggccggccgaacacgagccggcagaaaccccagtacaggaggagtccggccagccacatcacggcgaccgccacgtacgtgttccatgcgtcgcgggatatagtgaccggtctgagaaaagccagcagcgtcacgtcatcggtatgcgtgtggtgcgtcttcgtgtccggggtgagcagccgggcgatgccgtggatcatgaccatcaggccgggcgcagccgcggcggcagcgccgccggccgccgcgccagcccgcgcccagccggaatcgccgccgaaatccagcttgcgcttgaccggcgtcttctccagcgtgtcccagaacacctgcgccccgtcctcaagacgccccaccaacacataccgagtgaacaacgccaacagatacccccacttccaaaacccgagattatccttgaaatgactgcccgggtcatctccaccgcctctgtgcacctgattgtcgtaaagtgcgtctaagccgctacttatcagccatccggctccagtgccaatcgccgttccgacaaatgcgccgaccacggtgccggcaccggggacgatcgatccgacgaccgcgcccacggcaccgccaacggtcccaccgaggccatcaacggcaggcccgagaccctacgcggcatcgccctcggcttccgcaacctcgacaactacgtcacccgcagcctcctccacaccggcggcttcagacacaccatacaagcccacctataagcatcccctctacacaccaaaaccggaagagccggatgattccctgcaagccgatcacgccaatccgacccgacgactaatcagattgaggacggctgaattaagcttgtgccctcatgatacaacatgtcctgcgaccgacgccagacacaacggcagcattctgcccaccatagggcgtgtctttaaccagaaagtaccctcaaatacgttcagcaagatatatgcacgcagaacagcccttccgcattatcttatttgacatagagcatgccccttccattccacagaatcaagcaaataaacgagcggagagactggacacaccgcaaaacaatggcccaacccctccgctcgtttgttatggaaggaagagggatgaataagtatgtttacttcactgacttgatgaagacgatcagcaccgcgccaatcagcgagcagaccgctgcaagcgggaagagtgcgtgatagcccaccgaggaaattagcgccgccgcaacatcccacgcaccatattcaggacaaatccagtccgttgttgtccttggctttgctcaccatatcagtcaaatcggggtcgtccacagacaccgcgttctgctgactgagcgtcaacgatagcgagccattataggagtcgccgtcttcgtccttgccggacacgcttatggcaatcgaattcatcagacgctttctgccgtagttcagatccacggtgatagtcggcatctccggctcttcatccgtgccgaaatcccagttgcgcacattatcgagcgcctgacggtactcatcttcagcatcgtccacgccggcatcctcgatttgctgaatcacccaggatttcagatgcggatactgcgcttcatgactgatccagtaattcacgaaatgctgagacaacgctttgatatcgatttggtacgacagctgcgtattgccggcagacttggcagacgatgtcttcgggaacagctggctgcgcacattcttatcttccagctccacgccgaaatattgttggatgaatttgctggcctcggccttcacctcggcagacgttttcgtgcccttgacccggtcgatgtcgttcgagtacccatcgtcgttcatcttgtccagctgatcgtagaacgtttgctccgcgccggtgatgtcccaagcaccgttcttgaccaacgcatccttgacgttcaatatcaagtccgccacatcactaccaacgccgttccttaagtcatcttcatattggtcggccgggtagtagatgtagtaggggtcgtcgtcatgccaaacggatttcccggcgaatgcgcctttgtaccaagcgaaggtcgttgcatattcgtctgttttgctagtgaaggacgcggaggattcgttggtggttttgcccagcgaatacatgccagacatccgcgcgtcaagagaatcgccagtgctgctgtgggttctgagttcgtatttggtgctgcgcagagtggacagcgagttgatcgcgtcgaaggtgacgaccagcggattggtgggccggaagcccagcatcgctttgacggcggtgaagttggggatgatgaacgccaaggccgccaccagaatcgtcgcaagcaatgcgcagagagcggcgatcagcttcttgctggatttgcgctgcggtgccaggacggcggttgcatcagtcgcctgatatgcggcaggagcgggaatcggcaaagccggcaggggaacggttggtgccggctgtggggcagcggacgcggcgtaaaccgatggggcaaccggcgcggctggtatcgatggtggtaccgcagacgccggcacagcaggtgccggtatcgacgcaggcggtacggctggcgatgcggccggtactggtgccgtcgcaactggtgcgctgtctacagacgctccacatgccgggcaaaatcgtgccggcccatcaactctatttccgcagtggccgcagtacgccatcgtgtgcctctctccctcaaatcggcttgattgccatcgcttcaatgttactcttcagcattacgcctcagccagcccctacgcgtaacgatacgagacgcggcagccttaatgcggttgttttgacgcgatgccaacatcgagctctggccaacgttctggtactcggctacatcttgctgcgagccaagaagcaggccatcgctcgcgccgacgaggccgaatggcggcctagcctcgctttaagcctcaggccagcacctccatggggtgataggtggcggtgtggtggccggtgatggggttccatacccgttcggcgaatgcgcgcagacgggcgacgccctcgcacagctcgtcggcatctccggcgtaggagaggcgcacgaagccgcgcccctcctcgccgaaggcctcgccggggaccacagccacgcgctcttcgtccagcagacggtctgcgaattcaccggagtcaaggccagtcaggcgtacgtccacaaaggcgtagaacgcgccttgcggttcgatcagacgcaataccgtgcatccggccagaccgtccagcacgatctggcgcttggcgcggtattcctcgcgcatggcggccacgttatcttgcgggccagccagtgctgccacgcctgcgtattgcgccaaggagttcaccgaggagtgcatgagttcggcgattttgccggtctgttcgatgaccgcttcgggtgccagcaggtagccgatgcgccagccggtcatcgcataggttttcgacaggctttccaccacaatggtgcgctctttcatgcccggcaccgcggcgatcgatggtgccacggctgcctctcccccaagcgtttccccgaacgtttccccaaacacgaacggatggtaaacctcgtcggagatggcccaaatattgtgctgcttgcatacttcggcaatacgcgccagttcggcggcagaggttaccgcgccggtcggattgcccggtgagttgatgattacggcgcgggtgcgcggggtgatcgccgcttcgatgtccgccgcgttcacgcgcatgccgtgctccggacgcagcgccacggtgaccgggcggccgccgcacagcatcacttcggcgtcataggaagtgaagaacggcgagggaataatcacttcatcgccggtgcccaccacggctttcagcgccagaaacaggccaatcgtggcaccgtcaacggcttgaatctcggtttcgggatcataagtaagtcccttcacacaggcggagtaatcggccacggccttgcggtattcggggatgccaagcacgttggtgtaccgagtgcggccagcctgtgcggcctcgcaagcggctgccacgatatgcggcgcggccgtggcgctgggctcccccacggtcagtgaaatcgcgtcaggcacgcgctctacacggtcgaatacgtctcggatgccggagcgcgggatattccgggcttcggcggacaggctcgcgggctcggcggtcggcacagcaacccgaccggcagcaggcatagtagcaggcgcagcagcagatgcaacttcggacagagacatgttggaaaacttctgcatatcatccctcctcaatggaattatttcgtcgttctcttatttcaaaaggaattattacatctaattaggactttaaacgtaaacattccaccacacaacagaaaacacaggaagaactactgaaattaccaggcaaaatcggaaagccatcgcattccggcaacaggtacagtgaacacagagcacaacgaacggagaagacatcatgaccgcgattgacgagaccgaccagcgcatcctcaccatgctggaggccgacggccgcgccacgctcgcgcaactggcccaggcgaccggactgtcagtctccgccgcccagtcgcgcgtgcagaagctggagaagcgcggcatcatcaagggatacaaggccatcatcgaccaagagcagcgcggcttgcccatcagcgcgttcgtcaacgtgaccccgctcgactactcagccgaatcctcgattccggacaagctgaacaatatcgacggcatcgtctcctgctattcggtggccggcgcccccagtttcgtgctggtggtgcgcgtggcttcccctaccgcacttgaagaactgctcaatctcatccaccgcacggtgccggtaagcaccgagacgacgatgattctgcagacctacttcgcacactgaccgcgaacccggtaacctgcgcgccgaagacctgcggccacacaccccacaaaccccacaggtcacaaaaaccatacgaccccacggtccagccacaccccacaaaccccacagaccgcacgatccccaacagacacatctgacatcacccaagtctgcctttatgtccactatatgaacgtgcctccggtgtgatgcagcttccatttcgacccgattcacgcatagacagacatccaacaatcgcccgaaaaatctaacaaacggaaacttgagccactccataaccacgccgaaagctttcccgttatccgagcgagactctatgcagcaagggcctgcgcgcatagaataaaaccgtcttaattccctagcaaatcgaggagaatcatgctcactgacgagtacatcaagcgtgtctacgaccaggtcgttgcccgtgacggcgatcagccggagttcctgcaggccgttcgcgaggtcttcgagaccctgcagccggttgtcgagaagcacccggagtacgagaaggccggtgtgctggagcgcatcgtcgagccggagcgcgccatcaagttccgcgtggcctgggttgacgacgagggcaaggttcaggtgaaccgcggctaccgcatccagttcaactccgccattggcccgtacaagggcggcctgcgcttccacccgaccgtgaccgagtccgtcgtcaagttccttggcttcgagcagattctcaagaactccctgaccacgctgccgatgggcggcggcaagggtggctccgacttcaacccgaagggcaagtccgacgccgaggtcatgcgcttctgccaggccttcatgaccgagctgagccgccacatcggccagttcaccgacgttcccgccggcgacatcaacgtcggtggccgtgagatcggctacctgttcggtcagtacaagcgcatccgcgacgagtactccggcgtcctgaccggtaagggtctggaattcggcggctccctggcccgcaccgaggccaccggttacggcgtgtgctactacacccaggaagccctgcgcgtgctgcgcaacgactccttcgagggcaagaccgtcgtgatctccggctccggcaacgtggccacctacgccgctcagaaggctgagcagctgggcgccaaggtcgtcaccgtctccgactccaacggctacatctacgacccgaacggcatcaacgtcgaggtcgtcaagcagatcaaggaagtcgagcgcggccgcatcaaggaatatgccgagcgcgttccgggctccgagtaccacgagggcagcaagggcgtgtggaccgtcaagggcgacatcgctctgccgtgcgccacccagaacgaggttgatggcgaatccgcacagaagctcgtggacaacggcgtgaccgtggtcgtcgagggtgcgaacatgccgtccaccccggaggccatcgaggtctaccagaagaacggcgtgctgtacggcccggccaaggctgccaacgccggtggcgtggccgtctccggcctggagatgagccagaacagctaccgtctgtcttggaccttcgaagaggtcgacgccaagctcaagtccatcatggaagagatcgtcgccaactccctggccgccgccaaggaatacggtcacgagggtgacctgatgctcggcgccaacgccgccggcttcgtcaaggtcgccaacgccatggtggcccagggcgtgctgtgacgcttgcctctgagcagtactaagcagtagcgtaatgcccttgcttcccgtgaggaggcaagggcattgctatatgtacaacgagcaacaagtgctatccccaaatacgtaagcccgataacaacttagcttccacctccataaccccggaactcaccaccgtcgatcagcacatggatcagcgcgctggaccatggccgacgtggtcatcaaagccatcaacggagtctcttcaccgcgcgtgatgcacctgaacaccgatttggtggtgcgtgattcggcgtaattgccacgtggctgtcggcaggactctagataccgcgtcacaatcacccagtaatgcatcacgcagtgtataactcttccgcggaaacgaacaccattcgttcatcatccatgtagcgggttcgcgtggactcactcaccggattcttggtgaacagcataagccacgcattacctgcctgatagccgcggactaagccagcacgctgatggagcttttcaatagcctccgtttcgttgaatgaattacgccatttgcattcaccgaacagaatcgttttatcgagcgaatccgcagcaatcacatcgatatcggtttgctcgtgagcaatcggatcattgccccaccatttgccgaactgagtggcaacaaaggggaggttgcccatagcgttgtttcgaataagccattgcaggcaaatcgtctcaaattgttgaccaacataggtatcaaacgctggtccaaaagcgagtctgctcgtaacctcctcgctgatattaccatccaaaatgctcatgttgcgccccacaaagcggaaccaatatgcaaagaagggatcgctcaccacatacattcccttgcgcgatttactcggatcttcaccaaacggcacttttcgctcaattaagcgcaaatcgaccagcgttttcagatatgctccaatcgaatcagatccgacacccgcatgttcagcgataagctttggcgaggaattaccacccgcaatagattgcaatatcgaataatacgatgccggttcacgaagctcctgacgcaacagcatcataggttcctcacgcagtacgcccaagttgtcgaacatcaagcgcagcacattggattcaaagccatcggcttcctgtatacgggccagataatatggcgtaccgccgaaagtcgcatagtattggaccagttcttgcggagatgtgttcgttagaaattttgccgcatccgcatagtcgaatggcaggagtcgaatctgtgctgtacgacgcccgtatagcgggcttttacgccccaatacgtcgttttccatgaatccctcgttactaccggatagaatcatcgtcacttttgtggcgaggaatccatggtcaattgctatctgcaacatggagggtaatgctggctcggcggcagctgcataagggaactcatcgaatacgaacaccatacgttcgtcagtctgtgcagcacgttcagcaacaaacgataacgcatcagaccacccgccaaacgacggggtggaatccggcataccaaagaacgacaatgccgctcttgagaaatcttcaagattcatcttggcgctttgctgtatggccgtgaagtacagcacgcgtttatctttgacaaattcgtcaatcaacgccgttttccctacacgccgtctaccgtacagcaccaccatttcgaacgaatcgctggtaaacagcttttccagcacttgtaactcgtgctctcgtgcgacaaacattgcagccctccgatccgcctaccgcccaataataagagtatcatggttaatgtaatcacgattaccttaattatgatactgataattgttgccctaccgcgaggaggatcttccttccgctgtcaaaacgaaagcccaacagtccagactgacgagcagcaacatcggcagatcaaccgctgacgccagccagcctgacagcacaaatcagcctgattgcaggcatataggcactagttagcgaaaccggctcttcgcattttggtgcgtaggggccgtgcggtttgattcggtgtgtgattgaaaaagtgaatgaaaccgcacggcccctacacgccaaaaccggaagagcccataaagtcccctcagtagcgccaacctgccagtcctttggcggaaccacaccacatagaccttcctcaacggcgccaagctgccacacgctggcagaccaacaccgctgtgtgcattctctgcgtcggcggcagtccaaaacttggcccagcaacaacgcttgctgtgcccagcgtcggcagagggccaagaattggacgcaaacgacacagaacacaccctcagcatcggcagaactccaagatctgtaccgctgacgacggtaagccctccacagcatcgtcagagatacaaaacctgtcccaacaccgacgcctgccaccccccagcgtcgccggagtcccaagtctcggcccagcaacgacgcctacgaaccccacacataagaaaccgcacctccgatcatcgaatctgaattacttcagtccaacaaccggggtgcggttcactgaggggagttctaccagtatagctatatcagtcgtcgccgagcgtgacgtgcacgccgccgaccagcgagctgaccacgttgtagatcagtgccgcaatggtggccagcagggtgaagatcaccacttcaacaatcgagaagatggtgacgccggagaccacggtggtaagggacaacacgttcttgagatcgaaaccgcctgcatcaagaccggtggaagacacaatctgcgtaatctggctgaatacaccgaccacatcaagcagcacccatacgatcgcggaggcaacgacctgaataatcgccacggcgatggacagcatgaacgtcaccttggccacggaccaagcatccacgcgggtcagcgacaagctcatgcggcgagccctgggggcgctacggcgaggtgccggacgcacgggagtggcggcacctgaagaaggcaacgtggattcttccggatcgctggacacggagcgtgccacgcggggagcgtgctcagtaccgatcagcggctcgacatgatcgttctgcgtattgccgactgccggcggtatgatccggggctcgttgtcttcgagattctcgctcatcgtttctccttaacaggcttggcggtagcctctgctgtatgcgaggctaccagcttttcaggacgctgctcacgcctcgtccgcgttgttcacattctcgccggattgtgcggtctcggcggtgccgttcgccgcggcatcgccactgtcctcgggctcgtccttctcctcgttacgggcgatggagagaatcgtgtcgcccttgtcaggcttggcgaaggtaacaccctgggtgttgcgcccggtgcgcttgacctcgtccacgttggaacgaatcaccttgccggacttcatgatggccatgacctgatcgtcttcggacaccacgagcgcgccgaccagggcaccacggccctcgaccagttgcacggccttgatgcccaagccgttacggccctgcagacggtattcgctgatggcggtgcgcttggcgaagccctcgttggtcaccacgaacaggtccttgtcggagtcgccagggaccacatccatggccagcaggctgtcgtcgttacggaacttcatgccctgcacgccggcggtctggcggcccatcggacgcagctgctcgtcgtcggcctggaacttgaggctcatgccgagcttggagaccaggatgatgtcatcctcggcgttgcacagcgcggcaccgatgagctcgtcggcgttctcgccattctcgtcggccatgaggcgcacggcgatcaggccgccttggcgcggggaatcgtactcggccagcggggtcttcttgaccttgccggaacgggtggcgagcaccaggtacttggccacctcgtagttcgggatggacagcacggtctggatggtctcgtcgggcgcgaactgcagcaggttggccacgtgctggcccttggagtcgcgcgaaccctcgggcagctcgtaggccttgatgcggtagacgcggcccttgttcgtgaagaacagcagccaattgtgcgtggaggtcaggaagaagtgatccaccacgtcgtcctcgcgcagcttggtgcccttgatacccttgccgccgcggtgctgggcgcggtattcgtcggccttggtgcgcttgatgaagccggagtgggtcacggtgaccaccacgttctcttcggcgatcaggtcctcgacgttcatctcgccggagaacggcaggatcttggtgcggcggtcgtcgccgtacttggccacgatctcgtcgagctcatcgccgatgatcttgcgctggcgttccggcttggcgaggatgtcgatgtagtcggcgatcttgtgctgcaattcctcatgctcggccacgatcttgtcgcggttcatgcgggtcagcgtgcgcagctgcatggccagaatggcgtccgcctgcacctggtcgatgtccagcagccccataaggcccgtacgggcggtgtcggtgtcttcggaggcgcggatgagggcgatgacctcgtccagcatgtcgagggccttgagatagccctgcaggatgtggtcgcgctcttcggcctcgcgcttcaggtacgcggtgcggcgggcgattacgtcgagctggtggttcacccagtggcggatgaaggcgtccaggctcagcgtgcgcggcacgccgtcgaccagcgccagcatgttggcgccgaaggtctgctgcagctgggagtgcttgtacaggttgttcaggaccaccttcggcacggcgtcgcgcttcaagaccagcacgaggcgctggccggtgcggccggaggtctcgtcgcgcatgtcggcaatgccctggatcttgccgtcgcgcacggcctcacgaatggagacgacgaggcggtccgggttgacctggtagggcagttcggtgaccaccaggcacatacggccgttgatctcctcagtgttgaccacggcacgcatggtgatcaggccacggccggtgcggtaggcctgttcgatgcccttgtggccgaggatggtggcgccggtggggaagtccggtcccttgatgatgcggatcaggttttccagcagttcctcgcggctggcgtccgggtggtcgagcgcccagtggacgccgtccgccacctcgcgcatgttatgcggcgggatgttggtggccatgccgacggcgatgccggcggaaccgttgacgagcaggttcgggaagcgggccggcagcacggtcggctcctgggtcttgccgtcgtagttgggcacgaagtcgacggtgtccttgtcgatgtcgcgcaccatttccatggccagcggggccatgcggcattcggtgtaacgcatggcggcggccgggtcatcgccgggggagccgaagttgccctggccgtcgacgagcatgttgcgcatcgaccaggactgggccatacgcaccaaggtgttgtagatggcggaatcgccgtgcgggtggtacttacccatcacgtcgccgaccacgcgggagcacttgttgtagccgcgatcggggcggtagccgccgtcgtacatcgcgtagatcacacggcgatgcacgggcttcatgccgtcgcgcacgtccggcagggcacgctcgacgatcacggagagggcatacgccagataggactcgcgcatctcctgctgcaggtccttgcgctggatgcgttcgccggtgtccatcaggccgtagtcggtggtgtccgcctcctgcgggctcaacggctccatcgagccgtccggcgtgaactgctcgtcgccggtgttgttttcatctgccactgttgttcctttagttgtctaagtccgttgtgtacctccctctgacgagggaggttggaggattccgttacgcatcgatccaacgcacgttcttggcgttgcgctggatgaagaggcggcggggttcgacctcatcgcccatcagcatcgagaaggtctcgtcggccgcggcggcgtcctcgatgtgcacctgcttcagaatgcggtgctcggggtccatggtggtctcccacagctcctggtagctcatctcgcccaaacccttgtagcgctggatgccttcgcccttgggcagctggcgtccgttggccttgccttcggcgagcacgcggtcgcgctcggcgtcggtgtacacgaagtcgtgcgggcccttggtccacttcaggcggtacagcggcggcatggccacgtacacgtagccggcggtgatcatcgggcgcatgtagcggaagaacagcgtcaggttcagggtggcgatatgcgcaccgtccacatcggcatcggccatgatgatgaccttgtggtagcggaccttggagatgtcgaagtcctcgccatagccgccgccgaccgcggtgatcagcgattcgatggtgtcggacttcatcatgcggtccaagctggcacgctcggtgttgaggatcttgcctcgcagcggcaggatggcctgcgtgatcgggttgcggccctggatggcggagccgcctgcggaatcgccctccacgatgaacagctcgcactcttccgggttggaggactggcagtccttgagcttgtcgggcatgccggcggactcgaagatggacttgcggcgggtgttctcgcgggctttcttggcggccagacgggcgcgggaggcctcaatggccttctggatgatgttcttggcctcgttcgggtgggcgtcgaaccagtcgccgagcttgtcggtcatcacgcgctgcacgaaggtcttggcctcggagttgccgagcttggtcttggtctggccttcgaactgcgggttggtgagcttgacggagatcacggcggtcaggccttcacgcacgtcgtcgccggagaggttctcgtccttgtccttgaggatgcccttgtcacgcgcgtaacggttgaccagcgaggtcagcgcggcgcggaagccctcctcgtgagtgccgccctcggtggtggaaatcgtgttcgcgaaggtgtgcacggcctcggagtaggcggtggtccactgcatggcgagttcggcggagatgccgagcttcaggtcttcggcctcgaagctgatgacgtcctcttccaccggcgtggccttgcgcaccttgaccaggtagtcgacatagtccttgatgccgttgaggtactggtaggtgacggtctggtgctttgcgccgggctcgtccgcggcgtcgccggccacctcgtcgccggcctggtcattctcacgctcgtcggtcaggctgatcttgaggcccttgttcaggaaggccatctgctggaaacgggaacgcagcgtctcgaagtcgtagatggtggtctcgaagatcttcgggtcggcccagaaagtcacggacgtaccggtggactcgccttcggtcatcggctcgccctgcttcaagggcgcggtggggtgctggtcgatgtacgtctgggtccagtggaagccctgacggcgcacttcgatgtccacgcgggtggagagtgcgttgaccacggagatacccacgccgtgcagaccgccggacactgcataaccgccgccgccgaacttgccgccggcgtgcagcttggtcatcacggtctccacaccggagacgccctcgccgggcacctcatcgaccgggatgcctcgaccatcgtccaccacgcggatgccgttgtccggcagaatggtgacctcgatatggctggcgtatccggccagcgcctcgtcgaccgagttatcgacgatctcatagactaggtggtgcaaaccgcgcgggccggtggaaccgatgtacataccggggcggatacgcacggcctcgagtccttcgagcaccctcagatcggaggcctcataatgctcgggggccatggattcgtcaagttcgccttcggtcaattccgcattgttgatgcgttccgcagccgccttcagctgctcctctttgctggtttcgtctgccaacaggcttccttccgtgactacagggtcaacctccgtcatgaaggtcattcacggaggcgatatggcttacgaggcccgtaaagggctcttctggccatttgaccatactgcatgtgattttactcgtctaacccgacgagcgccatagcgaggcttctgcgaatttgtttggtatcttggctaccgccgccgagcccatttgcgcgtgtatccggcggccggtccggtcacgcgaatctcggcgatggtcaatcctttgagattgcgacggatggtatcggtaagttgggggataaggtaggtcagctgcgtggcccagaccgtggattcggcacggatggtcagtacgccgtccgtgaaatcggcgactgccgaatggctggcgatggcctgccccaccacttggtcccaatggttgcgcaattgcgcaagtttcatattcgccgcccagacgccattgccggcgatggtggtcatcacgctgcccagttcagccggatcgcgccccggtttgccgaagttttcgatggcctcttcacggcggcgtctgtagtccttcaaggtcgccccgcgacgggagagccgctcgaatatttcggccggcagtttggtctcgtccaggttgagttggcgggcgatcggcgggttcatgacactttccgttctacggacgcgctgtccaccgcgggttttccgtcatacttacccaaactctcgttttcccgcgaatcggacaaattgcccagagttggcagtattacggaagcgggttcggccagtgtggccacgtcgatacgatgggccgattcatagtcgggcacatcgccttcagcggccacggtaatcagcacctgatcctgttttctggcgaaatcaagaatctgcgtgcgccggctgtcgtcaagctgggcgaacacatcatcgagaatcacaatcggctgcaatcccaaccggtcacgcacgatttcaaacaatgccattttcaaggccaacgccatcgtccacatctcgccgttcgaagcgaactcgcgggcgggaataccggccaactcaaggttcatgtcatcgcgttgcggaccgataaggttcacgccgcgagccatttcaccggggtagatgcgttgaaaatgctcgctgatctgcggatgtggatcgtcgaacatcagcacttcgtcgaatgaaggcgcatatgtgagcgtcacctgctcgccggcaccggccaagtcggcgtaaatcgcggcaaatggctcggcaagcagaccgatcacatgagcgcgcatacgggtcaacgccacaccggcttcgatgaactggccggtccagatttccaaaccgctcagaaccgcatccatcggctgtccattgttggcattggcattcaattgcttcaacaatgtggcacgctgtttggcgatgcgcgtgaactgttgcaacgtctgcatgtatccgggctcgagcagagccgcagcctgattcatcatgacgcggcgtgctcccggatcgccggacaccaatcgctgatcttcgggagtgaaggaaacgctgggaatcttgccaatgatatcgcgcatatacagcgacgaccccgagttgatgcgggctcggttggcaccacgcgcatgaatcgacgcttcatacgtagtggtttgaccggcatcatcagcgacgttcgcgcggatggtggccgtggtctgcccgcgttcgatcagcggcaacgtgctggacgtgcgatgactcgatccggtggacagcacttcgacggcttccaccagattggttttgcccaagccattcttgccgaacaggatattcacgcctggtacgaaatcgaccactacttgactccatgagcggtagtggtcgagtgcgagacgggagatgtgcattagcgaatcgttggaaattcagggatctcagttgttgaagcgcatcggcacgagcaggtatcggtagtccatggactcgtcggaatcagcttcctgctggccgttgaactcgaccggcttgaccggggtcgtcatcttgatgcgcacgaatggttcggtcacggcggacagaccctccttcaggtaggacgggttgaatgccacggtgatgtcgtcgccatccatgtcgatgtccagtgtttcgttggcctgggcctcgtcgaccgatccggcggacagcgccacttcctgaccggtgaaggtcatgcgaatcggagcattgcgttcggcgaccaaagccacacggctgatggcgtcgagcagatcctgcttgttgactacggcctgaatcgggtattcatcggcgaacaggcggtcgaccgccgggaattcaccgtcgatgagctgggaggtggagacgcggccggcgttttcgaagccgagcagcgtcgggctatcggcatcgaaatcaaggcggatgttctggtgctcgtcaagagcacgggccacatccttgagcagggagccgcgaaccagcgtggtggtgtcgacgtccgggttctgcggagtccaagtgaaggtggcgcgggccaaacggaagcgatcggtggaggtcatgacgaccttgtcgccttggaattgcatgcgaacgccggtcagtaccgggcggttttcttcgcgggagacggcaacgcatgcctggttcactgcctgaacgaaagtcggggcatcgacttggccgagcatggccggtaccacaggcagatccgggtactcggtgtcgggcatgagctgcaaggtgaacttcgacttgccggacgtgatggtcagcgtggagccgtcggtgaccaggtacgttttctccgaacgcagcgatttggtgatatcggccagcagcttgccctgaaccagtacggaaccggcttcgtcaacgccggcttcgatgtggtggcgagcggaaatctcgtagttgaaggcggagaattgcagcgttccgtcaatggcttccagcttgacaccagcgagaatcgggttggagggacgtgcgtcgatgactcgggaggtccaggctacggcgtcggccagggctgcagtatcgatttcgactttcatgtgtgattgttcccttcgtcggattggctgagaaatattctagccgttaggtggcgaacttacgtacgatgggtgactggctgttactgtggcgatgatgcttttcacgtaactgagtaagtaatcgtcgtaataaggccggtggatagtgtggataagtaggggtgagccctacaaatgcaacggttcataagtccctgaaaattgtggacaaattctgcatggcttgtggataagtgggcgagttttccacagccagttcgtcgaatttgagttttccacatcgaggtcgcggttatgcacgagttttccacaacaaaacagtgggtaatccacgagttatccgccgagtttacccacatctgtgcacaactgtgtggataacttttttggttttcgtactttcgcacggcgtgttgaaggctgtttttcgtcgaggagaatcgattctggagaccgttttcggcacttttttcgtctcgctcgcccaaacccgcaaaatcggtcctcagaatcgattctctcgtttcatgggttttttgcgtgttccccttcgaaactcccctcagtcgtctgcgacgacagctctcctcacaaaggggagccatgaggaatctgatgtctcgaatccgttgcctcgacgtatccaccagaatccgcctgagcaaccaaaaacggcacttttcggaaagtcagtccgaaaagtgccgtttttcgtctctcagaagcgttgtgtcagttggtgttgctttgcttgaggcgaaccgtgagctccataacgtagttatagatctcctgtttttgctgcattcggtcactgattcgagtgcaggcatgcattactgtggtgtgatcgcgcccgccaaagacctggccaatatccatcaggctcatactggtcatttcgcgagccagatacatggcgatctgacgaggaacagccacgtttttggttcgtgatttaccgacaagatcctcaaacgtcaggtggaagtacttcgccacctgactgatgatgtccgtgggcttgatttccacatcggtggtgaagaagtcctgcaacgtctgctcggccaaggcgcgggtcaccggctgattactcagcgaggccacggccgtaacacgggtaagcgcgccctcaagttcgcgaatgttctcggtgaagcgttcggcgatgaggtccaacacatcgctggggattttcgaaccgttcatcgaggcgatcatacgaagaattgcgattcgggtctccagatccggcggcttgacgtctacggtcaggccggattcgaagcgcgagatgagtcgagcctcgaaacccttcaaattcttgggtgccacatcggaagcaatgacaatacgcttatttgcctgatgcagtgcattgaacgtatggaagaactgatccaaggtggcttccttgccgccgaggaactggatatcgtcaataagcaacacatcaacctgtcggtatcgacggttgaattcagcaatctgaccctggctttggttcgggttttgcagcgcgtcgatgaattcgttcgtgaattcctcagacgtgacgtatcgaacctttagcccgggatccttgaccagtgcatagttgccgatggcgttcagcaagtgggttttgcccaggcccgatccgccatagatacacaacgggttgaaatcctgaccggaaccttcggccacggccagtgcgaccgtacgggcaaaacggttggaatcgccgggcacgaaggaatcaaacgtgaagttcttattgagatgagtctcgggatcgcgattcatcttctgctgaccgaccgggaactgcgactcggtggcgggcatcggttcccgcggtgcggctaccggctttgcaccataggattctttaccgaactcggcgacggtcggagaaatttccgaaggatatggctgcgccggctttgccgccgaaagcggttcgggctcggttttcggcacgaccttgaacgcgggaaacatattttcgccggttaccgtacgcaatgcctgaagcagggaatcgttcaaatcaccctgaatggcttgaagcgtatcgttgttgtccacacacagcacgatggtcgaaccgaagacgccttcaggaacaacgccttccaaccagcctttttctcgtgggctgagcgaagcgctgtgtttgagtaccgtcagcgtgtctgaccagatgtgggcggcctcgattacggggtcgccggaagcgttaaccatggtggccccttctatcggtgtggcgaaatctgtacaacagataatatttactctggtttagacaagttatccaccgtgtcgcgtgttgaaataactggattgtgaataacagacatgtaatttgtggataacttttggccgtgaatggttggtattccgccgattataagagatttgaggcgtgtctcgcaacgtgtcgaaatgtgaaaatactccgtccgttttgacttgagggtaggggtgagagtactttggtatagcttgactcacgtgagggcagcgcgaagcgttgccgaatagacctaggagcaatggattatgaagaggacgttccagccgaacaaccgtcgtcgccacatgaagcacggcttccgcctgcgcatgcgcacccgttctggccgtgcggtgatcaaccgtcgccgtgccaagggccgcaagtccctctccgcctgatcattccgatcagtgccacaggcatagtcgaggtggagcggcttcaaagccatcgtgatttcgtcaccgtgctgaaacgccggcgcaaagcaggtggcaaggatatcgtcgtgcactatttggtgcccgacgaccatcatgatgatgacgaccggacggtgcatcgccgtttgggattagctgtctccaaatcggtaggacatgcggtcacccgtaatacggtgaagcgtaggtttcgtgtattggccagagcccatgaggatctgctgcccgcgcattgcgatatcgttttgcgcgccaagcccagtgccgcgaccgcatcgttcgcttcgctagatcagcagatcgcgaaggcttttgccacagtggcgcataaggtggctgaggcatgacagcttctttcaaggcggtgatgattggtggggtgcgctggtatcaacagcacatctcggcaaacacaccgccttgttgtaagtattatccaacgtgctcgaattatgccattgaggcattggaacggtatggcgcgttcaaagggggagtgctcgccatgctgagattactgcgttgccggccgtggagtcgtgggggaatcgacgatgttccacaacggtattccattttttacagattttcgtggtcgaaggctcatgaagagccccgactgacaccattggccacaacccaaagagaggcccaacgatgaactcaaatgaatttctgcttgatagcgggttttggggatttctatataaaatcctgactcccgttgagtggttgcagacctggatcatgaagatcgtgcatgacttcttcgcgatgctgggcatgagcccgattggtgtctcatgggtgcttgccattatcatcctggtgctggtggtgcaggcttgtatcttcccgctgttctacaagcagatgaagtcgatgcgcaagatgcaggcattggcaccgaagatgcagcgcattcagaacaagtacaaaggtaagacggatcaggcgtccaaggaagccatgagtcgtgaaaccatgaaactgtatcaagacaatgacgccaatccggctggctcctgcttgcctatgctcattcagggcccggtgttcatgtccatgttctatacgctgtcggccattccatacattgccaacggtaaacgcgatgcgttgggcgcgttcgacgtagcaaccgccaagcaattcacccaaaccgatgtgttcggcattgtcagtgtgaccgataacttcacccgcgcatctactgcaggcaaggtggtcatcggtatcttcgtgttcctgatgtgcttctgcttgtggctcattcagtacatcaacatgaagcgcaacatggcagctgcttcgatgaacaagcagaccgagaccatgcagaaggctatgctgtggctcttcccggtgatgtacatcttctcgggtgtctccttcccgttcgccgtgttggtgtactggctgaccaacaacgtttgcaacttgtgccgtacgctgtggcaggtgtatgcattcccgacccctggctctccggctgcggcggacaaggagaagcgcgatcatcgtaatgagaatgctcgccgcgcaaaggccggcctgccctctctggaagaagaagcattggccaaggccaaggaagaggctgagcgtaaggccactcagggctatcagcgtcaacagcccgtgcgtaagcgcaaaaagaagtgacgaccatgtcggtgcgcgttcgatgtttcacgtgaaacattcaacacgcaccgacattactttctctgttcgggggagcagggcttagacttggaattcaaacacgacatgaaggagtagcgtatggcacaggatgacgtgaagtcgatcgatcagctcaacgaagaggctgacatcgccgcggattaccttgaaggcctactggatatcgccgactatgagggcgacattgagatgggcgtgcgtaatgaccgccccaccgtgcaaatcgttgctgatgacgataccgacatcaaacatcttattggccataatggtgaagtcgttgatgctctgcagcaattgactcgtctggctgtacagcagaagaccggcgagcgttctcatctgattgtggatgtcgacggtttcctgaagcgcaagcgtcagcaccttcgtgatatcgccctggatgccattgacgcagtgaaggattccggcgagccgtatgatttgaagccgatgaattccttcgaacgtaaagtcgttcacgatgtggttcgggaagaggggctgaagtctcgctcgcacggtgaggagcctcatcgttacgtgacggtgtatctcaagaacaaaatcgaggatgttgccgaagacgacgagcttgatcaggagtaataggtcgacgagtttttgagatgacaaggacgttcaacggatgtcgtctctaaacaaacaagagtgaccgtagggagaatggcgtcgtaatgagcgacgccttttccatgttgattgtttcacgtgaaacatggtgagggagatggctatgacggatcagctgcaggggtcacctgtacttgctgaggtcttgggtgatgcgttgccgaagttggagcgtttccatgccaagattgccgaagagggtgaacctcgtggattgatcggcccccgtgacgtcgatatcatttgggaacggcatattctgaattccgctgcgattgtgccgtacgttcggaatgtgacgaatggtattcgcttcaaaacagttgccgacgtcggcagtggtggtggttttcctggattggtggctgccgcgtgtttgcctgatcatgacttcacgctgattgaaccgatggagcggcgaatcgaatggttgcatgaatgtgttgacctgatgcaactgcagaacgttgagattatccgtggacgctccgatgctgtcatccagcaggtacggaagcggaaaattcatccgttcgctgttgtcacgtgtcgtgcggttgctcctatgaccaaactctctggctggacgttgccgttgctgaaaccgtcaggacagttgatcgcactgaagggacggtctgctcaggctgaaatcgacaaggctggcaaggagattgcaaaattcggtggtcgtcgtccacgcgtcgttgaggcggctgtcggaccggatcttgagcctacccacgtggtgattgtggataagcgatgagtggagtactgattgagttatccacatttccatatgtgcgtaaaagttatccacatttttacgggacgatgtgcagaatgatgaaaacactgatttttcaatgtttttcgtctgcgaatacataatctaacactcaacgtcattcacacttatccacacttatccacattgcatatcgcaattgtggataacgagcatcatgtccatacgaatgagaacactggaacttacgtctgtgcaaggaggagcgatgtccaccaaggatcatcagtcggaacctatagaatcggcttccgaaacgcttcagcgaatattcgatggtcacggttcagtgcttggcagccagatggctgatgaaagctcacgctacgatgtactcaagaaaaccgatttccccaaacctcaacgtacccgtcgtattgccgtggccaaccagaaggggggagtgggtaaaaccacatccacggtaaacaccgctgcggcgctggcgaacaagggcgcgcaggtgttggtcatcgatatggacccgcagggcaatgcctctacggcgttgggtgtatctcatgcatcgggagagccctcggtctatgacgttatcgaggggcgttccgatctgggtgatgttatcacggtctgtcctgattttcccacacttgatgttgtgcctgcatcaatcgatctcagcggtgccgagttggaagtggctgatctgcccaaccgaaacacattgttgaaggaggccttggacctctacctgcgtcaatcagataaacactatgattacgtgttcattgattgcccgcccagcttgggcctcttggtcatcaacgccatgtgtgcagtgaccgagatgctgattcctatccaggctgagtattacgcattggagggtcttggccagctgatcaacacgattggtttggtgcaggagcatttcaatccagtactgctggtgtccaccatgctcgtcacaatgttcgatcgccgaacgctattgagccgtgaagtatataacgaggtcaagggacactatcccagcattgtgctgaataccaccatcccgcgttcagtcaagatctccgaagcgccgagtttctcccaatcggtgattgcctatgatcctcgtggcataggtgccatatcgtatggtgaagcagctttggaaatcgcacagcgttcgcaacaagtccttgacaccattgatgcgaggaggaacaagtaatggcatcaaaatcacgactcggtaagggccttggcgctttgttccccacattgccaggggaggagccagtggcggagcagcccgcaatgattgaggaggattcgtctactccggcggccactgctgacataacccccgccaagaaggctactgcccagcaggaatcaaagcctgccgcgcctcagatggtatcgtccagcaaagcagccaagaaagccgccggtaaacgcgcatccatgcccgcattggacaccattactcatcctagcgacctgtttttcggtacggagaaacctcaaaccggtaaggtcgccgcacctcagcagggcggcaagccgtctgcgtctcagacggcacatcgtacatccgtcaccgtcaaagatgtttcacgtgaaacatctcagactgcatcggcggcaaagaccgctgacacagataagaaggacgagctcaagccggtagccggtggttatctggctgaactcaaactgtctgatatcgggcccaatgcacatcagcctcgtaccatcttcgacgaggatgagttgaatgagctgtctgcttccattaaggaagttggtgtgctgcaaccgatagtcgtgcgcaagcgtccggcaagccagattgctgcggccaaagccgccaagcacgacgagacggaatccagcacaaatccgtttgccggtcatttggacagcccgtatgagctcattatgggtgaacgtcgttggcgtgcatcccagttggctgggttggagacgattcccgccatcgtcaaaaccactgcggatgatgatatgctccgcgatgcattgctggaaaacctgcaccgtgtggccttgaatccgctggaagaggcggctgcctaccagcagatgattgaagagttcgggttgacacaagtacaactgtccaagtcggtgtccaagtctcgcccgcaaatcgccaataccttgcgactgctgaacctgccggcctctgtgcaaaagagagtggctgccggtgtgctatcgtccggtcatgcgcgtgcgctattgggcctgagcgatccggaggaaatggacaagctggcttctcgtattattgcggaaggtctttctgtacgcagcaccgaagaaatcgtcgccatgaagattgcgtcgggggagcagccgaagaagcccaagacgtccaagaccaatccttgggttggttccgccatccagcagagtttggaaaatcatttcgacaccaaggtgtcgattaagggcagcaccaagcatggtcgcatcgaaatcgtcttctcgtcaccagaggatatggatcgcatcctgcagctgctggtgccgagccaaggcgatgccgattccaaatgggtgtaacacgataagaacattcgtgttgtcgccggcattattgctgtgcagtgcgttgtacgcgcaagacgttatagcctctgcgtgattcctggcaggggcgtatgcctgcgttgtagcccctgtcgcaatagaaaacccctcaggctggaggatgacaaatcacacatcgtgattctccgtcgcctgaggggcctttctatgcctttgaccggtgcgtactatccaagggcggcatgctgtaacactgacctagcgctgctcctatgtcacaggcagcagtcagaacagcaagccatcatcaggtcgccgcaatcagtccgtaagataggcctgcgcatccagcgctgcacggcagcccatgcccgctgcgctgattgcctgacgataagtacgatccacgcaatcgcctgcagcaaagatgcctggcgcactggtcaccgtgctggcaccctgcaccacgacatacccatcattgtcacggtccacaacaccagctgcaaaatcagtggctggcgtatggccgatagccacgaatacggcgttggtgtccagcgtgctttcttctccggtcaccacgttacgtacggcaatgctgctgacactggccggtgccacagccggtcgtttgactgtcaagccaggaatggcaataggtgcaccggtgttctgtgtgggggaggaggtgccggtaatggaggtcaccactgtgttggtcagtagggtgatggtcggattggctttggctcggtccaccatgatctgcgaggcacggaagctatcgcgtcggtgaatcaaggtgaccgaagaaccgaaccgggtcaggaataatgcctcttcaaaagccgaatcgccaccgcctacgaccacgataggcttgttcctgaagaagaagccatcgcaggtggcgcagtacgagacgccatgtccggacagctcctgttcgccgggcaccccaagcttacggaatgacgaccctgtggcgatgatgagtgctgatgcctccaactgggagtcatcggagagcgttacacgataggtcggcttgaccgaatcactctcacacgcctcaatggaagagacatcgtctgtgatataggttgtaccgaagcgcttggcctgttccttcatgcgatccataagatccgggccaagaataccttccgggaatccggggaagttctccacctcagtggtgttgaccaactgtccacctggcgacaacgcaccagtgaccataacaggattaagacctgcacggccaagatagatggcggccgtgtagccagcgggaccagaaccgataatgatgacgttatgtttcacgtgaaacattgtcacacccccatacgatattccatgtcattcagccagacgcgaagaaagggcggcaccgtcgaatgtatgcgaacggtaccgcccttcttgggtcagttatcggtatagatgccgattagaagacctccaccttctcgatgtacagctggttctgcggcaggctacccgatggcacccacagcagcagatcctgcgtattgacggctttggtgaacttcacctcagtagtgccaccttcagcaaaggtgaattcggccacctgctcgccctgagtggggtctccagtggtatttgcgcgaatatagcccttaccaccggatgtgcggatggtgataaccatgcggtacgcatcctgcggctggtcaaggtgcatgtagtatgcgtacccggattggccgccaggattcgacaggaagttggcgctggaaatcgtaaacgccgtgttgttctcatggcgcggttgcggagcagcgctggaatccttatcgccggacttcttggccttggtcttcttggacgacgaatcagcagtctcggacttcttggacttgtctgatgccgagtccctggattcgctctgagtggcatcactcgactttgaggaatcgtcagtggcgccaccgttcgtcgcgttcttgctgccaccgaatggcacagcgtcagcattgatatcgggccagtcaccttcactggagttgctggaagcatcggcaggattgtctccggaggatcggaacgcatgcactgcccaaacagccgctgccactaccaatatcagagccacaatgatggcaacgaccttggtcgacagtttgccgaacagatgttcatcgggcagcttgctgtcatcctcgtcatccggcacatccttcggtgtgaagctcggaggaatggcgcttacttcggcaatgcgggcctgctcctcttccaaggcacgcagcgattcctcaccgggggccacagcacggccgctgacatcgaacacgggaatacgactggtcgtctctcccacggtggcatcggaaataccgccggtaacaataggcaccgtcaaccgagtattatcacccggaccgccgatgggggccggattcatttcgctgtaccagtcaccggtgtcttcaccggaaagattctcgtgctcccaggcgtcagaaaggttgaagtcaaacagacggcgggcgtcagattgagactggttgccgtcagcagtactggacccatcaggcagaggagccggtgacatcgcgtgcggagcggggacggcggccggctgaaccggcagggaaggggtaatagacaattccggaagactgctgctgttaatcaacgtgctgggaataggcacgatatcggtctcgttggcgggcttcagtatcgccttggtaatcgagcaatcgctttccacgctcggcaaagcgatatcagcatcgctcagttcagagagcggcttccaattacccaacaaggcgtcgagttctacaagggcagccatcggcaacgtgtgctcgtcgggcttgcttaaggccaatccacgcttgcaaatcacgcggaattcgccaggggtgtcttgcggcaaggcgcgcagattgaatgtgggtgtcgcttggcttggcgtgcgtgtcagcagggcatagagcaatgccgcaagctggcgaatcgcataccgttcaggaccgtccgtacgcagatcagtagcggacgtgtcggccagcatcgtggcacatggtgcatcggcaatctgcacaccggaggtagtcactcgaacggtgtcggttgtgatgacgatgctgctgggagtatccgcaatgacctcgcgcagcacgttggcgcattctccgataatcgaccggatggcgctgtagctgagcggcttgtcggtatccaccatgtagtcagtcaggcattggccgctgtccaccggcatgacaatgagaagtacgtcggattccatacggtatttcagtacgggaatcacacgatcagggcgagtggcggcgatgcgaccagcgagctcatcgattgcggcgaaagcgctgcgattggtaatgatgaacagctggcaatcctttgccagcacacggtcgttggctttccatgcctgaatgccaggctcctcacgcaacgatgataccaaggtgtatcggttgagaatcgtgtctccgagttgcggtttcatagtgcgttcggctccgtgtgattggtgttcgagactggtcttagatattctacgtgtggggctatccttgacgggctccgtctcaggattgatttgcgtatcgtcgactttttccggctgggctgtcacagcaacgtcctcactggccggagtcttgtgtagacgggccagtatcgagtgataggcgctgatgagttccggggtgcgtatcacccacaacacagccacatatactacggccagcacgatggtgagcaccacgcagatggccagtgcagaccaccagctcatgtgcccgcctaccgatcgaatatccgcgccgaacagtgcgactaccggtcgtttgatcagccagaccacaactccggaagccagcgccgccacaatggccttggcatatgtcctcgtgatctcccgaccgccaagattgccttcgaacttgcggcgcaacatcatcaatgtcagcggcaacgccagtaatccgccgagtgtcaccgagcaggcgatgccgagtacccaatgctcaggaggaagtaccatcatgccgatcatcatgaataccgaggtgaacccatactgcatcaccgcggacaggaaggggtgcaggccgtcctcaaaggcatagaacgtgcgctggatcaacaggaacgccgatcccaaaggagtgcccacagatagggcgataagcgcgtaggaaatcagcatggtctcgtccatcgagacggacggaagcaatgcgcggatgatcggttcggggaacacaatcatggcggcggcgaagaatatgatcagcagccctacgttgttcagcgcgctcaccagatcgtgccgtgcctcatccagattcgcagctgcgacagaacgggagattttggggaacatagccgtggataccgatacggcgatgagcgaatagggcaggatgaacagtgtgtacgcattctgataggtcgcgttgcctgccacgctgaacaggctggcacccgtcagttcgtgggcgcgctgcggtgcggatgtggcgatacgggtaaggataatgccgcagatctcgctggtgaccaccacgcccaaagagcctaacgccacgggacccatagacctgagtccaaagccgccaagcccgaagctgggtttgtacttgaacccgatacgggccagcggcaggaacagtatcagcgcttggaaggccacgcccaaagtccaggtgcctgcggtaagcgcgattttgtcggcggtccagaattcgaggggctgttcattggccttgctgaacagcagaataaaaccagtaaaaccggcgcaactaataatgttggcaccggttgagctccacgcatacgtgaggaaatggtctttggcggccaggatctgacccaataccgtatacaggccgtagaagaacacctgaggcatgcaccacagggtgaacgaggtggtcagggctatcatctggtgatcgtcgctacccacgtacaggcgggcaagcagagggctggccgccgccatcaccacggtcatggccaacaggatgccgatggccaacgtaaccagacgattcagtcgttcttgggcgtctttttctttcaacgtgcgcacgatctggggcaccagcacggcgttgaagatgccgccggacaccagcgtgaacacggattggggaatcatggaaccggcctgataggcgttggccgccaatccagtggtgccgatggccgcagcgagaagaatcgtgcggagctgaccggtcacacgggaagcagcggttcccgtggccatgatcagggaattacgacctacggttgaactcattcgtcggggtccttcttccgatggaactgccgccacaggccgataatgcacagtagcacggcgaagccgatgataatgaaaccgctggcatcactgacgcgcatcacactggtgatcgcggtatcctgcgtgttgccgaagctgttgccttcccggtcgctcagcgacacatgggccgtcgatgagccggaagtggaaacgcggatggtgaaggtcacctgagcgtcgctatgcgcgggaatatcgatgtcagtggttcgcgaggtgacgatctgcatggagtcagtcagcgagttgacctgcacgctgacggcataaggaaggtcattgctgacggtgattggcattttcgcggattcgctgaacacggatattgattccgatgggttgatgcgtacgccgttcagaagatcgctggccagtgttttcgcggcgttgaccatggcttttcgcgtggctgtcggctggggggagccagacatggaccgcagcgccatatcgtcatgcagcaccagtagagagccaatccattgcatcggatcgttgctatgcgaggcggtgtcattggcgtcctgccgggccagggcctgcggggccaacgacgagacctcgtcggaatcaatctcgttcctcaatatggaggtggccatgcgcatgatgtcatgccggctgtcggccaactgtctcagtgccgaccgggtattggcggtgttggcatcatctgccttgtcgggattgaccgaatcgctgacatcgtacggatcggcctcggccatggtcttcaggtccgtcagattcaaccaggacgcctgctcgaaggcgctcatcacctgatcgatccagccggcctccgtggtgcgggagaacgtcataagcaggtatcgggatgtatagggctgttccatctggtagaacgcgctctgagcgaccagtcgggccaaccgaccggcatcgctggactcggcctgcgcgtccgtgctggtggcttggcccttggccagcatgcccaaggtcgattgctccttcagcacggtgacatcgccggcaggcgtatccaccacgtaggtgcctgtgtgtacggcttcagtctggtcggcatcgaaagaggcatcggcaatcaccgtgtcatagccctgctcgcgtgctgcggtcagcgcatccaacgtccaacagttgttgccctgccatgcgtacgcggagggtgtttcggagtcgtttccggcggcataccatgcggccgcctgcttggcgttccactgttcagtggtgatgccggccttttcgtaggccgcggtatcacccagcgcggtataggcggtgatgtcaaagtcggcgggctgcatgatgccggcaatggacggttgcactgcggactgacgccaatacagaggatccgcgatcacttgcagcgagcggtgcttggcgaatgtctgcccaagggatcgcgcggtatcggcatcctgctcggataaggatatggcttgcgtatcagtggctttggccgcgttgccggcgtcggcgttatcggacttgtcggccttgtccgtgctgttggacttggacgatgttgatgtcgaggaagtggtggtttcggcaatgcgattgctgatggccttgttatcgacctgccagccgctggcggtgtagggcatggccacggtcaggttcatggccggtgtcgtcgcggtgttgagcccatccgaagatcgggtcagaaaactcggcaaatcggcgagtatccgattgccgacgatatacgacagcatcagcggcttcggcccccagctccctatggaggcaagggtctgctgattggcgttcacctcgatggtgacggtggcagtgccgccggcgggaatcgatggcacgtcaacggaacccaactcgttgggggtggggatgggggcgttgttctcggcccaattctgaatatcggtgcgcgagacaaaggtgaacagcgtattggtggtcaggtgcagtgtgccgcttgacgtggccgtgctgtccgtattgctgatgaccgcggtgacatgatagcccgatttggaggtgacgatgggggtgctttgcgtgatggcaatgctctgcttgggctgattctcggtatgattgcccgttgcgtccgtcgtatcggatgaatcagtcgtgtccgtcgtatcgttcgcgtaaacggtcaatggagcggccagcatcgccacaacggcgacgccagccgccagtgcgtgtgccagacgtgtgcaatgtcgtaagactccgggtaggttcactcgtttgcctgcctgttcttcttcctggcgtagagccacgcgattttgcgttcgttgggatagctcaacacgtcatccaaatcttcaaaacgtacccagatggcgtcttccgcctcatgatccgggtctccttccaccgtcagttcgccgccggtctgtttgagcgcgaagtgatggaccagcttatgcacgcgctgcgtggtgccggtgaaccagtagtcgatggtggcgatggaatcgatcacctcgcccagaatgccggtctcttcatgcacttcgcgcacagcggtctgctgcggggtctcacctttttcgatatgccccttcggcaagcaccattcgagatggccggagcgggaatgacgggcgataatggccacgcgattctggtcatcgaaaatcagaccgcctgccgaatattcgcgtacgaccggcagttcctgggcatccagtgaagcgaatgtggtcggaccgtccgacgtacggcgttgcggcatcatggccggagtcgggctggatggcgtcaccggttctactggcactgccggttccggcgaggcaacatccgcggacggatgccggccgaagaccgtggccggcgtgggatgcgctgacgttgcgggcctcactggtgctgcagacggcgctgagaccggcatggtgaccggcgttgcggccggtgcggtacgtgccgcaggcggcatcagcacgtcgcgcggagtcggtatcgctgcggtatgcgcggcggcggccttggcgaccgcaacggcagtatctacggccgcgtgggcggtcgccacggaatcgttcgtgacgatggttacggacgtttgtgccgtggcgataatcggctcgaccttggcaatcgtctcggcaccggcctcgccggcgataccatcggcctgcccctcgatagtgccgctggtagtggcgatggtgacggtggcatgcatgccgaagacggtggccggtgtgggcatcatcggcttcggtgtgggcatgtcgctggcggcgtccgatatttcggattcggatggtgcgggtgtggcgggcgttgcgggtgtgccgggtacaccggaatgttgcgcagtcggtactgcgtctacttcgtcttgatgaacggcctgattggtggagtggctcgcggtgccgtcgacatcgggagaatcgcccgaatcggcggaatgatgcggagtttcggacgtatacagcaggtggtcttgggtatggctatccgccgaatctggtgtttgccccagtatgcgggcaaggtcggcgggcgtaatcatattctccaccttactcaaccccgtgtgcaggtggggtaacggtatgctggtagggcagaaaaacgtcgcacgcgggaaggtgcccattgaatttcgaagtatggcccgaagccatcgaacttggtcgactgttcgccgaacagggttacgagctggcattggtcggcggcccggtcagggatttgctgctccatagaaagagccacgatttggacttctgctcatccgcacggcctgagcagttcgagccgatactgcgccggtgggggcatgacggcttctgggacatggggcgcaagttcggcacgctgggtgccatgcgccgccgcccggacggcaccgaggtcaaggtggaggtcaccacctatcgctccgacacgtacgacacggactcgcgtaagcccgaggtcaattatggcgacacgcttgagggcgacctgtcccgccgcgacttcaccgtcaacgcgatggccctgcgtgtgcccgacctgcaattcgtggacccgttcggtggtgccagcgatctgtccaagggcgtgttgcgcacgccggtggacccgcgacagtcctttgacgacgatccgttgcgtatgatgcgcgccgtgcgattcgtggcccagctgggcttccgtatcgcgccggacgcggccgaggcgattacctcgatgcgcgaccgcatcgacatcgtatccgccgagcgcgtgcgcgacgaactgaccaagctgctgctctccgaccgtccgcgcgccggccttgaggcgttggtcgaatccggtcttgcggacatcgtcttcccggagattccggccctgcaattgcagatcgacgaacaccaccgccacaaggacgtcttcgagcacacgatgattgtgctcgaacgcgcgatcgccctggaaaccggcccggacggcccggtgcccgcccccgacctgacgctgcgcttggccgccgtgatgcacgatatcggcaagccgaagacccgccggttcgagccgggcggcaaagtgagcttccaccaccatgacgcggtgggtgccaaaatgacccgcaagcgtttgaaggcgctgcgttttgaccaccatctggtcgaggacgtctcggaactggtgaatatgcacctgcgcttccacggctatgtggacgagccgtggaccgactcggccgtacgccggtatgtcaaggatgccgggcacctgtacgagcggctgaacaggctcacgcgcgcggacgccaccacacaaaacaagcgcaaggcgatgatcttctcccaggccatggatgagatggaggagcgcgtccgcgaactcaagaagaaggaggacttcgacgcgattcgcccggatctggacggcaacgaaattatggagttgctgggcctggagcccggcccgatgatcggccgcgcctacaagcacatgctggaataccgcttggataacggtccggtggaccacgatgtggccgtcgacgaactcaagcgctggtacgccgagattcagtagtccgatactagtccgataccaaaaaaccgtacgctgaatacgtgtcagcgtacggtttttcgcgaagatgaagctgtatgcgccttactccgccgtgtatgcgtcgtgtttggtgtcggcgggcagcttggtcatgctatcggcggccttgcaaccctcgatattggtgatggtcttaccggattgtggggaggatttggtgtcctgcagatcgttgaacgtggcgccgatgaccacatcgatgagttgatcctcgcgagccgtcatgatcatggtggcgtcggtgaaattgccgatcagcgtatacgcctgattaatggcgttcttgccgaagtagatggtggtgcgttcaacgccggtgctggaatagttatcgattttctgcacgctgaatccacgattggccaaagcctcacccacggccttggcgaattggccgtgagaggtgccgttcatcacgcggatgccgaccgaagcgttggacacgtattgcgctttgccgctgctgtccttgaccgcgcacggtgccgcgttgccgtaattcggctggcgggccggagtctccacttcgccgaggccgaaaacgtggaaattgaacagtagggctatgaccagcactactgccaataccgcgccgctgatggaaaagacgatggtctggcggtggcgcacgtacgccttgcgggcttcacgttcatcaacctgatacgtcatcggtggacttctttcatgggtcgggtggctggttgctaccttagcgtcactgtctgacgccgatattggggtgtgcgggagatttggctcgaataatgcgatcgaccacagccgtatcgcgccacacatcgataatgcgttgtgccgctgcctcgtcggcggcgaaagcgaccactgaggggccggatccggagacgaatgcatggctggcacccgcctgcgtggcggcgtcgatggcctgcccgctgcggggatgcaggctgattgccgcagcctgcagatgattgcggtcgccttctgcggctcccacgaggtcaaaggtgtggtagacctcaggagtgctgagttgcgactggtacgcgccgaccaatacttcgccgctgaatccctgttctatcagcgccagctcatcgcggctgccgggggcgatatccgtgatgcgttcgccgaaaccggtgccatatgcaaggccaccggtcaggcagaacggcatatccgcgcccaacgtggcggcaatggtgcgcagacgctctataggccagttcagctcccagagacgattgaccgccagcatggtcgccgcggcgtcggctgaaccgccgcctagtccggcacccacgggaatgcgcttggtgatggtcaacgccacatccggctcgcgctcggccgcctgggccatggcgaagagggccagtaccgcatggttgcggcgcatgtcgctgcgtgaggaggccaagtcgcccaagtaagcgccttcgagctccagagagaatcccgctccgggttgcttggcggttgcggtgacggtgtcgtatacgccgattgcacagtaggtggtgtccagttcgtggcgtccgccccattcgtcgtgagcaggtcccacttccaaggtgagattggttttcgccgggcaatccaccgtaatggtgatgggggagagctcatcgaactgatgtcgggcagcggctgggcgtggatgtgagattaccggactcattgtgcctcatctccatctccacacgattcgatggccttggccagagcggtgaattcggcgatggtgagcgtctctcctcgacgggtcggatcgatgccggcgatggagaatgcctcggagggcgcaatggtcttcaatgccgcgtgcagggtcttgcgacgctgaccgaacgccgcatcaatcagacgaaatacgagttcccgttgtgcgccgccgtcggccgtgctgttcgaggctgccggggcggccgggtcatcggcctgataccgggtgaatctgacgagcgcggaatccacattgggagccggccagaacacattgcggccgatggtgcccacccgttcggcggtgccataccaggcgagcttcacgctcggcgtgccgtagatcttggaaccgggcttggcggcgagtctgtcggccacctctttttgcaccatcaccaagaacgagccgaggttgtcgaaacgctccaacagcgtgagcagaatcggcgtggccacgttgtacggcagattggcgaccagcgtaaacgatgcgtcatcgctgaaatcaggcacgttctccggggtgacggttaaggcatcccgattgacgacggtgagtcgtgacgtggcttcgggcatgaattcggcgactgtgcccggcagtcgttcggccaacggcggatcgatttcaactgcggtcatggtggcgccggtttccagaatcgccaatgtcaacgatcccaggccggggccgacttccatgacatgatcggcagcggtcactcccgcctctcgtacgatacgacggaccgtgccggggtcgatgacgaagttctgcccgaatttcttggtggggctgatgccggcatcggccgcgatacgacggatatcggcggcgcctaacaggtgaccggtggcgggaatggtgtcgttcataagcgtgtgttccttgtgggcttcgtaaccgatcagtaccaaccgatttgttcggaatgttgccatgccttggacgggctgccgtaggcttgtgcgatgtaccacagaccccaatcgatctgtacggcggcatcgtcacggtaattggcgccgaacgcagccattttgtctgctggtcgcgactgaggaatgccgtaggcaccggagctcgcgttttcggcataccacagccatctggactcgcggttccatagtttgaccaggcaatcccagtcgttgcctgtccacccgcgctgcgcggcggcaccggcggcataggcctgagcctgggctacggtggcgtgccagagtcggccggagggcgtggtggttgttcctgaatcggagccggaagagccggaattgttgttcgtaccgccgccggtgttaccggaattaccggtgttgccggtgttgccggtgttgccggtgttgccggtgttaccggtgttaccggagttgttgcccccggtgttgccggcattgttgttggtatcggtgttcgtgttgttgccagagctgctgttgttcttgtcgcctgtgttgttggcattgttaccggacgactcgtgctgattgttggaaccggaatcggccttgccgttatcggcggagtcggattttttgtcggaacctttatcggtatcagacttggcggcgcctacggcgatgatctggtcgatggccatcgtggtgacggtttcggatttcagcgtctccgattcggccacgccatcgacatacgtgacgttatacacctgggttttctcgccattgacgccttgctggcggatctccgactggccttcaggcagattggagtcgatgatggtttgtgtggagtatggcactacggctgtgcgtgtttcctcgccatgcgtcacgcgccgtacgcgcaggatagtggtatcgccgtccttttcgacgctcacacggtcctctttgttcagcacgatgcctttggagtcaagaatggaggccgcaggcagtttgccgttgggggccacggaagtcttgccgtccgcaatgacggtgaccgggccatcctgattgatgaccagtccgccggtgagctggttgtacacattgtcgatgtcgacggtgatttttgtggcgttgttctggttttcctcgaaaaatcccagcaactggtcggcactggtggccacggtccagaagggaacggacgtgccgtcgatgttgatagtggtctggtaggcggactgtacggtgaccacggcatgattggcgagttggtcgccggacgaggtagtgacgatatcgtgggtcttgatatccaccccttgttcctccagaagacgggtggccgtcatcgcatatgtggtgacttgggtggtttgcccgttgatgttcagggctacggatttacgcgcggtgaacgcgaatgatccagccagcgcgatactggtcgccgcgatacaggcgattacgcggatgcgacgcagtgtaacaaaccgctgcggggtccaacgccgtgccattgccatactcttcctgctggatgaacgattacgccacccatcgtaacggttgttccggcccgtactgcggtttcaccggccaccgtcaccattcctgctcgtcagattgttctgagctcaaaaaaagaaaagaaaaagggggcgggagagaaggggatgttcccgcccccctgaaggcgcggagctggttgggggacgctccgccctcattccaggaagcccatagttgggggaaggctcctggagtacttacccaaggtaagaattatatgcgtagaaaagtctacgtatcatataatacgccacttttctacgcgtcgagcctcttgtcgggatcgaaccgacgacctgccgcttacaaggcggccgctctggccatctgagctaaagaggcgattgttcttaacgcgtaaatcgttttgaacaaatctctagtataccggtagttctcgagtggtcaattcaggccgagccgcgccggtaattaatcggccagcgaaatcggcttcttgttggcgccgatcgatggcatctggccttccacgcccacctgatcggagtccaagccgatggacttgaggaatccgtccaccatgctggtgtccgccagcgtgagctgcttcagatcccagtattcgccattgatggtgagcgtgggggaggagaacgcgccggagctgttgaacagttcggggcgtaggatcgtgtagttgttggaggcggtgagccacttgacgtattcgttcttaccactgaatgccgcggtggccacatcttcgctcacgccggcattgacggcctgcttctccagcttggcgttgcttaccggctcgtaattggacaattcgcccggctggaaatcctcagcgtagatgttggagaggtagctcatgaggtgatcgggattgtcatcatgctcggcaatgtagatggcaccgttgaacgcgcggttggagtagttgtcggagctcttgttgtcctggaaattgaggaagtgcaaatcgatgttgagctggccggcgttcatcagcttgacgagcgtcgggtcaagctggcggttcaccgaggcgcagccggggcacagcggctccatgtagatggaaacggtgggcgccccttcggccttctgaccgtaccccttgctcgagatcacgaagccggccttgtcatcggcgttggccggctgggtactgactttcttgagcttgctataggcctcgtccacggtcatgttgctttgctggctactgctgctggtgttggacggccgcatagccttgtatacggcgaatccagcgatggccaccagcaccacaataatggccaccacaatgcagccgatgatggtctgctgcttacgttccttagccgcctgctcggcccgtgcctgctgggcggcctcctcggccgctcggcgctcagcgcgtgtggcacgcttggcctgacgcttcggatctgacatagctatccccttgcaatcgcttcaatgtttgggccccatcataatgaccgggcctgaggaggactgcgcccagagctgatctgaggtgaattccctgtaaaagtgtgacggaacgaacgtatcggatacacaacggccatgtgtgcggatggctgatgtgtgagattccgccccgctctaggcgaacggcatccagttgatcggcatgcccagaatcggcatcgcgcacaaggccacggtgatgatggcccatatggtgaacagcacggtgccgcgcccgccgcccttgggcgccggcgccactggagcaggtggagccccacccacttcggtggatggcgcgcccgccgggcgactgtgtttgagcccgcgcagtacgccgccccccagccgaatcatcatcgactgtggggcgaacacagtgaccagccagccgatggccatgaaaccgcccagcgccagcccggaagcggagaacggcacatcattgagcaacggcaccggaataccccaatccgcggtgaaataccaggagatggtgtgaacgggcagtgccagagccgcggtggccacggcggttcccgccatatagatgatgactagcagcagtatgcggggaatggccagtagcagggctttgaccagatgccagggaaaagtcgccacgcgaatccacgaatcggagtttttgcgctcgccgccgcgtttgccctcgcgctcaagctggggttcggtgttataggccagggtgagcagtagccacaacaacgcagtggccgcgatgatggccacgagcggagcatttgccgccagtgccgccagcggcgccgccagcaggatcaatggcagggtgccgcgctgcagatattcccctcgcttcacgtccaccggattgggcatgggaggattttggaccatggtttcggtgggggccgcttgggcggtttggtcgatgatgcgctgcaatgccgggcgaatggcggggtccaccgctgtgggctggttgcttgcgggatcccagctgctctgggcggtgccggacggggggaatgatgacggctgcggcgtggggagtacggtggtgcgctcggccagcggcgtggtcggggccggagtcgaatcggtgttggtcattggtgtggtggcgccggccattggtgtggtttggtccggcatcggtgtggtcgcgccggtgagtacctgtgtgccggcgtcgtcggtgaaatcggcagcagcgtcggacaacagttgcgtggcctgctccgcaccggccggcggacgtggcggcatatcggctaagggcagcgtggcggtagcggcgccagccggcgagaatacggcggtttcgccatcgccgttatcgcccttattgccggagaacacggccatggtgggagcctcagcggcttcctcggccgcgcgccagatggttcggggattattgcggtcaacgccgccggccgcgccaaaagggggcatcgcctccgcggcttcggcaacgatcgcagccggttgtccagccacggctcccgcggcgaacggtcccgcctgctcgccctgccaagcgttgggattcaacgcatccaaggcgatggcattcagcaattgatccggcgtgcaacgatccctgcgatccgggtccagtgcagaatggaaggcagccaatgtgccggccggtagtccggaaagattcgcgttgcccgaggcctcgcgctcaagtaccgccatcatcggcttggtgccgaacacaggcgcgccggttgcggcaaaagcgagcacggacgccaccgaccaccaatcggtggcgtcgtcggattcggcaccgtcaataatctcgggtgcgatgaatccgggtgtacccatcactaggccggtgcgggtcacatgactttcgccctcgcccatcgcgataccgaaatcgaccaataccggtccggcggccgacaccatcacattggtgggtttgatgtcgcgatggacgatgccggccgcatgtacggctttggtggcttcgatgagcttgcgggccaagcgttccagatcgtcgcccacataccggccattggcggccacatcatccttaagattcttgccctcgatgagttcagtgacgatgaacgccaacgtatcgtcgagttccatatccacgatgccgcacacacccggatgattgatcttcttcaaggccatggcctcgcgccgcaggcgctcgcgcggcgtgacatcgggcttgaggtcggggtcgtgcagggccgtggacgcagagccggagcctgccactgactcgtcggtcagggagtcgcgcagaatcttcatggcataggtggtgccgccgtcgtcgcgcacccgccacaccgaccccatagctcctgagccgagccgggagatcagcgtatacccaccaaccacttcgccgggctcaagattcaacgcgttcaaatcgctcatgccctccatcctaatgccttgccggtgcattattctggctctctcctgggaggccgagcttgatatttcttggctcccctctctgagaggggagccaagaataaatgccgtttacgtattgagaagtgccgtttacgccattaaggtcgattgccctgaccggatgtggtagcaaattatgcgctcgaaatgacaggataggtgcgtgggcaggtgcgccagtcgtgaatttgcgactctataaccatcggcatcaaggatgtgtcggcggtgacccaaaggtgagccagccgggcacattcaacagtggcacagcgatgcaagggcagtatcgtgagccgctgatcgaatcgataacgatatcagattcgaatgccgcgacttcgccggtcgtaccttcgaatacttctccgaagacggctacctgttcggcgtgatggcctcccagcaggtcgctggcgctcaggccaaggcctgaggtgtgtctccgataactgaatagctaaatagaatggacggcctgctgagtgctactcaacaggccgtccattgtgtatctgaatgcgaaaagtcattatatggaacggaatatatcgatactgtgcattgtgccgattactgattccgacgcaagtattcgcgcaggaagggcacggcaaaatcgacttcgcctcgttctgtttcgcggataacgaaggcgtcaaggaggcgtttgcggtaggtggcggcatagttaggcgttttgcccatgcgctgtgcaacattcacggtgggagagggaccatctgacgctgccatggcttcgagatactcacggtcgtttttggataagccttgcaactccgggatgcacacggcgttatcaaggtcaatacgtgcttcctcgatacctgccgtaacatcagcgtcgatgatggtatccgagtcccgcatgtctgcggcatcccagatatggtagccaaccagttgaatcatataggggtatccggctgtcacattggctgcagtgcttaattgagcgtcggtgatggacatgccggaggcgcggaatgttgtggcgaaagcatcgcgcacttcatcaagaggaatatctgtgagtatgttcgttttcgcgcgacgtaggaacgtgatgacttcgtcattgaacaaatcagaaatcatctgtgggagaccggcgaacacgatggcgatattgcgtcgttccctgatttgatgctgtatggcagtggcgatggcaatcatgtcggatcgctcagccgcttgagtctcatcaatggtgataagcaacccagcatggcgcttctcaagcgcatccaaccgtccggcaatggcacttctcaacgtttcgggcatacgcttcggggatagttcggcttctccgaggccgatgcccgctccagcaaaagtcaatgatggtcggatagcgaggtggtcaagggcccctcgcccggttcgtaaggcatcaacaaggcgttcgcatagtccggcagaggccgtttcttcgatgacatcccatctgcgcgctttggcccggtctccgaacacagtgagcatcacggtttttccggttccacgagcgccggtgacgagcataacgcgccctggggcaccgactccgttatcgagacctttctcgaaatcgcggataactttgcctcggccgatgagcaggggcggttcccctcctgccgttggcttgaatgggttttcctttgccttcatgtggaccgcctcctcgctgaatcaacctaaaataaaaattatcaaaagttgggttgagccgactgaagaaaacagccgtggcgacaatgattctgccgcaatccgcggtgacaacaactgacgcggaccttcttggcagaatcgttgtttgtcccgcttcgccaatcaacgtcgctcaagttcggtgcgcagaccggctaccgtagcggtcagctcacgcacttcctcgcgcaataggtcgatttcgggattggctgatgttgcaatagcctcttgcgcggcttccttggccacttccttctcccgagcgtcctcgcgccgatccgtctccagattgacctgatccacgatccacgaagccagcgtggccgtcacaataccgatcaacgcgatgccggtgaacatcagcaccaccgcaatgatcttgccttggaaggtgaccggcgagaagtcgccatatcccacggtggtcacggtcacgaacgcccaccacaacgccgtgccgaagtcggtgatcgtggatccggacgccccgcgctccacggaatacacggccagcgcgcccacgtacatgagcattcccaccgcgccgaccgcgtatacggtgatgcgcccgcgcaccgccatgccggaggtgcggttcagcacgtgcagcacggtcagcaaacgcaacagtcgcaagggccggagcatcggcagcgcgatggtcagcagcgtgaacaggttgtgcttgaaccactgccagcgatcgtcggccaaccacagcgagaccacataatcgacgacgaacaccacccagatcacgttgatgacggtttcacacagcgcgatatgcgtgcgggagagaatttcccacgaatacaccaccagaaacaccacggacagcaccatcagcggccagtccgtccacttcttccacgtcttcagtcccatattccgattgtagtggcgcgtccgctgcgccactgcggagcatgactccggacatcagtgttgtatacgttcgtatacatttcacgttgtgtacgaacgtatacagcggtatttttcatctcgtatttcccttatgactatcaccacagtgatataatcaagaatatgtaaggagagagaaggagccggccaatggagaccgcatcgatcgaactgtggcatggctcttcgcatgtcatcaagcatcctgaatacgggctggtcaagccgaacgacgattatggccgcggattctattgcacgcgcagcgtcgagctggccaaggaatgggcgtgcgcgggaatggatgacggtttcgcgaatcggtacacgttgaccacggacgggctcctcttcctggacctgtcccagccgccctacaccatcctgaactggctggccatgctggtcgaaaaccgtcgtttccagccgaccaccgccgtcgccgcgcaaggcatcgaatatctgaaacaagtgtttctgccggatgccagtcaggctgacgtcatcgtcggatatcgtgccgacgattcgtatttctcgttcgcccgcgcttttgtcaataacgcgatttccatcgaccaactcgctgaggcgatgcggttgggcgagctcggcaagcagatcgtactcgccagtcctcaggcattcgcggcactgcggttccaaggctgcgaaatcgcccgcgcttcgacctaccacggattgcgtaacgagcgcgaccgcacagctcgcgaagcctaccgccgcaaaagtgcagaagccgatctcgacggcctgttcatgcgcgacatcatccgcgagaaagtgaccaacgatgatccccgcctatgatgggacatacttgccggacgccatggccaacttggccggcgccttcgattatgcgctgaacgattgcgggttgccggtcggcctattcatggacttcttcgccacctccgaggcggccgcgcttttcgggcgaggcacgcccaaatacgtgtgtggcatgtccggcgaggagctggtggccgaagtcatgcggcaaaccggttgggcgcgcattctcgatatgccgccagccgcactgcgcgccggctcaacacccgaatactgggccggatgggtactcgcatactgccaatggaccaggggagtgcggttctcggacattctcgatgtgctgtcgctcgacgatatcgtgcgactgtacccgactctgcacgaagccgacgaaagccgattcgtcgacgtgtacgacgagcgggccgcccataatcgcaccgagggcgactcccggctgcacacgatccgcgtgcgcgccggactcagccaatccgggctggcccgccgctccggcgttaccctgcgctccatccaaatgtacgagcagcgccgcaaagaccttggcaaagctgccgtctccaccgtgctcgctttggcccgcacgcttggctgccgcatcgaagatctgttggagccgtaaagacgcggagtagtatcgcgccgcatcgattctgataactgaacaactacttttaaggcccggccggatgctcgtttggacatccggccgggccttctggctccacacggggtgccgaggtatccgttctccgcttcgaggggctgatttggccttccgtagaggtttactcccgtttcgaggggctggtggcccgctagaacacgggtataaacggcttcgccccaccgtcattccgccattttggggatgcgcttacttgagtaccagcccctcgaaacggagatagatctccggaaagggtcaaaacagcccctcgaaactcaagatggcggttgcagggcggttgaggatcagtcgaagagcggttcaaacgcaaatgtgaacaatgccacatgtgattgggcgggtcgctgcacgccgattttcgggggtgcatgggaatggcggaatatcaacgaaaaaccctatatctaggtttgttatgtgacacgcgccactacatatagtgccttgatttcaaatcacaccgctgtaatatggccttcgcttcactgttcatcagaaccacatcaaggggagtcgccatgaccgtcaccgtgttcaccaagccgcattgcccgcagtgcgatgccaccaagcgccagctcaccaagctgggtgtgccgtttgaaaccgtggacctgacgcagaacccctccacccttgagcagctgcaggccgccggtttccagcaggctccggtggtcatcacgccggacaactcctggaccggctaccgccccgacctgattcgcgaagtcgcccagcaggtggccgccgacaaccgcgccgccgccacggtgtccgcgtgagtctgagccagcccgaattcgcggccgaaggcaagacgatcggcgcattggtctacttctcgtcggcctccgaaaacaccgcacggttcgtggccggatgccgtttgcaggacgaaggtatcaacgtctaccgcatcccgttgcgggccgccgacccggcgctaaacgtccgcgaaccgtacgtcatcatggtgcccacctatggcggcggcgtggtcaagaaagcagtgccgattcaggtcaaacgcttcctcaacgatccagccaaccgcgagtggattcgcggcgtcatcgcctcaggcaacaccaatttcggtgaggcctactgtgccgccggagacatcatcgccgccaaatgcaaggtgccctacctctaccgttacgaactcatgggcaccccggaagacactgccgccgtgcgaaacggcctcgtccgcttcttcaccgaacagtaaatcttgaccccctcgaggtattggctcccctctccgaggggagctgtcaacgaagttgactggggggagcaactgtctgagtaaacacacttctgccatattccaaggatttccaatgactgacctcaccgccaccggcctgccgctcgacaatactgccgacaccgcagcggaacagtacgacccggcgcacgattaccacgcgctcaacgcgatgctcaacctctatgacgccgacggcaagatccagttcgacaaagacaaggccgccgaacgcgaatacgtgacagggcacgtggccaccaacagcaagcggttcgcctccaccgccgagcgtctcgaatacctgatcagcaaccagtactacaaccctgcggtcttcaaccagtactccgctgaattcctcgaccgcatctacgagcacgtggaatccgccggctttgagttcggcactttccttggtgcgttcaagttctacacgtcctacgcgctcaagacgttcgatggtcgcctctatcttgaggacttcccgcagcgttgcgccgctgtggccctggagctcgccgccggcaatgagcagcaggccatcgaatacgccgacgaaatgcttgccggccgcttccagcccgccaccccgaccttcctgaacctcggcaaggcccagcgtggcgaaccggtcagctgcttcctggtgcgcatcgaagacaacatggagtcgatttcgcgcggcatcaacgcggccctccagctctccaagcgcggcggtggcgtggccctgctgctgagcaacctgcgcgagctcggcgccccgatcaagcacatcgagaaccagtccagcggcgtgattccggtcatgaagctgctggaggactccttctcctatgccaaccagctcggcgcacgtcagggcgcgggcgcggtgtacctcaacgcccaccaccctgatatcctgcgcttcctggataccaagcgagagaacgcggacgagaagatccgcatcaagtcgctggctcttggcgtggtgattccggacatcacgttcgaactggccaaacagaaggcccagatggccctgttcagcccgtacgacgtggagcgcgtgtacggcaagccgttcgccgacatctccgttaccgagcattatgacgagatggtggccgacgaccgcatcaagaagacctacatcgacgcccgtaagttcttcaccaccatcgccgaactgcagttcgaatccggctacccgtacatcgtgttcgaggacacggtcaaccgcgcgaacccgatcgaaggtcgcgtgaccatgtccaacctgtgctcggaaatcctgcaggttcaggagccgagcgcatacaacgaggacctcacgtatgcgcatgtcggccgcgacatctcctgcaatctgggttcgctcaacatcgctaaggcgatggatggcggcttgggccacacggtggagacggcgatccgcgcactcacctcggtggccgagcacaccagcatcaacgcggtgccttcgattcgccgcgccaatgaggagggccacgccatcggtctcggccagatgaacctgcacggcttcctggcccgcgaaggcatccagtacggttctgaagagggcctcgacttcaccgacatgtacttcatgaccgtggcctaccacgcctaccgtgcctcgcacgcgctcgccgtggagcatggccgcacgttcgccagcttcgctacgagcgactacgccaagccggccggccagggcaactacttcgacaagtacaccgatggtcgtcgttcgctcactccgcgcaccgaacgggtccgtgcgctgttcgaacagtacggcatcgcgatcccgactgcggccgactgggaggccctgcgcgacgcgattctgaaggacggcatctacaaccagaacctgcaggccgtgccgcccaccggctcgatctcgtacatcaaccattccacgagctcgattcacccgatcgcctccaagatcgagattcgcaaggaaggcaagatcgggcgcgtgtactacccggccgcctacatgaccaacgacaacctcgggtactacaaggacgcctacgagatcggctggaaggccatcgtcgacacgtacgccgaggccacccagcacgtggatcagggactgtcgctgacgctgttcttcccggacaccgccaccacccgcgacctcaataaggcccagatctacgcctggcgcaagggcatcaaaaccctctactacatccgcatccgccagcaagccctggaaggcactgaagtccaaggctgcgtctcctgcatgctctgatcgttcgagggagcgtataccgcctttcttcggcactcgacgtaccttcgtacgccttcggcctcagacggcggtctccgcacgcattgaacaaccagagagccgttgttactcccctcactcggctaacgccgacagctcccctcagagaggggagctggccgcgaagcggactgagggggctccaccatctaaggaaccaacaatgtcacgaaccatctatagagcactgctccggctgaccgcgccggaggagttcgaaaacaaatccaacgacgataacgacaacgacaacgagtaataaggaacactcatggcaccgatttccattccgcgcaaaccgctgaaactcatcgaccgcgtctccgcaatcaactggaaccgcctcgaagacgagaaagaccttgaggtctgggaccgcctgaccggcaacttctggctgcccgaaaaagtccccgtctccaacgacatccccagctggcagaagatgaccgaggacgagcacacgctcaccatgcgcgtcttcaccggcctgaccctgcttgacaccatccagggcacggtcggcgccgtctccctgattccggacgcgctcaccccgcacgaggaggccgtgtacaccaacatcgccttcatggaatccgtgcacgccaaaagctactcgtccatcttctccaccctgtgctccaccgaacagatcgatgccgcattcgactggagcgagaacaacgagtttctgcagaagaaggcggagatcgtgctcgactactacgagggcgacaacccgtacaagcgcaaggtggcctccaccctgctcgagtccttcctcttctactccggcttctatctgccgatgtacttctccgcgcacgccaagctgacgaacaccgccgacgtgattcgtctgatcatccgcgatgaggccgtccacggctactacatcggctacaagtaccagaagggcatcgcccagctgagcgatgccgagcgtctggatctgcaggactacacgtacgacctgctcaacgagctgtacgacaacgaagtggagtacacccagtcgctgtacgaccgcgtgggcctgaccgatgacgtcgagaagttcctgcggtacaacggtaacaaggcgctgatgaacctcggctacccggctttgttcccggctgagatttgcgatgtgaaccccgcgatcctggccgccctgagcccgaacgccgacgaaaaccacgacttcttctccggctccggctcctcctacgtgatgggcaaagccgaagaaaccgatgacgacgactgggacttctaagggtttcgcggtccgcgaacccgcagcgccgccgcgttcgcacgacggcgctacgctggaggcatggaacaggagccgttggtcagcatcatcatcccggtatataaggtcgagaagttcctcgacgaatgcgtggcgtccgttgccgcgcagacgtacgccaatctggagattctgctggtcgacgacggctcgcctgacgactgcccggccatgtgcgacgcctgggccgcccgcgacccgcgcatacgcgtgattcacaagcccaacggcggcctgtccgacgcccgcaacaccggcatcgccggggccaccggtgcgtacatatacttcgccgattccgacgacaccgtggcccccacgttggtggaggactgcctgaacgccatgcgcgagtatgacgccgacctcgtgatgttccagttcgacaccatctccgagaacaacaagccgctgctgtccaactatcgccacaacgacttcaccgaggtgcagatcctgaccccggtcgaggccatcaaaaagcaggtcaaggctgagatcgacggctatttttgggccttcctggcacccgcctccacctatcagggcaccggattctccttcccggtggggcgcaaaatcgaggatctctcccgtatctgcaacgtgatcggcgaggccacgcgcgtggtccgtctgcccaaggcgctgtaccactaccgcatgcgcgagggatcgattaccgccaactgggatccgcagctcacccgcgactggacccgcgccgccgacgaccgcgaggaatacatcgtccaccgattccccgagctcaagggcttcatgacgctgcaacagctgaatttctttgccaacctcgattacgagaccatgcgccagtcgctgatcgccgggctcaagatcgatcccgaggacgccgacgcgcttcgtcgccgcatcgagggcctgaccaagtccgccgatgagggcgatgagcccgtaccggaaacgttgcgtgagttgctcggactgctcaagctgggtatcaccaaggtggccgatggcacgttcggtaaggccgatggcagcggtactgatggcgatgccgagaacgatgacgtaacgctggccgaccgtttccgcgacatgcgcgaggactggcgccagctgcgcatccagcgcatcgaaaacgccgaggagcgcaaggccgagcgcaaagccgcccgcaacggcgtcaccttcgagtctgtgttgcattagtcggcgactgatggaatccgtcagttcgggaaggcaggcctgctctacgccgggcgtgccggttcgcacgttcgagaaacaggcgtgtcatgggccgaaccacacaacacccccagaaacgcccataaagttaactacattttcagacacgccacttgccttggtccacggtccgtgtatagtagttctcggctcaacgaagagaaccttcactgaaccggaaaaaagtaaacgctgaagcttgcagtttccgaaagcaaagttgtacgtcggtggcgagggcggaagcgcagtaaagaacaaatccctttacaacggatcgtgaggcacgtacctgcctctgaaaggattagtaattatggcagaagtcgttttcgaccacgtcactcgtatctacccgggcaacgataagccctccgtggatgatctgaatcttgatatcaaggatggcgagttcctcgtcctcgttggcccttctggctgtggtaagtctacgacccttcgtatgctcgccggcctggaagaggtcaacaagggccgcatcctcattggtggcaaggatgtcaccacgatgcagccgaaggaccgcgacatcgcaatggtgttccagaactacgctctgtacccgcacatgaccgtggccgacaatatgggcttcgcactgaagatcgccggcactccgaaggaagagatccgcaagcgcgtcgagaaggccgctgagatcctcgacctgaccgagtacctcgatcgtaagccgaaggctctgtccggtggtcagcgtcagcgtgtggccatgggtcgtgcaatcgtccgtgagccgaaggtcttcctcatggatgagccgctgtccaacctcgacgccaagctccgtgtccagacccgtacccagatcgctgccctgcagcgccagctgggtgtcaccaccctgtacgtgacccacgatcagaccgaggccctgacgatgggcgatcgcatcgccgtcatcaagctcggtatcctgcagcaggtcggcgccccgaccgagctgtacgatcgcccggccaacgtcttcgtcgccggcttcatcggctccccgtcgatgaacctgaacacccacccggtggtcaacggcaaggcgaagatcggtgaggacaccgtggacctgccggctgaggccgtcaacaagctcaccgccgaagacaacggccagatcgtggtcggcttccgtcctgaggacgctggcctggccccggctgacgacccgaacgccttctccctgaaggttgtgaacgtcgaggatctgggctccgatggctacatctacggcaacatcgtcaccgatggctccgccgctgaggcttcccaggtcatgtccgaccagaacaagctcaccacgattcgtgtgaatccgcgtgcgctgccgaaggttggcgcgaccgtcaagatcaagatcgacccggccaagatgcacctgttcgctccgtcgactgagctgcgtctgaactaatagatacttggcgaggtctaatcgcttcgtcaaccattaaacgaggttattctcttcctctcttatgacctcgttggaaaagccctgcatagctgcggggcttttctttttgcctagaaaacgtacgctaaccggcccccgcaaatgaacgttttttgttcttttgtcaacttcttcctagagaggtgatatgatcgtatgcagtaacctcccgaaaaggggattgtaaatctatgaggggaaacgatgggctcgaaattaaagctcggccgttgcgggtttaacggaggagcagaacaggaacctggacagcatcgccatgtcttgcggcgctgccttgcttcggttatcgctgtttccctgtctactgtgtgcatggtgcctgcggcatatgcccaggacgtagatgatgtaaatggttcctctaactccgtaattcttgggggggggggtaatactgtcgtagctgctccttctgctcgcaatgtcaatgttgacgataagacgtcagaagagggcaatacatcaaacggtgcgccagcaccttctgaaacgaatcagggcgcgcagcaagattcatcttcttcatcttctactactggtggttcttccgaatcctcaaatggtgaggcaggcaacaaggcggatgccgcagcaggggctactgtcggcaatcccgctaatgacggagcccaaacgcaggctccgactgatacttctaaggcaccttctcaaaatgccaagaacgattcttcgactgaggcggatcaatcgccggcgaaggccaatgtgcaggtcgccgcgacggcgcttggcggccgtgactttgaaggccaggtcaccaagataatcaacggcaagacctacattctgattggcaacgagcagcagctgcgtgcgattggttccggcaagaaggttattgggcgtatcaacaaggtcacgcagacttgtacgcgacaaggacccctcaattatcagtgggtggacggcacgccgtcttccgaatacgccggtgacgccgatctctccggttcagatactttgcgcaatgctgatgccatcgaccacctcgatccacccgaccaccacgttccacagctgtgcagcacgcggttagacgtcggaaatacccgcaccaagtattacggcgtgggtgctgatggcacgcaaacggactactccgctgccaacaccggcctgacctattccgcagatgccaactacctgatcttccgtgacatcgacctgtccaagaacgcggcagataccaacaacaccgagtggactccgctcatgttctccggcactatgctcggtgcggtctccaatgacggcgacaccgcagccagcctgtggaaggctgttggtgccgatggcgcaagcgtggttcacgctaccgcagctcggccggtcatcagccatgtggtcgtcaatcagaaagatatggtctctaatgtcaaaggcgaccagctggatgtcagcaagcagcagggcatcggcttcttcgcttcgatcacgaacaagaccgtgatgaacagcaacagtctgggcagcgccggtacggccgtggtgtcgaacctcaagctgcaggatgtgtcggtggcgaatcatacgagtgaatcgtatattccggcgaccttgctcggtacgctcacttcggcagtgggatcactgctcgacgtactgttgaaggcgttaaaactattgacattcggacaagtaaatcttgacctcaatcttcgaggtctgctcaccctgcacaaagacaatccctccaatctcgccactggcgcatttgccggccgtatctacggggacaccaaggttacggactgcgaggtagcagatgtttcggtatccagcgtaagccgtatgaccggtggtttcgtgggatatgttgagggtgcgacccgatacgatgcagtctccggcattgtgggagcactcaccaaggtactctcgaagatcctgaacgtcatcccattcctggggcttggcgatctggtgaattggctgctgtccggcacgctcggactgaatgccttggttccggtcggctactacaacccggtcatctcgaacagttcggtgaacgggttcaaagaaaacgtggtgatcggcaacaagaataatccgcaggccggtggcttcgtcggtgcgcagattggcgcaatcgtcgagaactcctcggtgacgagcacgaacggtttcaccgtgcaggcaacgcaatacgccggtggcttcgccggagtaagccgcaacggcaacgtgggtggtctgctcaattcgcttggtattgatttgctgtctgcgctgcgtccgcagagcctcatcgagaacagcaacctgaccgtcgacggcgatggcaaggtcactgtatctgccacggactatgccggtggatttagcggcgcgatggccaatgcctacgcggtcaataatacgatttcagccacggctgccatgtctactgataaatcccatgccggcggattcaccggatttgcctccgtgggatggggcctggaactcggcacggacgatgccgcgaacgcatcgctgttgaaacagctcaccaaggctgtgactaaattgctgagcggcagcaataacggtgcaggagaactgctatccatcgtcggtgtgaatccttctgcgattctcggtacacaaatgaagggttccttcacagttgctgccggcggtgattacgcgggcggccttgtgggcgaaggttcgggtacggtgatcggtgattcctcgcagaaccgccttcaaaaactcacattctggaagtacaacaatcctcgtgacttcccacagcagcgttccaccaccatagaaggccttgaatcggtcacggccacgggctcctacgcgggtggcatcgccggcaatctgcaaccgacaacggtagctgggttgctcaacagtgtggtgaaaattggcgatatcaccacgctcaagaagttcgaccagtttgccgcgttcaccgtggagaacatgtctgtcaccgctgcggcatccggtttgacggtgacggctggttcatattatgcaggcggtgccatcggatgcgccaccggcggcgacgtgacccacacgaaccttaccaatctggccacggtcacggccaagggagaagccggcggtttcatcggcttctccggaccaggcgacgccgttggtgccggcgggctcaatgtgcttgggcttatcaagctttccggtctgctatcggttgcccaatattcttcggttgcagtcacttcatcgaatgtgaacggcatcgccaacggattcacggtcaaggcgaccggcaagaacgagaacaacgagaacaccgattacgctgcgggcggtttctacggtcaggccaacagcaccaagacccgcgaaagccatgtgacgaacctcaagtcggtcgcggccgataccagcacatccgatggcatcgcgggtggcttcgtgggcttctccaccaccggtggcctcgctgacgcacttagcaacgccgatgattccagcgtgttggacaacctcatcaagggcggactgctgtccgtgaacgacctgctcggtgccatgccgtatctgattccaagctatacgtataccaccgtgacgtacgtcaacggcggttatgtcgaaggcgatatcgcgggcggctatgcgggaaacttccaaagcggcaaggtcaaccagttctccgaaaccgatctcaagaacgactcaacgctggccggtgtacagtcccgcgtgcaaaccaaccccgtggccgttgtcaaccttgaccatgtgaccggcggcgcatacgcaggtggtttcggcggcaaggttgtctccggtgcgctcgcttcggctggcaacggcggcctgagtttgctcggcaaaatcggtacggtggatctcgccaacctgctgcaggtggtgcagggctatgtgccattcatctcctacgcgggtgtgcattccgatgccactaccgtggagaccaccagcggcaacaagatttccgacccggatgatcccggcttcactgtttccgccacccgacttgaccaatccgatacgcaatccggttccgccggcggctacatcggatacggttccggcgtgcaggtatcccattccagcgtgacccaactgcgccacaccgacgtcaaggcaccgaagaatctggaaaccaccggatcaatcgatggcacctatctgagcaaagacagcacatatgcagtcaccgctgcgcgatacgccggcggttacatcggcaaaatggacatcggctcggcggcagctgtgggcggtggcctgagcctgctcggccagaaagtcaatctcaacgatgtactcagtgtgctggatgtcgtcgtctcgacgattgaacactccgatgtgactggcggcatcggcggatactccgttctggccagcgccgcagatcataggaatgccaacaatgagcccgatccactgggtatggccggcggcttcgccggagacatcgaaggcggccacattcaggactcgagctctcatgagttcgtatacatcatcggccaggtttcggccggcggttacgtgggtaccatgcagccgggagccgtggcgaacgtgcttggtgacggcagcgtgctcaagaagctcgccaacctcgacaacctgctctcgctcgtgcaggacttcgtgccgacgattcgcaacagctcgaccgatgccgcagtgtgcggcggcgcggtgcgtgcccaggcggcatcggatacgaccacacgccgcggcatggccggcggctatgcaggtcgtaatcgtggcggtcatatctggggcaacaacacagcagcgtggaagcaggagaataccgacggcaaatacaacgggccgcaacgcgtagcctatgccgcgcgcatccgcagcgtatacggtgccgaaatcgccggcggctacaccggcttcatggaagcggccgataccgctgaaggcggttcgctctccttgctcggcggtctcatcaaggccggcaacctcgccggcgtgctgtccgtggtctacccgaccgaggagcacacgaaggtcaccggtccgctgcgcaatatgagctacgaccagtggaagacgtgggtcgacaacatcggcaagtacggtgcgtatggcaaggaattcaccgatgtgaccacggctgatggtgcgggctctgttaccgaccaggattccctggacaagttcctcgaatcctacatcttcggattcaacgtcgtcgcaggacgtgcggagtatcggaccggcgcgaacctgcatgattccggcgtcgccggcggacacgtcggcctgatgcgcaccggtacgatcaccgatggccagtcgatggacgtcaagaccgtctccgccatgcgtgcggcaggtggctacgcgggcacgatggaatccggctcggcatcctcgttcggctccatccaactattcggcgacaaaggcatcaaacttgatctgggtcagatgctcgacgtggcacaggtattcgtgccagtcatcaaatcctcgagcgtggccggctaccgcaagggtatgaaggtcgtggccaccggcgaagacatcacgcacggcaccggcaacgccggtggctacgtgggtctcgcggtcggcggccagatctggggcgatctcgaccagaacggccagaagcttgccgatggggccactgctgacaaggcagccggtgccaacgtctccaacctgcgcaaggtggaaggccgcaacaacgtcggcggattcatcggcgtggccactgccggcgcggtcgcggatgtggacaccaatgcgtccgagggattcctgcaaggaatcctcgactcgctggtatcgaacccggcaagtctggtcagcgtattgcaggccacggttacgacgattcgcggtgcacatgtgagctcggatgacccggcatggggatacacggtcgacggcgcatatgagaccaaggacgataagggtaacaccacaaccaagtatgccctgaacgccggcggtttcgccggctcgctgcaggcctcgatcctcggtgacaaggattccgccaaaggcaccggcagtgaagcggatccgaacaatgacccggcttctcttactgttaacgggctgcgcgccgttgaaggcgggcaatacgccggtggcttcttcggccttgctgatatatccagcgtcgcttccgtcggcggcggcgaggccggcgataagcagaataccaacctgctgctcaaactgctcaaggtcggcaacgtgggcgtgctcgaagcattccgcaccttcatctatgacggtcaggtcaacggtgtgagcgacggcatccagattgtcgcccatgattccaccacaaagggcatgcttgactcgaagcgttacaccggtgcggccggtggcttcggcggtggactgatcaatggctctgtgaagcagtctgcggtcaccaacctcaacagtgtgaccggcgtgaactacgtgggcggcttcatcgggcacctcggcaaatccggcacggtcgccgccgacaatgcacagctcggcacgagtgcgctcaacctgcttggtgccacggccggcgtacttgacatctggggctcgcatgtcggtgattcgcatgtcaccggcatgccggacggctacaccgtcaccgccacacaccatggcgacgattacggcaaagccaccgacaaggccaccgggcgcgaggtcgcgggcggattcgtcggctacgcggacttggcccgagtgaagggctgcacggccggcaatctcaagaaggtcaccagcggcgagatcgccggcggattcgtcggcgaaaccagccgcgcctatctggttgatgcgcaggtcaactctgtacttgtggaactgctgctgcatgtggtgaacgcgctggtcaagctcctgtacctcgacaaggcggaacaggtcggcgtcatcgacttgggcaagtggttcccgtctatcttcggcaaggtgttcgacctcaaggtgctttcggaaggcaacgtgctgtacgtgaacctgttcgggctgaaggtgagcgtcgccctgtccaaggccgacgccgaaaaccagcagcagaccgacgtggcgattgtcaccatcggcgacagcgtcatcaaactgccctgcagcaagaacggcatcgacatgggtggatcaggcagcaacctgaccgtccaactcatcaagggcaaccgcacccgcgtggaacagtccaccgtgacgggcatcgccagcggctatgacgtgttcggtggtggggcgactcaggacaccgacggcgtgaaggatctcaccaccggctacgcgggcggtttcgccggactgaacgacgagggcgtgctggcggacgaccacatggtctacgccgacacgatccgcggcaccagcggactggtcgacccgttctcgaacaccaaactcaagtccgtatgggacttcaacaccatgagcgacatcctcggaccggtcgatgacggcaacgacggcaaggcatacaacacctatcgcatctaccgcaaggcggtcgcgaacgccggtgaggcccgcacctccgcacaggacggcaacaagatcttctcgcagaagaacacggcagacgatgcgctgaacaccggactcgatcgttgggaagtgaagctgttcgacgtggtcaacacatacgacagcggcgctgtgcacagtggtgcatccggcgacgccggcaccacatgggtcggcatcaaggacgccgtgactgtggctggtggcagcagcacaaagctcgatgcctaccagtccccggccaaggccgtgctcatgcttgacgtgcccgtatccgacaacaacggcggactcacccccgaaccggacgacggccaggacccgtgcggcaaggacggttgccgaaccattgacctgaccgtccagaaggtatggaaggacggcaacctcgaacggccgcagtcggtcgaactgaagatcgccgcgcactataccgatggcagtggcaatacggtgacgccgcagacgattcaatgcttcggcgcggattgcacaaccgtgacgcagaggaatccatggacggtgacgttggactcctccgatgcctcttcctggagcaacacctggcgcaaggtgattcaaggactgccggtcgcattcgtggatggacaggatgccaacggcaaggacatcgtgcgttactacacgtacaccgtggaagaaaccgccgtgacctataaggacggcgataccaccaagaccatcaagcccgcggaggccggataccaagtatcggtctcctacaacaccaaggaacgcgtggccattgttaccaatgcggcgttgcttccggatacgggaggcgcgggcacgatgtggttcctgatgttcggcttgctgcttatgggagctggcgtggtctggtacgtgcgtaatcaacgcgttcaatccggcacagtccgctcgggctccagccgtatacgaaagcgaggtgcccatgcctcgtgacgaccacatagacaaaccgtacctgccaaacagaaaagatttccatctagagaaaggaacagtaatgaaatcactgatgaaaaaggttttcgctgccgccgcggcgattgccaccgtatttggattggctgcgacgacagtcgccacggccaacgcagcggataatgccacgctgacggtcagcactactgacgcgaagttcgccggtaagaccgtgaacgcctacaagatgttctccgccaccgtgagcagtgacggcaaggctgtctcctacacgttgactgacgagtggaagtcgttcttcacgacggctcttggactaactggtgttaccgacacgaacgtcaacgataaagcaaacgagtacgtatccaagctgactggtaatgacttggttgctttcgctaccaaggcatcgaactgggcgcagaccacggccaacagcatcaagactaacaagaccactacggtatctaccagtgccacgaacggtaattacactgcgacgttcactggtctcgactacggctactacgtggtcgctgtgccgggtgcgaccttggccaacgccagtggtcaatacgccacgctagttcccgttaataagaccaatgtgactgccgagattaagggcgccctgcctaccgtcgtcaagaaggtaaatggtcagaacgccaccgacgcgaagatcggtgatcccctgaccttcaccctgacttccaccattccggacatgtccgcctatagcacctacaccttcaacttcaaggatacgttgtctaagggcctcacctttggaaaagtcgattccgttaaggtcggagatacgacactggccaaggacactgactacaccgtcagcacttctgagggctccgacaagagtacgcttcttactgtcaccatgctgaacttcaaggccaagcagcagaccaatgccggcaagacgatcaccgtcacctacacggccacgctgaacaaggatgctgttgtgggcggtcatggtaacaccaactccgcaacgattcagtactccaacaacccgagcaccggtggcaccggtgagtccgaacccagcaaggttcgcgtcttcacttatggcttcaccgtcgataagtacactggtgacaagtacgatgatgccgctactcgacttgctggtgctgagttcacactcacacctaagaacgacagcacgcctattagcttcgtgcgagtcaatgccggtagtgcgaccgagaacgctgtataccgtgtagctaaggctgatgagacaggtactacgactatcatcactcctgaaaacggtaaggttgaattccaggggctgaagaacggcgagtacacgctcaccgagaccaaagcgccggccggctacaacaagctcgccagcgccatcggcgtgaaggttaatggccagaacgacggcactgacaccacgaatgccaccgtcaccatcacctacaacaacgacaatggcagcagctacaaccagaccgcatcgaacggtgtcatcccggtccagaacaagtccggtgttaccctgcctggcactggtggcatgggtaccatcgccttcacggtgattggtgtgttggtcatcgcgctcggcgttgcctggactctcaagcgcaagaacgcctgacgagcatgaccgtgttttgggcgtgaagggcacacacccgctacgcccagaacacggtttcctcgcgaaaagaacgctcgatgaaacgactgcgcaacattctgcccttactggtcattctcggtggaatgctcattctgttctatccgacgatcagcaacttcctcattatgcgcaacgccagccgcgccgtaaataactacgacgccagcgttgaagcattgagccaggaacagtaccagaaggtgctggatgctgcgcacgcctataacgaaaagctcgcccagaacgatgcaggagagaccgacgccctaaccggtgccgtcaattccgcatccacggacgaggaatacaacagtctgctcaatattgacggtgacggcatgatgggatacatcactgtgcccaagctcaaggagaccctgccgatttatcacggcacttccgagaaagtgttgcaatccggcatcggacatctcgaacagacctcactgccagttggcggcgcgtccactcatgcggcgctgtctggccaccggggcttgcccacggcaaaactgttcacggacttgaaccttatgaaaaaaggcgacaagttctacatcacaatacttaaagacacatatgcgtatcaggtcgataagatcactaccgttctgccgaccgataccaaacaactggcaattgagcccggcaaggatttggtcacgctcatcacttgtacgccgtatgcggtcaatacgcatcggctgctggtgcgtggccatcgcatcccatacgcgccgcagcagcaagatgacgccaaatccacgttccacgtggacattccgctgcagtacttgttgccgtctcttgcactgattgccttgctcatcgcatggcatttatggcagcgtcatgagcggcgacgccggcagagtgggagcgccaaggtcgcgtctgatgattctagctccgcagccatcgagccggacggtgacttgcctactcagccaggcagtacaaataaccaatcacattcatcacggcggaaaggaccgggcagacatgttagacccgcatagcggaagcgagtatggtgcggcgcgcattgctgccatgattgccgccgccgttactatcatcctcactgttcttgcagccctcggctctatggtgccgtatgcgcaagctgattccttcggcactctcaccatcaatgccgtatggggccgagatacagccgcgcccaaatcacttgccggcgatacttatgccatcgtgcgcgtcgccaccgtcacaacgaacaatgatggtagcgtctcctcatataaaaccgtcagtgatttttccagtctcactgccgattgggaacgcctgacatcaagtgaatatcacgatgcggccaagaagttcgctacgcacgcggcgaaaaacaagctgtaccagcattccggcatcaccaatgcagctggccagctcactttccagaatctgccgctcggcctatatctggtctcccgcacgaactcggcgaaagccaacaaagcatacgactgcgatccgttcctcatctcgattcccggcagcggagacacggccgccgatctcaacatcacggtagagccgaaatttagcgccggaactctcgtcactccgcccgaaaataatccaaacaaggagccggtaaagcctggcgttatcggccgtaccggtgccgccgtaggaagcattgctgcggcagcggggctcatgctactcgttgcgttcattttgttcagattgcgcatgaggcgtcgcatacgggacgtcaattcggctggcaaatcccatacagatgatctattcgtatgcgagaataatgcgccgaagtcgccgctactcgctgcacttcccaagcaccacgtaaaatcgaacacatggagttgaacgaattgccccagatggatccgcgtgcgctgaaggccacgtctgtcaaagccgaagacgaacacgccgattcagcggaaccgcaagcactgaaaatcaccgccgccagctcgaacccaaagatgttcacgctgccctggcacaagcccttggccacctggcctgaggacctgctggccaacctgccgcgaggcatctcccgccacgtcgtgcgattcgtgcacgtgggcgacgaggtgtacgccatgaaggagatcacgcgccaggtggccgagcgagagtacgagatcctgcgtcgactgcagaagctcgaactgccaactgtgaccccgatcgccgtggtcaccggccgtcacacccgtgaaggggagccgctggaggcgattctggtcacccggcacttgaagttctcactgccgtaccgtgcactgttcgcccgcaacctgcgcccggacaccgccgaacgactgatcgacgccctcgccgtgctgctggtgcgcctgcacctggccggcttctactggggcgatgtgtccctgtcgaacgtcctgttcctgcgcgacgccgacgctttctccgccttcctggtggacgccgagaccggtgacctgcaagtccagctcaccgacggccagcgcgaatacgatatcgacttggcccgcaccaacatcatcggcgaacttatggatttggcgtccggcaagctactgcccggcgacgtggatgagatcgaggtgggcaaccgcctagtcgaccgctaccactcgctgtggagcgctctgaccgacaccgacaagttcaacccggacgaaatgtggaagatcgagcagcgcgtcaacaagctcaacgagctgggcttcgacgtggacgagctggaaatgaagaccgccgaggacggcaagcgtgtgctggtccgcccgcgcgtggtggacgccggctacgccaaccgcaagctgctgcgcctcaccggccttgacgtgcaggagaaccaggcccgtcgtctgctcaacgaccttgacgcctaccgtgcctccacgtggcgtgagggcgaggatctggaaatcgtggccaccgattggatgcgcgaggtgttcgagccgaccgtgcgtatgattccgcgcgaatatcgctcccagatcgagcctgctcagttcttccatgaggtgcttgaccatcgctggttcctggcggagaaggccggccacgacgtgccgatgggcgaggccgtgaccagctacatcgacaacgttctgccgagctacaaccttgattccaaggcactcgccgaacttaacgaagaggccgattccggcgtcattgacgacgaatccacctacagcgacccggacgacgacggctacaaccccgatgacgatccggatgcggcagtgtggagtcattaagcggacaatccggtggactgtctgtaggtgagcccatcacacaaagaagcccctcaaatagaggggcttctttgtgtgtacaacctattacggcctcaagcgacaatcactccgccgcagccttgcgccgtgcgttggacaccgcgtacaggctgatacccgccgccactgaagcgttcagcgactcaacagacgagctgatcgggatgccggcaatcgcgtcgcaggtttcgcgcaccagtcggcccaaaccgctgccttccgaaccgagcactacaacgagcggatcggattcaaagccagtctcgccgacgagcttatcgccgccaccgtcaaggccgacaacgtagtatccacgctccttcaagccctcaagtgccttagtcaggttcaccacgcgcgccaccggcatatgcgcggccgcaccggcagacaccttccaagcggcggcgttcactgaagcggaacggcgttccggcagaatcacaccattggcgccgaatgcggccgccgaacgaatcacggcacccaggttctgcggatcggtcacgccgtccaatgcaatgaacagcggtcgcgcagcaatacgggcggccgccgaattcgcggcctccattgccttggccttcttctcagcacgatcggccagctcgttcagcgaggagtactggaacggatcgaccttcagaatcacgccctgatggttgccggagcgggcgatacgatccatctccagacgatcggcctccagcatgtgcaggccgttcataccagcgattttcacgatttcgcgagtacgatcgtcatgttcaatacgagacatgatgtacagcgtggaagaaggtacgcctacgcgcagtgcttccagcacggaattacggccgtacaccagatccgaagtatccgccgaagcgaacttgtccactcgacggcgggctgccagacgcgggtcggccatctgccgacgttcggccgctttcttggccttatacgccttgtgatagacgcggtcctcggctttgggagtggggccgtaacccttcagtttgttgcgatgcttgccacccgaccccttggtcggtccttttttgatagccataggtgctattgtcccagcaccccgcgccaaaacgcggctattccgccgtcggtagccggtaaggtattgagagtgaagaagcagcgcatgatattcggactgtccctgctgtattggggattatggttggcgattctgattctgtggatgggtcgcttcgtgacctcattcttgtcgatatatttggtttccgcgctgcgcctcgatgagggtgtggtgggcacagtcgtggccatgtacggcttcggcgcaatcatcggctgcctgttcggcggtaccttgtccgacagattcggccgccaatccatgattatcatcggcgaaatcggcgcagcggctgccctgctggtcgtttccgtgctcactgaccccgtggctttaggcgcggccctgtttgtctatggtgcgttcgcctcactgcccagcccggtcatcgccgcgtatatcgcggatgtggtgcccgccgaacgtcagcaacgtgcgtacgtactgcaatcgtgggcgattaattttgggtacgcgattgggccgattgtggccaaccagctggtcaagatctcgtattcgctgatgttctacgttgaagcggcggtgatgatagccgtcacgatattgctgattgcgttcttccgcgaggtgcggcatttggggattactgtatcggtgccaagtgcggtgcgccatgaagacgaacgcagtgttacgcatgcggaattcgccggcgtcgaggggccgaatcactcggatgccgcaccggctgccagtgccaagggctccatgtctcgcaattggcggcgcgtgctcactgatacgccattcctcggcttctccctgctgatgttcggctacttccttgtgtacttccaaagcacctccggcctgcccattgccatgacggaccttggtctagggctgggcgagtattcggtgctgctcaccatcaatggcggtatgttgtgcctgctgcagattcccgcgatgaaactgttctcgcgcatgggcaattcacgcgtgctggtgatgggcctcgccgtaaccgtcatcggctatgcggtgcaggccgcggcccattcctggggcggattcgcgcttgccgtagtgctgtggacgctgggtgagctgggcacattccctatcgccaccactacggttgccgccatggcacccgcgtcggcacgcggcacgtaccagggcgtctacaacgtagtgtggtcggtatcgattgcgctggcgccgctgattggtggctggaccatcagcaacttcggcggtcgaacgctgtggatcgcctgcacgatagtcctgatcgccgtaaccctcggtctcaagctcaccaaaggcttgcgcgaccgcgccatggccgccaacctgcgcaatgcctcacagtaaataattcccgtcaagaaaagtgtgaggcatccgaacttttccgcacaatcaaacatggtccgcaacggcgggatctcactgatatgacgctctgcatgtgcgattgaggcatcgtaatcctcacgcttttcttattgagaatcattctctgcgatacgttctagaatcatcacaagcaatgcgccatatacaacggcagatataggcggtctccttcaacgcgcattggtctaggatgcagcacatattgcatgccgacccggctgtcgaatttattcttgaacttatcgagcgatgaggttttgtatctctttgtcgatttgacctccacggggcagaccctggccttcatggcggcatttgaatactccccgataaggagaaaatcaatttccatgcggtccttcgcctgacgggaatatcgggaatagaagaacaggcgatggcctgaggcccggagctgctgcgcaacgacattctccaccagcatgccttcattcacttccagcttgccgaacaggatatcgcggtacaactcattcgacgtgtatgcgcggtcggcaaacacttgcgttactaacaagccggtgtctcccatatagcatttcatcgtggagtcctcttggtgtaggcgcaggcccacatgcggatccgtggcattcatgcagcggttgatcaggaacgattcatccaaccagaagaaagcattgccatattcacgttcgcgtgcgttttcgcctaaagacgacagtgtgaacttcttttcatgcttggaaagttgccctggaatttcatcgaagatacgtttgacccgttctttcgaatctccgccgtatttctctatgtcctgagcgtacaggtgcaaaatttggcgtttcactcgatcgacattgcccatatcggatgttcccagataacgctctacggcctgcggcatacctcccaccagcatgtattcacggaacaggcgttccgccttgttgtccagcagcggagacattgctcgcctgtccgcaaaagattgccgtatcgcatcggcgagtagttcttctcctctggcccatagaaattcctcaaaatccatgggaaacatgctcaccgattcttcctcggagggaatcaagatgttttcgacattcttcttaatggagatcagggagccagtctccatgaagtcatatcgaccatccgcaacgagttgtttaaccgcgctgcgggcaaaggggaagagctgtacttcgtcgaaaataaagagggtgtcacgctcatgcaggcgtacgccgtaatagacggaaaggtccatgaacagcgtgtccaaatgatccagattgttgcggaacgagtctcgtaccgcctgcggagccttctgccagtcgataaggatgtatgagcggtattcgttcttcgcgaattcctcggcgacggtgcttttgccgacgcggcgggctccttcaatcattaacgcagtagtacccttgctcgctgctttccatcgccgtagatggtcgtatatttttctcttatacatgttaagctcatattcctagtattttcaaggatttatgagctactatatcacgattcctaagttatataatgccgtaaaactcactattcctaggttatgaattgctttgattctcacgattcttaagttatataacgaggcgcgattctttggctatgtggccgacaacagcgaggagatggaaccggaccgcatacgcccggccatcctgattttgcctggtggcggctacgccatgacctccgaccgcgaagccgagcccgtggagaatacgctaatgctcatccaggcctgccgggccgccggcgtgagcatcgaagcacacctgttccccgaaggcagccacggcctgtccctggccaatgcggaaaccgctggcaacggcttctatgcgcacatcgtcgaatgcgtgcagtgttggcctgatttggctgaagcctggttgcgtcgcctgttctaggcaaaacgctattacgctgtgcgccaagtgcgccacgcagttatggaataatagcaatcgtatgcatcggcagcagttgcgccggtgtccataaccgcgcagtcctgtgcgtccagccgggagagaaaacccggcagcggccgcaaggctgactactccgcggcaataccaaggagaacattatggatgatctcaaagatcaatccgcagtgtccgcgaccgcaacgaacgaggtcgtggaatcggaagaagtgcgcgcgcaggaagcgctattgggggaagctgatccaagtctgaccagtgccgacgacgtggccaaagccctgaatgtcgacccatcccagggcctgagcgaggaagaagccaagcgtcgactggccaaattcggcccgaatgagctcgccaccgccccgcccgtaccgaaatggaagaaattcctggcccagttccaggacccgctggtctacctgctgatcgcggccaccatcatctcggtgatcgcatggttcatcgaaaaggccaatgcgcagcccggcgcggaaggcggtgaagtgctgccgttcgacgccatcgtgatcattttgattctgatcgtcaatgccgtgctcggctacatgcaggaggccaaggcggaggccgcggtcgaggcgctcgcccaaatgacggccccgcagacctcggtgctgcgcggcggcaaagtcatgcgcatcaacaccgccgacgtggtccccggcgacatcatcgtccttgcggaaggcgactcagtctccgccgatggccgactggtcaacgcggccagcctgcgcatcgccgaggcttccctgaccggcgaatccgtgccggtcggtaagaagccggacacactcaccgaagccaaggcgctgggcgaccgtgccaacatgatcttcaacggcacttccgtgacgcaaggcaccggccgcgcaatcgtgaccggcaccggtatgaacacgcaggtcggcaagatcgccgacatgctctccgccaccgaagatgagaaaaccccgctgcaaaaggagatggattacgtctccaagatcctcggcattgcggtgtgcgtcatcgctgtcgtggtgctggtggcgctcgccgtgctggaaggcttcgacgacgtccatgacgtgattgattccttgctgttggccgtctcgctggctgtggccgccgtgccggaaggcttggccgccatcctgaccgtggtgctggcgcttggtgtgcagcgtatggccgcgcacaacgccatcgtcaagaaactgcattcggtggagaccttgggctccgcttccgtgatctgctcggataagaccggtacgctgacccgcaacgagatgaccgtggagcgcgtggtcaccccgtccggcgcagtgcagatcaccggcaccggttacgcgccggaaggccgcatggttatgaccggtggcgtcagtcctgaatccgagcaggcccagattgtggccgatgaagtcgtcgccacgcttgtggccggcacgctcgcgaacgacggcgaactacgcgaggagaacggccgttgggagattgtgggcgaccccaccgaagtctcgctgatcgtggccgcacgcaaggtcaaggccgatcgcaagatcacgcgatacacgcgcgttggcgagattccgttcacctccgaacgcaagcgcatgtccatcatcgccaaggacagcaccgattcaggcaagctcaccgtgttcgccaagggcgcgcccgacgtgctgttgagctactgcacgcgcatccgcgtgggtggtcaggtccgtaagctcaccgaaggcgatcgccagtcgattctcgccaccgtcgaacgtctctcctccgaggcctaccgtacgcttggcgaggcctgccgtccgctggaaaccagttctttggctgatgtgcccggtgtaagcgtcaacgccgcaggccaggtgtccgacatcgccgatcaggccgaagccatcgaaaccgatctcatctggaatggcatggtcggcattatcgatccgccgcgtactgaggtgcgcgactccgtgaccgaggcccatcgtgccggcatccgcacggtgatgatcaccggcgaccacccgctgaccgccgcccgcatcgcctccgaccttggcatcatcgccaaggacggcaaggccctgaccggcgaccagctcgaccagctgcccgatgaggccgcactcgacaaggccacgtccgaagtgtccgtgtacgcgcgcgtggcccccgagcacaagctcaagatcgtcgaatccttgcagcgtcaaggcaacatcgtggccatgaccggcgacggtgtgaacgacgccccggcagtcaagtccgcggacatcggcgtggccatgggcatcaccggcaccgaagtgaccaagcagagcgccaagatgattctggcggacgacaacttctccaccattgtggccgccgtacgcgagggtcgcgtgatcttcgacaacatccgcaagttcctgcgctacctgctgagttccaatgtgggtgaggtgttcaccgtgttcctcggtgtggtgtttgctggcttcctcggcatccgccagccggaaaccgtgggcgtcaccgtgccgctgctcgccacacagttgctgtggatcaacctgctgaccgatgccgcgccggcgttggctatgggcgtggacccgcagaccgacgatgtgatgggtcgtaaaccgcgtaaggtgacggaccgcgtgattgacgcctccatgtggggcgacatcatcttcgtcggcgtcattatggccatcgtcacgctgattggtatggacatgcacctatccggcggcttgttcaccgaccgctcggtggatgccatcggccatgaagcgcagatgaccgaggcccgtacgatgggcttcacgattctggtgtttgcccagctgttcaacgcgctggcctcccgttcgcatctgcagtccgcattcgtgggtctgttctccaacaagtggctatggggtgcgattggtttgtccgtggcgctgcagctcgtggtgatttacgtgccgttccttaacggtccgttcggcaccgtggcattgagcccgatggcttgggtggaatgcatctgcctggccgcaatcgtgctgattgcctccgagctacgcaagattgtgctacgcgcgatagccaagcgttaagccatcgcaatagccctgattgtgggcatatagcagtgggccgggctctggtattcagggcccggcccactgctatatccaaacggctcctcatggggcggtaattatcccatggggcggtgatttcctcatggggcggtgatttcctcatggggcggtcgctgaaaacggcattattccgcgaaaaaggaaaatgtgctaaccgccccatggggaagttaccgccccatgggaaacgggagaacgctgcagacctcagttgtggctgccgtcggggccgtcagtagaggtggacccgtcttgagacttctgctgtgcctgctgcttggccttctgctgtgcctcttggtcggccttctgccgagcctcttcctgagcttgcttggcggcatctgcctgctgcttggcctgcatcgaggcggtgacgtcggactcggccttctgcagtctagaaatcgcattgttgacgtcggattcggacggactggtcccgttcatcaccgtattggcttcggtgatggcgttttgcagcgcggtgcgggtgttctcatcggccacactgcccgcggaactatccagtgtgccctgcgcctgcgaaatagccgagctcaggttcgatttcagtgtgtcggtatcggccgtcgcctttgaagtattaacggccttgatcgcattgttgatggcatccgtcttgtcagccatgtcgctggcatcattctgcagctctttagtgtgagacttcagctcagtggcgttgaggctggaatcgcacttggcggtgtcggtcggattgtcggcgtcttgcaacgcctgattcagcgtggtgagcgtattggcatcggccacatcgctggtggatgtttgcgcgctggtttggccattggatatggcggtggtgagcttcttctgcgcattcgtgtactgcttggccgctaccttgcactcggccaatgccacggcttggctcgccttgctgctgttggaatgccaccagagcaggccggcgacaaccagcgctatcacggcgactactgctacggcaatgccgacgattttgcgggtgttctttttgccgctaccgccgtgacgaggctcggcgccatcggaatcgtcctcatcggagacctgattcaacggaatggagggaggcatcacagcaggctgagcctgtgccgaagcagccagggcggccggttggaacacctgtgtggctgcagcatcatcggcagacgctacttgcgttgccggcatggcaacggtctcaccggatacggtggatgatgcgccgtatgcctgtgtggccacagctgaattaggctggaatgcctgtgtggccgcggtttcggcattcggcatggcctgagcttcgaaaagctgtgttgccatgacctgatcaggccggaatgcttgtgttgcctcggcatctaccgcaggctgctcggcctgactgggctggaacgcttgtgtcgcggcgtttgaagctgccgaaacaggcgatgtcgccggtgccgctggtgcggctggcgtcaccggcgctgtcggttccaccgggcggaagctttgcgtcgtctgatcccaaacgtattgctgctggccgggcgcagcggcgattggtgtttcggatactactggctgcgtggctgccgccggctgtggtgcttgtgcggcaaccgcagccgggaattgcggcgagaacggttgcgtcatggccggatcgatgggctgcgtcggctgcacagactgcacagactgcgggaactgcagagccggtgtggcttgtgtcgctggctgcgtgctatatgctgccgtctcttgcccgggaatcggaggaaccgttggcctgaccggcttttcgtgctgctggaagtcgaactggaacccaccatcgctgttggtcatgacatctccttgggattaagcaaatggccggcatccgccggccgaatggtacgtcgcaacgctcagtcgtcgatgtgcgcgcggtagaaattctcgtaggaacggctcggcgtcggaccccgctggccctgataatgcgagccggtgcccttggagccataagggtgctcagcgggcgagctcagctggaagaagcacatctggccgattttcatgccaggccatagtttgaccggcagcgtcgacacattagacaactcaagcgtaatatgcccctcgaaaccggggtcaatgaagcccgcagtcgaatgggtcagaatacccaatcgacccagtgagctcttgccttccaagcgggcggcaatggacgggtccaacttgacgtattcccacgtggaacccagtgcgaactcgccggggtgcaaaatccacggttcgtcgggatccacctcgaactgttcggtgagcgcgccctggttttccgccggatcgacataggtgtaggcgtggttattgaacaaacggaagtaccgatccaatcgcacgtcgatggaagcgggctgcaccatttcgggggtccacggatcaagtgagatatgacctgcggactgtgcggcgagaatgtcgcggtcggacagcagcatgtgaaaaactccttgggcaaataaatactgccttcaagtctagcgccttgggcggaaacgtgagaggctcctcacgcttccgcggtccatcaatcgcaagtattctcaggtttttctcagagaaacttagaggtagacccagaaagcagtggttatataaatgatgtcagcggaaagctgatcaggagccgcagcagttcccgacaattgaaccccctttcttcttctctctcctttctctccccggcgggcaaccgccggggttcttttttgccctgaatcattcccccgaatgaccgccattcccaagccatagcggtacactggctgtgtaatcggcaggaaggggggcaccgatggcccgcaacgatgaggactacgatttcttcggcgatggtcagtatgacgattcgcgcagctcacgtcgtgcacagaatcgacgcccatccaggcggaatgccggccggcgattcgccgctacaaaagccagcagcccaacgtcgatattgtgccgcagacttgccgttgtcagcggactgctagccgtcgtggtatcggccacctcggcggttcatgaaatcgcgccttacgccatttcctttatgacggcagtgccgggacgatacattgcgttgacggcggcggtgcttatcagcatcaccctgattctggtcatcgctgcgcgagtcaccatgcctcggtacgccactcacgggggagtgggcgcgggcggcatcatcgcactggtgtgcgccatagtttgcttggttatcggcgtggccatgggcgtattgttcccggaaggactgattcagcagtcgaacgacaaggcacccgtcgaagataccgcacagatggagcaaggcatagaacaagctgccggcgcgtgcaaagaaggatggcaggggcttgatgcgggcggtttgccaggcatcaccaccgtacagatgtgcactgatccgagagtggccttcgtgtcctttgaatcggaatcgtccgcagccatcagccgggcacctatcgaaagcaagatttccgaactgctgagccaatacgctgataatgagcaaacgaaaggcgattggcgattgctgaacggcaaacgctggatggtgttcggcgagggcagcaagatgaccgcactgcagcagcagtggggcggcgaacttgagacaatcaccgcagccacagacaccgcagccgcaaacagcggtaatgcctgacagattgccggtatcccctggaaagtcccaaggcgattcggcgcggattacccaatgtgactgaaatcatggtccatcgttttccgcacagcgcgcaagacctctatattggattggtatgagcaaagaagcgaatgccagccagcctctgatcggccgcgaatccaccactgtgcccggacgttttggcgagccactcaccgtggaacacagcgtcacctcgcgcggcggcttcgaccagcatgccacgcatccgctgttcctgtgcctgcatggatggggatccagcgaagaagacatggcggacatcatgcgcctcatcgctccatataacgacttcgtggcattgcgcgggccgctgacactcgcgccggcccgtgaaggcagtcccgaccccggcaactacgcgtggttccacgatgccctgcctatcggcgatgatcgtgactacgacgcgtatgccgccgccacagcagtcgaccgatgggtggccgacaacattcccgccgaccgtgacgtggtgccgcttgggttttcgcaaggtggactggtcgccgtgcatttgttgcgcatcaaccccgagcggtaccgggccgtcgtctccctgtccggcttcaacacacccggtcaggtgcccggcacggcccccgccgactctcgcctggccgattacgatatccccgtgttctatacgtacggcaagaacgatggcgtaatcccgaaatacgaactgttcgccaccgccgcttggttggaagagcatacgtggctgaaaaccaagagctaccacggtctggatcacaatgtgagtcttgaggagttcgccgatttgcgccagtggctgctcgacaacgacattacctctggcgtgctgtagtcagccgccatcactggaattggcgcggccgtcacagcaatcggacatcgagggcgcttgtggccggcgcggtcatagactgttctcccatgagcgaagtgagcactgcaagcactactgcacatactgaagagaatcatgcggaaatagcaatccccaacttggctcccctcagagaagggagccaaggaaactagatgccggaatcggcatcgacctgcataacgtagatgttgcgcctcagggagcgggcttgggctcggttgatgtcgccggcttcgtacatgtcctgaatcacaccgagttcgataccgtagctctcgcgctttacgtcctcgacctgcgtgatggtttccgtagtgccgctcatattcggacgtgcctgcaatgaagcctcagcgcgacgataatccagcaacagcgccgaacaatgctcggtgttgtacgtatcctggcccatctcgtcaataagccggccgataacatgatgaatcgcctcgacctgcagttcgcgggtgcgcgcgaaaatctgatcctcgctcaccaatggtgtggtatggcgaatcttggacaccgtgcgtttggcgtaattgctcatctgccgctggaacatgcgtaagcgaccgcgaatctgcgataccgcatgccccgaagtcggatcagtggaagtgtgacgcagcgtattcataatctggtcaagcatgcgctcgcaggcttcgacgttcagctcttgcgtggccgtatccgccgccggatgcgccttggtgtcggcaagtcggtcgcgcacgaattccttttcccaatgcagcgcttcgatctgcaattgctcgaatccctgaggatcggtatcgccgatgcgctgctgcaatcgtccgatgcgcttggtgtattggtcgattaccatcagaatcgcacggcgattctctggcgtgatgcgtccggtcaattcctccaccgtggcgcgtaacacatcgatggtcaccggaatcatttccgcgctgggatccttgccacggttcggggccaatagcggtaacaggaagttggccagcagcaaggtcacgataatcacgcctgacgcaatgaaaatcagctcgtcacgcatcgggaacggcgcaccgccggcaatgtaatacgggatggtaaacatcaatgacagcgtgatggttcccttggggccgccaaaggtcatcactgcggccgagcgccagcgttcgggtgtcattttgcggcgctggccggtgattgtatctcgcgcaacgcgcagcatggccgcaatccagaagaatcgaagcgcgattaccaccagagtgaccagcagaataatgccgatcagcacggtattgctgatatacgggtcagaccagctggccctcatggcgcgcggcagctgcatgcccagaagaatgaacaccgcaccgttgagcgagaaactcagcacaccccatactgaagtggaaacgatattcgtacgtgccacattcggccccacgccggtacggtcgaatcggatgaacaggccagcggccaccaccgacagaatgccggacacattgaattcctccgcgcccaaatacagcaggaagggcaggaacagttccatcagaatacgtgtggtggtggtttcccaaccgagggatcgcacggtctcgaatagccagttggccgctgctgctatcaccaggccaaataaggtgccgccaaagaaggagatcacgaattcgccggcggcctgtcccacggcgaattcgccagtgaaggcggcggccagagcgaactggaagccgacgatgccggaagcgtcattgaagagtgattcgcctttcagcacgctgcgctgacgctgcgtcagcgaggcttctttacctagggagctgacggccaccgcatcggtcgggccgagtgccgcgccgagtgctaaggctgaggctaaggtgatggacggccagacggcatgcaaagtgaatccgaccgccgccatcgtgacgatagccagtccgatagccagcgataggctcagatccagcgttttcagcaacgccgacttatcgatttcgtgcgcttccagatacagcagcggcgcgataaacagcaccatgaacagttccgggtcgagctttgcatccgggaaaaacggcagatacgtaaccagcacgcccagcacaatctggaccagcggtgtggaaaccttcggtacgaagcgactggcaaacgagctcaccaccaccgccgcaatgatgcataggatgagctcaaataccgccatgttgccgccttctcgtattttttctccaccaaaagtatatgggaaccatgaagaaaacgttaagattgcggccgattatgcacatcatgagacgatatgagaaaaaggcatacactcgttggtatggaatatgacgaggcgatgcgctgtgcactggaactggccggtcaggccgcagccgctggtgacgtaccggttggtgcggtggtgctggatgcggccggccagattgtcgggcgcggatacaacacgcgtgaggctgatggcgacccgcttgcccacgccgaaatcatcgccatgcgtcaggcggcccaagccttgggcgcttggaatctcgccgattgcacgctggccgtcacacttgagccgtgcccgatgtgcgcgggtgcctgcatccagacccatatcggcaccatcgcgttcggtgcctgggatcccaagctcggtgcatgcggttcgatttgggatattccgcgcgatccgcatatcggccatagtcctgaagtgcacggcggcgtgctggaaggcgagtgtcagtccatcctgactgatttcttcgcccagcggcgatagacacggacgcattacttacctcacgcaaccaacacgcggcaccaaggcaacatattccatttcttctaccatcgaaaccagtagtgcaatgcaaatccacacacgtcgaaggagacaatatggccgagaacacctccactttcaccggcgccgccgctgacggcaccgcactcaccgccgtctacctgacccagcccgccgccaatgtggcgatcggtctggtgtttgccggcagcgacctgccgcacatcgtccactggggccgcccgctggccaagcccgacaccctgctggccgcctatgacgccctgaagccgcagcgcgtgtccggcgcgctcgacgacaccgcctggccgtctatcctgcccacccaggccgaaagctggatcggcgagcagcgcgtggtgctgcgccgcgccggcgtcgagctcttccccaagttcactgtgaccaatatcgaggccggcggcgtgctggaagccaccctcgatgccgtgtccggcgaaagctacaccgatgtggccggccatgcccgtgccaccggtccggtccgcgtgcccggcgtcatagtcaccgcgcgcgatgaggagcagggcgtggaagtcgagtggcacctcgaactgctccccggcggcctggtccgtcagaaggccaccgtaaccaacctgttcggtgcagacgccggagccccgctcgagatcggcaagatcgagctcggcttcccgctgcccgaatccgccggcgaaatcctcaccaccaccggtcaccatctacgtgaacgcagtccgcagcgccagccgctgaccgtcggccgtttcgaaaagccgcagctcgccggccgccctgacttcgacgcatccctgctcctgaccgccggcgtgcccggtttcagcttcgagcatggcgacgcctattcggtgcacgtgggctggagcggcaactccgtgctgtccgccgaacgtctgccctacacaaccggcgtgatcggcggcggcgaactcctgttcggcggcgaagtgacgctcgctggccctggcgaaggccagaactcctacgacaccccgtggctgttcggctcctatggcgatggtctcaacgagatcgccgcccgcttccactcctacgtgcgctccctgcacccgcgcctgttctcgcacggccgtccggtgatcctcaacacatgggaagccgtgtacttcgaccacaacttcgatacgctgaaggcgctcgccgacaaggccgccgactccggcgtggaacgattcgtggtggacgacggctggttcggctcccgccgcgacgacacctccggcctcggtgactggcagattgcgcaggacgtctggcccgatggtccgaagtccctgaaggcgctcgccgactacgtgcacgccaagggtatggaattcggcttgtggttcgagccggaaatggtcaaccccgattccgacgtggcccgcaaccaccccgattggattctttcgcccaccaccggccgactgccgctgcagggccgcactcagcaggtgctcgatctgaccaatccggatgcgttcgactacatctacggctgcatggaccagcttgtcggcgagcttggtatcgactacatcaagtgggaccacaacaagttcgtcaccgagcccggttcccgccgctccggccgcccggccgtgcacgcgcagaccctcgccgtctacaacatcttcaagggcctcaagaccgcacatccgggccttgagatcgaaagctgctcctccggcggtggccgcgtggacctcggcatcctagagcacgctgaccgtatctgggtctccgactgcgtggacccggtcgagcgcgcggacatccagcgctacacctcgctgctggtgccgccggcgatgatgggcgagcacgtgggtgccagtcccgcgcactccacccagcgtgccaccagccaggaactgcgcatggccatggcgttcttcggccacatgggcatcgaatggaacctgttgaaggagccggacgaggcgctcgccaagctggccgtgtgggtggccgaattcaagaagcaccgcgactggttcgccatcgacacctgcgtgcacgccgactccaacgatccggccgtgcgcttggatggcatggtgatgccgaaccgcgacgccgccatctaccgcttcacccagctgaccaccagccagacctatccggccgcgcccgtgcacctgcccggacttgaccccgagcgcacctaccgcgtcagcccgctcgacccgagcttggatttgaccggtctggccaacggccagagcactctcggctggtggaacgaggaaggcgtagtcctgaccggcgaagccctgcagcgttacggcatccgtcccccgtccctccacccccagcaggcagtattgctcaaggctgtggcgttaagctgacagcctagtaggctgtcaatagccacggcctgagcgaagcgacagctgagcgaaggtgggattgagccttgccgataggcaagtccgtaattgctggtcgtggcggagtaacgttcttggcttccctctctgaggggagccaagaacggcctacccaatatgcttcacgattacgcgactggcggcggctttggcccagagctgccagtcgtggtccataatcgtgaacttgaccggctgggtctggctgtgacggtagaaacgaatgccatcgcgcagcgaatcggtgccgagcttggccaaaaacgcggactccccggcaatcatcacatgtccgggcatcgcgatgttcgccaccgtagccaccagcgaacccaaccggaaacacgtccggttcaccaactgcgtggcctgcggcacacgtcccttggcatcgcgcgcaaagtcctcaaaactgaccgcgcgacccacaatcgcagagtactgttcggcgatcgaatcgtcagtcaagcattgtgaacagccgatatgtccgctggtgcagcgcggcccctccggatcgataagcacgtggcccaccagaccatagctcttatccgggtactgcactggcttgccgttcacggccagcgaataaccaacacccacgccgatggtcaccacggcgaacatatccacgccgacacccggcccgaaccaggaggcatccaccagcagagaatcgatatcattgaacaccccgcacggcaggccggtcgcctctgtgaccatcgtccccaagtccgtggccccgtcccaatgcaggaacggcgcgaacgtcacaatcgaatcgtcgaccacatgcccacctaccgcaacgcccaccgcagtgggggagggcagtccggaagaggcgatatcggcggaacattcgcgcaccagccgcgtgatggccgacaccacatactcagccgactgatccgccccgatcggcacctcgtgccggccggacaccacctcgccatgcgcgttcaccgcagcggccacaatcgacatcccatgaaccttgacaccaatgaaggtgcgtgcgttcgaacacaacaccagcgaagtctgcgggcgtccgcgacgatccgaactttcccttggcgtgaatcgctcgggcagcttgcctgacgggccggcctcggccggaagctcctcgatcaccccggcgtagatcagatcgctggtgatgcgggacaaggccccttggctcagtcccagcatctgtgccaacgtagtgcgggctatcggcccgtattgggcaattgccgccgccacgcgatgcgtatgctcggatccggaaaaccactgtggaatcgcgttgacatcagacatgcaagcccccttcgctgtatttattgcgttaatcacaaaataccgcgctttttgttgcttgcgcaagtgggctcgctggcgctgggaatgaaatggccgaaccgttaccttggaaagtggaagaaccgccggcaccgaagccggaggaaaagaaagataaaggagtcaacaattatgctgtccgattccccacatgcaacgcctagactgaagcgtctggccgtgcgcaccgccgccgtgatgtgcgcgatcgccgtcgggttcggcctggcaggctgcggctccagcaccgcaggcaccgtcacgctggatttcttccagttcaagtccgaggccgccgaccagttcaagtccatggtcgccgactttgagaagcagaacccgaccatcaaggtcaacatcaacaactccgccaacgcccagaccgatctgcgcacccgtttcgtcaagaatcgtgtgccggacgtgatcaccttcaacggcgacatcagcttcggcaacttcgccgcctccggtgtgttctacgacttcaccgatgaacccattgtggacaccctcaaccccggcatggtgcagatcgccaagaatctggtgcagaccaccgattcctccaagaagcgcctgtatggcctgcccttcgcgggtaacgcctccggctacatctacaacaaggctctgttccgcaaggttggccttggcccggagaatccgccgaccacctggagcgagttcaccgatatgctcaacaccttcaaggacgccggcatcaacccgctgcagggttccgtggccgacgcctggaccacccaggcaccgctcgcctccctggccggcacgctggttcccgaatcgaagtacaccgagctcaagcaaggcaagaccacgttccaggaactgtggaagaccgcagtcgagaaggaatccgagctcttcacctactccactgcggacaccggcgtcacctaccagcagggcacgcagaacttcgcccaaggcaaggccgcgatcatcccgctcggcacctacgccatcccgcagatcctgctgatcaaccccgatatcgaacttggtttcgcccagatgccggccaccgatgacgccagcgagcagatcctcaccgccggcgacgacgtgatgctcaccatcggtgcgaacaccaagcaccccaaggaagcgatgaagctcgtcgagttcctcatgcagaaggatcagcttgacgcctacgccgacgcccagtccgccatcacgccgctgaaggacacctacttcggcaacgatgcgctggaaaccgtgcgcccgttcttcgaggaaaaccgactggccgacttctgcgaccactacattccttcgtccatcaacatcggcggctacctgcagaccatggtggcctccggcaacaccgatcgcttcctgaaccagatgcagaccgaatgggacaaggtccaagccaggaccttcgagtgatcggtaggagaggagaacatcatgtcacacgcaaccgcaaccaagaccgctgccaagaaaccggccaagaagaaggtctccgccttctccacccgcaaggtggaccccgcctactactggatggtggttccggcggctatcattttcgccttcttcctgtacctgccatttcttgacggcgtaaagtattccttcaccaactcgcagggctacggcgattacaagttcatcggcctgaagaactacatcgccctcttccaagacaaccgcgtgggccacgcctacctgttcacgttcctcatcgccattctcatcacggtgctgattaatgtgatcgccctgttcctgtcggtgctgctgaactcgaagatcgccttcaagaatggcttccgagccgtcttcttcatcccctacaccctctccgtgctggtcatcggctacgtgttcaagtacatcttcatgaacccgctgcccgagctcggcaaggcgctgggcatcaagtggctgtccacctcgctgttgaccaatgagcaactcagctggatcccaatcgtcttcctcgccgtctggcagggcatcgcctactcggtactcatctacctcgccggcctgcagaccatcgacgacgaaatctacgaggccgccgccatcgacggcgtcaacgcctggcagaagttctggaagatcacattcccgctgatcggaccgttcttcaccatcaacctcgtgctgtccatgaagaacgcgctcggcaccttcgatcaggtcgtcgccttgaccgagggcggtccgaactcctccaccgaaaccgtcacctacctcatctggaagggtggcctgaccggtggcgagtacgcctaccagaccgcaaacgccgtgctcttcttcatcgtgctggcgatcatcgccttcgtacagctgcgcatctcccgcagccaggaacagatctgatttaggggaggataagaaatgactactgcaacagttaccccgtccaagtccggcaagcccgccaagttccgcagggaccacaagatcaactggtggctgaccgccgccgtggccgtgctgagcctgaccattctgatcccgctctacttcaccatcgtcaccgcgctgaagactccggccgaagccggcaccttcgccctgcccacctcgtggcagtggcacaacttcgccgacgcctccgccaaggtcaactacccgaaggccgcgctcaactccgcgatcatcacggtggccgccgtggtgctcaccttgctgaccaacaccttcgtggcctacgctgtggcccgcaacatggataagcgcttcttccgcttcctgtactacttcttcatcgccgccatgttcgtgccgttcccggtcgtcatgctgccgattgcgaagcagatgggctccctgcacctggacaaccaggtcggcctgatcatcctgtacacggtgctcggcctgggcacgaacctgttcatcgccactggcttcatccgttcgattccggtttcgctggaagaggcggcccgaatcgatggcgcatccacgtggcgcattttctggaccatcatcttcccgctgatgagcccgattaacgccaccatcgccatcctgaccgcactgtgggcctggaacgacttcctcctgccgttgatcatcctgaccgaccagtcgaaccagaccatcccgctcgcccagtacgtcttcagctcgcagttcgccaccaactacccgatggccttctccagctacctgatggccatggccccgatcctcatcgtctacatcttcgcccaaaagtgggtcgtcggtggtgtgatgaggggagcggtcaagtaaaacagcgcaggcgctgctttacttcaccgcgtcgagcgagacgagccgattaaggaaacagccccgtgggctgtttcccggcccgggcggccggataggtcgcgtactcgcgaggtcatgttgggtctggccgtaggccagtcctgaattgcaggactctgtgaagtaaaggtccgcttccacccaagcctcctccggctctcaccggaggaggctcttctgtcctgttgccatactggaaaccgccacaataaaggcgacggtcggttgatgtggcggtggcgcacaaaggtcatgtggttttgctcgttgtgcgaatgaaaaagtgacgaaaccgtacggcttacggtgcaattgagcgcatctgctgtgtcgccgtgccactggcttgtcccggtccacatatcaaccgtttgacgcacgaaccgggacagaatccgctgtcccggttcgcggtttcgggcgattttcacgaaccgggacaattttcattgtcccggtatgaatgtcaatcgttttatgtgaaaaccgggacaacatgttgattccgggatcggctctattccgccgattttgtattacggagcatatgaactgcggagattggcttgtccctgtttgtaaaaaaggacaaaaatcgcgaaccgggacagcggattctgtcccggttcagacggcaatcgattgacatacgaaccgggccaacgccgaagtccggagcggttcccgaggcggggtttgcttgaaatccggtgtgccagcgaaatccccaccagattcccgcaggcgtgtcaactaaatcatctatccccgcaccagtgggttcaagcaggcaatccaagcgcgcccgaagttgctcttgcgcgtcgcaatcagaagaaccgttaatatgtgagctgccgcaggtcaggtagattatggcggcggaacaagcgggcgagctccttcataggttcgaacctcgagtgcatcatccacgagcacaggcgatatagccacacccacgcctcgaacaggagcatgaaccctctgccgggctcgaagccgatcgtgatgtgcggctcccgcccgtcgccgtcggcgtcacggaagtccgcagacccgaccctccaaggcgaccgcagccgaagcgcggcggtgaacaggtgagaggcatccatgcctccaacctacccgaccaacatcaccccacggcacagtcacccaccacaaacagcgaaagggcccatatgttgctaaatagcatgtgcagcttatgagaattgagccgtagcagtgccttccggctctttgcagtttttgtttccggcacaccaacgcagttccccaatggaaatgtaattcagcgctttttagactatgagcaacaggcaatgtagaccataaataatggaggagccaacgatgaccacttcacaacgcacagtaattccagattccatccgcaccaacggtgccaccccaaatccgtggtggtccaatgcggtcgtttaccagatttacccgcgttccttccaagacaccaacggcgacggcctcggcgatctcaagggcattacgtcacggctcgactatctggccgacctcggcgtggatgtgctgtggctatccccggtatacaagtctccgcaagacgacaatggctacgatatttccgactatcaggacattgatcctctgttcggcacactcgacgacatggatgagctgctggccgaggcccacaagcgcgggctcaagatcgtgatggatcttgttgtcaatcacacttccgatgaacacgcctggtttgaagcgtccaaaaacaaggatgatgagcacgccgactggtattggtggcgtcccgcccgtcccggcaccactgccggcgagcccggtgccgagcccaaccagtggggctcctactttggcggttctgcatgggagtattgccctgagcgtggcgaatactacctgcatcagttctcgaagaagcagccggacctcaactgggaaaatccggctgtgcgccgcgcggtatacgacatgatgaactggtggcttgaccgcggcgttgacggcttccgcatggatgtgattacgctgatttccaagcgcacggacctgtctggcaagctgcccggcgagtacggttccgagctggacgatctgcccgtgggtgaggaaggctattccaacccgaatccgttctgcgcggacggccctcgccaagacgaattcctggccgaaatgcgccgtgaagtgttcgaaggccgtgagggcttcctcaccgtgggcgaggcccccggcgttaccgcacagcgcaacgaatacatcaccgaccccgccaacggcgagctggacatgctcttcctattcgagcacgttgattttgactgcgaaggcgtcaaatggaagccactgccacttgacctgccgaagctcaagagcattatggccggttatcaagcggccgtgaagaatgcaggctgggcaagcctgtttactggtaaccacgaccagcctcgcgtcgtttctcgttggggtgatgactcctcggaggaatctcgtgtgcgttcggccaaggcacttggcctgatgctgcacatgcatcgcggcaccccgtacatatatcagggcgaagagctaggcatgaccgacgcccacttcacgcgcctagaccagtaccgtgacctcgagtccctgaacgcttaccgtcaaagggttgaggaagccaaagtgcagtcgcccgaatcgatgttggcgggtatcgccgcgcgcggtcgtgataattcgcgtaccccgatgcaatgggacggctctgtctatgccggtttcactgcgccggatgccgctaaggagccatggatctccgtcaatcccaaccatgcggcgatcaacgcggccggcgaattcgacgatccggattcggtgtatgccttctacaagcagctcatcgcgctgcgccacgacatgcctgtcgtggcggccggcgactggcatctgctcgatgcggatgacgcgcatgtctacgccttcacccgcaccctcggcgatgagaagctgctggtcgtggtcaacatgtccggccgaaccgttgatttgcctcgcgaatccgccgaactgttggcagtggccgatggccttgccgagtcgaacgtggtgatcagcacgtatgacgccgcgcacgctgtggccgctcttgccggccgtgagcttgcaccatgggagggcgtcgtcgtcagcctataagtgttgctaggcggtatctccatttcaaggggctgattacgaacgggaattaccgtaaatgagcgctcgttagcgagataagccactgttttcggtgtccccgcgccatacaatggaaagctatggaacaaaaggatgttttgaaggcgctgcagcgtgatcatgcagccga

SEQ ID NO: 3146 - DNA, 31514 bp, Unknown
  R215_18m  MAG No. k141_72928
aaagaagtagtacaaacacgctcttgagttctcaaaccaccaccacaccagcaagacaggaaaccaaccagaggaaggaacccgccgcgttgagcggcaacaggtgaataacttacacgcaaccacgccacaacgcaaatcgggcatgaaaaggtacgccagaatcgttgcaacgacggcgttctatcggcgtgtcgaaatcagcttgaatcacgccgttatcatcaggatacgccggctttttatgggctcacgtaacgaaatcagatgttcaccggcgtgtcgcaacaattcattccacgttcaactcccctcagtccgatcacgcggacagctcacccgcaattacggacgagcaaagctcgcgcccttatggctcgactatcgtctcgccttcgtctaaaaaacagtccaccggactgttttttaaacgacccagcatcaaagagggaagccaaagggggattagaaggtcaggcgcatttggtgccagaccacgtcaccgtgagtggaatcggaaatgccctcgtcctcatatccgaatcgcgcatagaatccgaccaaccgatctttgcaggtgagcaccaggcctttacggccggctgcacgagtgtcttcaatgactttcctcatgagtgtactggcgcaaccgcgatgctgatacttcggcgcagtatccacgccgaaaatcatttgccagtcaccttgagggttgtgctgcgcggcatcctcgtacatgtcatcggtcaagtcgcgccgatcggtcacaaaaccgttgatgaacgccatgacgatctcgccatcaatcaatagccagaaacattccggataggtctcgattcgggcgcgcagggacgagcggtcggcggcctcggcggccgggaagcattcgaattccatggcggccagcgcgtccagatcgtcgatggtggcgtggcggattaactggggatcagaatcagtcatgtttttgtctttctcttaacactccgttgtgagcaactcccccagtcacgcttcgcgtgctggctcccctcaccttgaggggagccggatggatgtcagattacgtggtattcgcgtagcagggtggcaatatcggtgccgtcgagtttcttgagcaccttcttgaccacggccttttcaatgaagttgagcttcatatcggtgaccggtgcaccgtcacgcaatttgacggtggcgttgagcaggttgcgcacgtcatagacactgccccacacttcaggcacgccgcggtccacgccgagcaacgtgtagacagcttccataccggtgcgcatcgagtactcggtggtgaagatcgtgtcacgcggggtctcggcgaactggccaaggaatgcgaagttcacggcaccatcgggcaccacgtccgggcggtcgccggccgcgcgcggcatgaagaacgcggtgatgtacggcatcatgaccggcacggtgttggcgtgatgcttggcgagcgcctcgatcttgtcggtcggcacgcccatgtggtaaagccactcctcgcaaatctcttcaccggtgcattcggtcatcggcttcttcacatagttgccgggcttgtccgggaacaggccgtagacccatacgcacagctggtccttgggctggtcgcggaactgctgctggcggttcagggtccaactcatgagccagttggagtcctgcacagtgacgatgccgccggtgacgaccttgccggagaacgggtcgcgcttgcaaatcttctggatgtacggcggaatctcgccgtccagggtggtgatggtggcgctcatccacttggtggcattcggatcggagcagaacttctccggatggccaaagctcgggtcctggtcggcgatacgcttccacatatcccagccgccgccgggcttcaggtctgggttccatgcggcgggcgagttctgggaacccatggtggagttctccacgcaaccgccgttggtgatgaacaccagatcgttctcggtcaggtcgatggaggatttatcaccctcgtgatccacgtcgatgcgcacggcaagcttcttggtgggcgtgctggcagggttgcgcttgaagaaaccggaggtggcctgaatcttttggatggtgtcctggcctacgccggtgtgctcgcgcttggggccggctcccccgccaatcgcgaattccacgttctcaaccttggtgttgtagcggaattcgacgccatgcgattccagatacttgaccatcggcagaatcatcgactcgtactggttgtagcgggtgaaacgcagcgcggaaaagtccggcagtccgccgatgtgatgaatgtagcgtttgatgtacagcttcatttccagcgcggagtgccagttctcgaaggcgaacatggtgcgccagtacagccagaagttggagttcagcacctcatcatcgaagaaatcggtgatcggcttgtcatacaggtcttcgtccggggtgaagaacagcttcatgatttccatcgaagccttgtcggacaggccgaacttgcccttgagccccgcgtccttgccgaggtccttggtggcgcggcacagcgagtagttcgggtcctccttgttgagccagtagtactcgtcgagtacgctgacgccctcggtttcgatggagggaatcgagcggaacagatcccacatgacctcgaaatgattgtccatctcgcggccgccacgcatcacatagccgaggccgggaatatcaagaccgtcacaggcgccgccgggtaccgggtccttctcaaggatgtggatgttctcgccaggcatctgaccatcacgcaccagataacaggctgcagacaatgccgccagtccggtaccgatgatgtatgcatgcttgttgtccacgtcggccggcttcttcgggcgtgcgaaagcctcataattgccgctgctgtagtacatattccgcctccttggggtagagttgacgcttcgtcaactcttcttgaatagacatcatgtcacattattgccgaacacgccataggcaacgttcggcgttctgccgtattcgccaataccttgcgtctacggttttcgaggcctgtgttggctgttggctcataactattgaaggcatacaggcatactgaggatgctgggtgcttcaccgaaccggatgattgataaggtcccgctcaatccatgccatgaccaaatcggcaagtcggtttacctccgcttcggtgagttcacggcctttgggcagatgatgccatttttcgatgcatccgcggcagcatgtggcggtagcatgttgagcggtgaataccggatggccgcgccatggcgtctgcctgccgtcgttcttcggttcggctgcgcctatgcggtctcgcaacatttctcgcgcatgacgatcgatggtcgccttgcctttggtgcgggcataggctcgttctttgtcggtcaaaacgaatttggcgcggaactgcgaatgagacagccgttccagcatcgcggcaatccattgtcgctcgtcatcgttgttaccagtatccgccatctccatgcccatacgttccacaatagtcgcgcacatcgtatggtggcacatgccttagctccctctgatgaaggagtccccagcaaagccaggtgagggagaggccaggggcgaaacccgccaatcaggcggcaggcaagcagctggggccaaacagaatcttgatctcagcaaacaacgaagtatcccgcttgacgcggaaacgatcgccaaacgtgagcacctgagcgttacccttctcatccagcaccgcaagatgtacttcgcagtaaccaggatgattagcgagcacctgaccgagttgcatcatgcgttggcgctccaacgccaccggcggcagcgtgatgaccaacggacgttcatcctcggcttccaaggtcggaatctgcatttccgtggctctcagagaaacggtttcgtcgcgcaactccacttggccacgaatctgtacgatggcgtccacggcgagttcggcggcggccgcttcatagaccttgccgaagaacatgcattggatggagctttccatgtcttcgatggtcacgatggcccaggggttgcccttcttggatacgcgccggtccacattggtgaccaaaccagccaacgtgacctgctgtccttcacccatcgttttggctcgatcaaccagatgcgcgatggacatttcacgcagggacgcgagaatcgactgcataccggagagcggatggtcagacacatacaggcccaacatttcgcgttcgaagttaagcttggtcttcttgtcccattcctcaagatcgggtacggtcacggaagcgtcgcccatggcctccgctcccccatcctcggcatcggagaacaaatcgaactggccctccgcctgtttgcgcttcagactcaccaccgagtcgatggcggcctcgtgcacggtgaacagcgcgcgacggttcgggtcaatcgagtcgaaggcaccggccttgatcaacgattcgaccaatcgccggttcagcgcggtcaggggcacgcggcggatgaagtccatgaagttcacgaacttgccgcgcgggccttcgcgttcggcgatgatatcggccacggccttgtcacccacgttacggatggcaccaagaccgaatcggacgacgtcgccgactgccgagtactcgtacaccgattcgttgacgtccggcgagagcacctggatgcccatgcggcgggcctcgcccaagtacagtgcggtcttgtctttgttggtggcggcaccttgcaacagggcggccatgaattcgaccgggtagtgcgtcttcagatatgcggtccagtaggagatcagaccgtatgcggcggagtgcgctttgttgaaagcgtagccggagaacggcaccagaatatcccacacggcctgggaggcctcttcggagtatccatgctccttcataccggcgaagaacggcaccttctccttggccagcacttcgggcttcttcttacccatggctcgacgcagcacgtctgccttgcccagcgaatagccggcgaggattcgggcggcggactgcacctgctcctggtagatgatcagaccataggtctcgtcaagcacctgcttcagaggttcctcaagctcagggtggattggcgtgatcttctgcaggccattcttgcgcttggcgtagttggtgtgcgaatccatactcatcgggcccggtcggtacagagcgataagtgcggaaatatcgttgaagttatcgggcttcagggttttcagcagtgaacgcatgccgtcggaatcgagctggaacacgccgagcgtgtctcctcgggacatgagtttgtaggtttcggcgtcatcgagcggaatcttggtgtagtcgatggcgggtttgccgttggcctcgatgttcttcagggtgtcgtggatgatcgtcaagttggacaggccaaggaagtccatcttgaccaaccccaacgtttcgcacgtgtggtattcgaaggtggtggtgatggtgccatcggtgcgttccagcaacggcgaggtgtcggtgatgggcgcgctacccatgatggtggcgcaggcatgtacaccggtctgtcggatcaggccttcgatacccttggcttcttcggtgatgcgcttggcgtccgggtcggaatcgtagagttctcggaattccctggcctcggcgtagcgtttggctgtcgggtcgaagatgtcatgcaggctgatatccttgccgccggtggccgcgggaggcagcgccttggtgactttttcaccgaccgagaactcgtagcccatgatgcgggcggagtccttcaaggcctgcttggttttgatggtgccatagatcacgcactgggcgaccttatcggtgccgtatttttcgccgcagtattcgatgactcgcgcacgaccttcagggtcgaagtcgacatcgatatcaggaaggctcactcgctcagggttcaggaacctctcgaaaatcaggccatgcttgagcggatcgagctcggtaatgcccatggaataggcgaccatggcgcctgcggccgagccacggcccggccccaccataatgccgtggtccttggcccactgaatgtagtcggcgaccacgaggaagtatccgcagaactgcatctggcagatcacaccacattcgtagtcggcctgcttcaatacgtcgagcggcgggttgccgtcgtaacgcttctccagaccttcctcgacttttttaaggaacagggaggtctcatcccagccttcggggcaggggaatttcggcatgaacgcgccgtcttcgtggtcgtcgaacatcacgttgcagcgttcggcgatggcgagggtgttgtcgcaggcgtccggatggtccttgaacagttcgcgcatctcttcggcggttttgatgtagtagccggtgccgtcgaatttgaatcggtccggatcgtcaagacgggaaccggagttgatgcagagcatggcgtcctgtgcctgggcatcttcggcgtgtacgtagtgggaatcgttagtggccagcagtggtgcgttgagtttcttggctatggtcagcaggtcaccggtcacctgagtttcgatgggcagaccgtgatccatgagttcgatgaagaagttgtctttgccgaagatgtcctggaattcgccagcggcgcgcagggcctcatcgaactgaccgagacgcagacgggtctggatgatgcccgaggggcagccggaggatgcgatcacgcctttggaataggtggcgagcacctccttatccatacgcggataacgcatgacgcgaccttcgaggttggccacggacgaagctttgatgaggttgaccaggccttcgtcgttttcagcccacatggtcaagtgggtgataagaccaccaccggagacgtcgtcacggcgctgggcttcagtgccccaatgcacgcgggatttgtcttgacgtgcggtttccggggtcacataagcttcgatgccgatgatgggcttgacgccattggccacgcagttggtgtacatctcgtaggcgccatgcatgttgccatggtcggtgatgccgaccgcaggcatgccaagttcggccgcacgcttggccaaatcagggatcttcgacgcaccatcgagcagcgaatagtgcgtgtggttatgcagttgcacaaagttgttcccgtaatcagccatgcgccccaccataccgtgtggtctgggcggctgttcagcattcccgtcggcactccgcgatgagggcggcgcacagcatgatgacctgggcgacgagattgaaccacaccagcgcgccgatcaacgccgcgaacggtgcgagcagcggattgcgggaggcaccggtcagcagtcgcgcgccgagcagctgcagcaccgaaaccgtcagggaacccgacgacgcgccgatcagcgtgaatcgtccggctttgatgtgcgcgaccacacgcaacagcagcatgaacaaggcgaaattcagcgcgacgccggtgcagaaaccggtcagctccagcagcagaatccccggcagcgagctgctggcgatgccgctccactgcaacacgcgccgcaccatgccaccggacaccgtaccggccgcggtcgaaagaatgaacagtattgcgatggcgatggcggcaagcgtatcgcgtaaccttgcgacgacgatattgagctcgtcgccgcagtcgtcgaacatggaccgtacggcgtggcgcagcgagttcatccagccggtcaccgtccaccagaacatggccaacgtggccagaccggtccacgtcaatgtgcttgacatggtgtttagtgcggaagacgtcagaaacgagtcggccacaccgggaatgacttcacgcaccgcgtcaatcagcatctgctgccaatcaatgttgccgaccatgataaggccgaacacgctcaccgcaatccaaacgccggcaaaaaaggcgaatagcagaccatatgccagaccattcgccagcagggggccgcgccgcgacacataccggtcgagcacgcgcccaggcagcgaacgcgcccacgcgtccgctcccctgtcaatcgcactcttcaacccatgcatagttcaactgtagctgttgttaccgttgttgaaacagcgtggcgcgaaatcgcatttagccagctcaaacgatggcaaccatcaacgcccccactcaattgttcagaatcggataccatatgagtattcaattcatccgtcggagttcaatgtcagcagtcctcaccaaccgatgtcttgctaatccgctggccgccctagtatctactgtttcttgtggacttcgttcaacagccaggcagagcgtacaacatactgcgtagtacatggcgcgaatcccaatgaccaccatcgattgatgacggccacgaatactcgtattcagccttactgctttggctcatttctgttcacttcacgctggagtaccgagacacgttgagcggaaataccggtaattcacgtacggttaccgaccattggcctgaacggtactcagcatccgcagtcacttggggtatggtcatgacggagagccatcatgaccgatctctcattattctgggatgaatccggcgaggctggaactgaatctaaatattaaaacgcatgatgcacacgttgcggaattagtccaccagaacttcggcatgctcggcaggttcagcgggttcgatgtgacgggcacgcatggcatcgagggcggcggccaggtcggccgggtactgggaccggaccgtggtccagacgcgggtgcgaggatggcggaattcgagcttcatggcgtgcagccactgccggtcaagtcccaaagcttcagacagcaccggattggcaccatacatggggtcgccgcacagaggatgcccaatcgaggagaaatgcacgcgaatctgatgggtacgtccggtctccagattcacggataccagtgtggcctcaaggccgaaacgctccaacacatcccaatgcgtaacggccggtttgccggccggagtcacgcagaagcggaaatcggacactttggcgcgcccgatcggtgcctcaatggtcgctttgttctctttaagaccgccctgcacgagcgcatgataggttttctttacctcatgctcggcgaactgccgacgcatctcggtgtacgcaaggtcggacttgcacaccaacatcaagccggaagtgcctacatcaaggcgagaaacaatgccttcacgcccggccgcgccataggaagcgatatgcacgccacgatcacgcaacgatcccaataccgtgggaccggtccagccaaccgaggcatgcgccgccacgcctacaggcttatcgactacgacgacatcatcatcttcgtagacaacagccatatcagttgcgataggctcaggcccggcctgttcctccgccaaatcaaattcgacggtctcccccgcctgcaacgtgctggaccgcgcaacttcacgccctaaaacgcgcgcctgtccggagtcaaccagatcggcggctttagatcgtgaaatacccagcattttggccacggctacgtcgaaacgcttacccaccaatgcatcgggagcagggaccattcgactcattacttggcgtccgcctccggctcagactgtagggattcgtcggattgctcgataagatccttgtgggagaacggctcccccataagaatcagaatcaccaggaccacaccggcgactaccagatagatatccgccacattgccaacggaccagccatagttaaggaaatccaccactttgccgttgaggaagccgtcagcgtacataacacggtcaatcaggttgcccagagcgcctgcaaacgcgaaagaaagcgccaccgaccatttcatggagatagtgcgcaccccagccacagcaagggccacgcaagccacaacggccaacagactgattacccaagtagcgcctgaccccatgcccaaggacgcgcccggattacgcaccaaggtgaaggacagcagtccgggaatcacgcgaatggtctgaccgttggataacgcggccatcgcccaagccttggtgagctgatcgacaatcagcgcagccgcggccacacatgcaaagacggccacgcgagtgcgcagccgtccctgttggttcgtcatacgacctgtacctgcctacgctcagttggtcttggacgaggtctggtcgacgtagttgttcgactcggaaacctgcgatgccagctggccgaggtactcggtgaggcgagcgcggtattcagtctcgaactgcttgaggctctggatgttgccctcgacgaccttggactgagcctgaaggttgtcgcgcacctgctcggcatacgtatcggctgcagagcgggtgttcttgtcgtacgcatcagctgcggaacgagtgttcttgtcatactcggcggcacgctgctgcacttccttctcgtagttgtcagcgtcatcgtgctgagacttggagtagttgtccgcatcctgacgagtcttgacggagtatgcgtcggcctcagaacgggtgttctgggagtaggtctcggcatccgcgtgaatctggtcacggtaagcgtcggcctcggagcgggtacgatccgaataggtgtcggcgtcggaacgagtacgagtggagtagtcgtcggcctcggagcgggtacgctcggagtagttgttggccttggtgaccaaatcgttgtacttgttctggctggcctcggtgatttccttggccttgttcttgcccttctccacgtactgatcgtgcagctgcatagccagagtcagcatggcggtggcgcgctcgggctcggtgcccggcatggaagcgacgccagcgatcttctgcagagaaccggtctcagtgctcggctcgaccttggaaacctgggcacgaagctggttttcacgctgcttggcttcttcgagctgacgagacagttcagcgatctgagcggactgctgctgagcggcggaaccctcctgctgagcagcggcgagctgacgggacagctcctcgttggccgcgcggaactgatcacgttcctgctgaatggcggcgatctgctggccgacggcttcctggttaccggaggcctgagcggcctgggcggtgagctgatcgatttgagcgttcagctgatcgacctgacccttgagctgctcattctgggaggacagcgcgcggttggattcctcggcttcgctgagcttggcagaggcaagctgtgccgcctgatcattgccagcctgagcggcctgctgggcctgagccacagcgttcttcaaaccagcattctccgactggagttgctgcacctgaccggtaagatcggagatcttcgcattaaggttggtcacgtcagggcccagagactgagtggcctgaccgccggctaccgcctgacgtccaagagcctcgacggtttccgtgacctgatcaaggaagtcatcgacctcgtcgacatcataaccttccttgaatcgaacagtctggaaggtatgctccctaatatccttcggcgtcaacagagccataaatcttgcacctcgctttggggcattgcccgcacttacgttggtctcaagtcagaatgctatcacgaccccatcgtttcagaacattcaacgtgggtttttatgccagatatatgcctccggcgggtcaaaaacggcctcagaacactatcagaacaacactttctagtaccaccaacgcaaaatacagcacgatgaagctgacatcaagataaatcgagccgagcggcaatggacgaatatagcgacgtagccagcgcagagggggttcggtaatggaatacacaatgttgatcagctgggccaccacaccacgtggataccagtttcgtgcgagaacggagacccagtccagaatcatgcgcacgaacagaaccgtgatatacgcgttgatgagccatgcaagaatgcggccgatcagagagaacactaaggaaagcatgctgacagactaacaaccgcgcatgaaaagtttgctcggagcgcaataagaatcggccgactccttgctgggagtcggccgaataccgatataacgtcgaatgcgaaaactactgaaccggtcagtcagcgaacaaatcgtgtgccgaggttggttttgtcggctcttcgaccttgatgttcacctgcgccgggctcaacaggaacacgcgcggagtgacacgctcgagggaaccacgcacgccgaacaccacgccggcggagaagtccacaatgcgatatgccacggcttcggccacaccggtgagattcagtacgaccggaacaccgtcacgcaatgcgcgaccgaccagctgagcatcctcatatgacttcggatggatggtggtgattctgttcacgcgaccaccggggaacggcttggtagtcgacgatgcggcaggcgcggtggttgatgccagcggcgtgaccgtatggtcggaatcgaatgcggacttcggagccggcttctgctcctcgtcctcttcgatgtagtcgtcctcatcgtccacaacgtcgctcatgcccagataggacatcgcgtttttcatgaacccagccatggatcagtcctttcagcgcaggaaatcaggaatgtcgagatcgccggcgggatcgttcacggcgatgttcggatgcgaggtagtcggatcgtcaaagggcagggatgccgggtctgcggtcgtcggggtgaattccggacgcggagtggccacgggctgggcggccggagcggcggcgggctgctgcgtttgcgtggcagccggctgggcggccggtacggcaattgccggagcggcggcagagggatcctgcggtgtaaccggatcgaaaccggccgcgatgacggtaacacgcacttcgtcgccataggcatcgtccagagcaagaccccagatgatctgggcctcggggtgaatggccttgcgtacaagctcggtggcggcggaagcttcctgcagcttcagatcggtcgggccggcaatgttgatcaacgcgccgtgggcaccctcgatgctctcctcgagcagcggggagctgatggcgatttcggcggcctgggtggcgcggtcttcgccccgcgcggaaccaatgccgaacagcgcagtaccagcgccacgaagaatggagttcacgtcggagaaatcgacgtgaatgtaggaattcatcgaaatgaggtcggtgatgccctgcacgccggcgaggagtgcggtatcggccgtcttgaaggcttcgatgatgccgatggaacggtcggaaagctcaagcaggcgatcgttcgggatgacgatcagcgcgtcgacttccttgcgcaggttgtcgatgccgtattcggcggaagcggaacgctgaggaccttcgaagctgaacggacgagtgacaaccgcgatggtgagagcaccttgctgatgagccgcacgagcgacgatcgggctggcgccggtaccggtgccaccaccctcaccgcaggtgacgaacaccatgtcggcacccttcagggattcctcgatatcagactgatgatcctgtgcggccttagcacccttctccgggtccgcgccagcgccgagtccgcggctggactgatcggacagggagattttcacgtcggcgtcggagcgcagaagatccttcgcatcggtatttaccgccacaaattcaacattctgcagtccctcggcaatcatgcgattgacggcattaccgccggcaccgccgacgccaacaaccttgatgttggtcttgtcgttgaactcattctgcgcgatctcgctcacgtttggctcctgtcacttcacggttacacccaagagtagcgcaaacaggctactcttggagggaaattcacgcgcagaatggcgcgtgttgcgtgtattttcagtattttttcagtaactggcgtccattgggtcgtcaccgaagagcgcctcacgctcttcgtgggtggtggtacgcgattccaaccacccatacggcaagtgcaccttcttggcgaaacgcacgcggccgcgcggtttgtcgaccacgcgtggcgggtattcgatggtcgggtcgagcttgccgatctcgcggtccacatcggccaggctctcgcattccataaaggccttgcgggtggacccacccaccgggaaccctttcagataccaggcgatgtgcttgcgcagatcgtggacggccatcatctcatcgccctcatagaactcggtaagcagctcggcatgacggtgaatcacccggcagacctcgcccagattcgggttgagccgttcgggattgccctcgaaggcgtttttgatgttggcgaacagccacggccggccctgacatccgcggccgatggccacgccgtcgcagccggtctcgcgcaccatttcgagcgcgtcctcggcaccccagatatcgccattgccgaataccggaatgttgaggtgttccttgagctcgccgatgcgggaccagtcggaatgaccgccatagtattcggcggtggtgcgggcatgcagggttacggccttgcagccctcctcctgcgcgatgtgtccggcttcgaggaaggtctcatggttatggtcgatgccgacgcggatcttcgaggtgacggggatgcccgccggctcgcatacggcgaccacgcgctggatgagctcggtgaagatgtcggttttccatggcagggccgagcctcccccgcgacgggtgaccttgggtaccgggcaaccgaagttcaggtccacatggtcggccatgttgccgtcgaccacgattttcgccgcctgttcggtgatggacggattcacgccatacaactgcagcgaacgaattttttcgcttttggcgaaatggcagagacgcagggctttcgggttgcgcgccacgagggcccgcgcggtgatcatctcggccacgtaaagaccatcgggaccgtattcctcgcagatcacgcggaacggccagttggtcacgcccgccatcggcgaaagcaccaccggggtcggcacggtaatgttgccgagctgcacgggggcgatgtataccggagtctcgggccgtgccggcgcgtccgtacgcgggtcgagattgttggtctcgtgagtagcggtgatggtggtttcggtttcagattctgccatgtggttcctgttctgaaatagttttggctcccctctttgagggggagctgccgccgtaggcgactgaggggagtcgcctcagcaagagccccctcagtccacttcgtagacagctcccctcatagaggggagcctctatacagacccgtctttagtacagaccgccggcttcctgaacgccggactcaggccaagcctcgccgcccatttccacgggcttcaggggcacgcgggtgcgcttctcgccgatgcgggcggccacgtaatcggccaccttgtcaagagcgacgcgctcctgggccatggtgtcacgctcacggatggtcacggcgtggtcctcgagggtgtcgaagtccacggtgatgcacagcggggtgccgatctcgtcctgacgacggtaacgacgaccgatggcaccggactcgtcgtagtcgatcatccattcgttgaagcgcaggtcgtcggccaggttctgggccacggtctgcagttcaggcttcttgctcagcggcagcacggcggccttgaccggggccagacgcgggtcgagacgcagcacggtgcgcttgtcgacgccgcccttggtgttcggggcctcgtccacatcgtaggcgtccacgaggaagcacatcagggaacgggtcagaccggcggccggttcgatgacgtacggcacgtacttctcgccggtggcctggttgaagtagctcaggtcttcgccggagtgcttggagtgcgcgctcaaatcgtaatcggtacggttggcgatgccttcgagctcgccccagtcggaaccttggaagccgaacttgtattcgatgtccacggtgcgcttggagtagtgggagagcttctccttcgggtgctcgtagtggcgcaggttctctggcttgacgccgaggtcgatgtaccagcgggtgcgggcgtcgatccagtactggtgccattcctcatcggtgccgggcttgacgaagaactccatctccatctgctcgaactcacgggtgcggaagatgaagttgcccggggtgatctcgttacggaaggacttacccatgttggcgatgccgaacggcggcttggaacgggaggaggtcatcacgttcttgaagtcgacgaagatgccctgtgcagtctccggacgcaggtagtgcaggctgttctcgtcctcgaccgggccgaggtgggtgcgcagcatcatgttgaagtcgcgcggttcggtccactgtccacgggtgccgcagttcgggcagacgatgtccttcatgccgttttccggcatcttgtcgccgtgcttctcggcgtaggattcctcgagcttgtcggcgcggttgcgcttgtggcagttgaggcactcgacgagcggatcgttgaacacgctcacgtggccggacgccacccacacttcgggcggcagaatgatggaggtgtcgacaccgacgacatcaggacgggtgacgaccatggagcgccaccattcacgcttgatattgtccttgagagcgacgccgagggggccgtaatcccaagcggaacgggtgccgccgtaaatttcgccggcggggaacacgaagccgcgacgcttcgcaagggatacgacttcatcgagtttggactgagccacaatgcaccttctggtttgaacggtttggggtctaataacaaccgcttcaggatagccgtatacggtgacaggtcaggcggcattgtccggtatatgttccgcgtctcacgagcggccgttcgcagcgattcctatatcgcaacacctccatattgttcctgttgttttacccttcccgaatttgtaccactgacatcgcgtcagcgtcacaaatccgggagatgttgctcggcggaggcgtccacatatcacgaatggacgggacgcgccagacctgacgacacgtatcgaacaaatccgtcacgataatgtccatgttggcgcatagcgtcggcactgtagtgcagggggactcgcatgtggttcgcgagttgagaaaggcctgagcctgacccttagaacctgttggttaagaccatcgtagggagcagtaaatgagcaatagtgcatcattgtttgccgatgtgtccagcggttgtaccgccgggactccggttccagccgattcacccatccgcgacaatatcgccgatgccgttcgccgcgtacgcgagacgactccgttggcccagtcattcaccaatttcgtgaccatcaatttggttgccaacgcgcaactggcggccggcggcactgcggccatgagtttcctgccggacgacgtgatcgaaaccgcgaaaatcgcgggcgcgaactacatcaacgtgggcacgctgctgccgttctataaggacgcgctgcccgaaatcgcccagcgactcaactacttggacaagccgtgggtgctcgacccggtggccgccggcatcggccgcacccgcaccgccattcttcaggccttcaaggccgctcccccgaccatgattcgcgcaaacgcctccgaggtaatcgcgctggcgaacatgtgggggctcaataccgaaaccgtggggaacgcttccgagcaccgccccgccggagtggaatccgtcgatggcgtggagtccgcaaccgttgcggcggtggcgctggcacagtatctgaccgaacagcacgccaagcattcctcccatgacgcttccacccgctgtgcagtggctgtgtccggcatcgccgatctggtgaccgacggcgaaaccgtgtaccgactgccgggcggcagcgcgatgatgaccaagatcatcggtgcaggctgctcgctgggcggcgtggctgccacatatctggcggtttccgatccgttgaccgccgctctgtccgcatctctgctgtacaaccgcgcggcagagatagccgatacgacttcgcacgggccgggctcgttccaggtcgcgttccttgacgcgctgtggaatgttaccgccgaacaggtggcggaatccgagattttggtgcagtagtttcagttccctctgatgagggagctcataacagtttttcccaataagacttccacaagaaacaacaaaggtaggaataataatgagtaatgaatacccatacgcctccatgcgagacaacttcgacttgtccgcgtacttcgtggtggggccggaggactgcaaaggccgtccgctgaccgacgtggtggatcaggctctgcgcggcggcgcaaccttcatccaactgcgcgccaaggaggccgatgcctctgagctgaccgacatggcccgcgacatcgcgcagatcatcgaggacaatgagaagtccgattccgtggcctttgtgatcgacgaccgtgccgacgtggtgtggcaggcccgccgcaagggcatcaaggtggacggtgtgcatatcggccagaccgacatggagccgcgagaagcccgcgccctgctcggcgacgaggccatcgtgggtctgtcggctgagaccgaaagcctcgttcagctcatcaacgagctgcccgacggctgcatcgactacattggcgccggccctctgcacgtctccaccaccaagcccgaggcttccgtgggcggcaacgacggctccggcaagacactggacgccgcccagatcaacaccatctgcgctgccagcgaattcccggtggtcgtgggcggcggcgtgaccgcagccgatatggccatgctcgccggcaccaaggccgccggctggttcgcggtctccgccatcgcgggtgccgagaacccggaagaggccgcgcgcaccatggtcgaaggctggaaggccgtccgcggcgacaagaagcacggctacgcgccgcgcgtcgtagcccacacccccgctgctgatactcaggctgctcaggaaggggccgcaaagcctggctccgaggccactgagaagaagttcaccaacgccaaggacgccaaggatgcccagaagctcgccaagcagcagcgcgtggacatcgccgcccgtggttccaagcagcgcgacaaggcgcacatccgcaagaccaagtccgtaccgttcacctatcagtatggttcctacgacctggaagtgccgtacaccgaaatcaagctgagcgacacgcccggcgtgggcccgaacccgccgttccacgactacaacaccgaaggccccaagtgcgacccgaaggaaggtttgaagcccctgcgtctcgactggatccgcgaccgcggcgacatcgaagactacgagggccgccgacgcaaccttgaggatgatggtaagcgcgccatcaagcgcggccgcgccaccaaggaatggcgtggacgcaagcatgagccgatgcgcgccaaggaccacccgatcacccagatgtggtacgcccgccacggcatcatcaccccggagatgcagtacgtggccacccgcgagaactgcgatgtggagctcgtgcgctccgagctggccgccggccgcgcggtgatgccctgcaacatcaaccaccccgaggccgagccgatgattatcggatccgccttcctgaccaagctcaacgccaacatgggcaactcggccgtcacctcctccatcgacgaggaagtggagaagctgacgtgggccaccaagtggggcgccgataccgtgatggacctgtccaccggtaacgacatccacaccacccgtgagtggattcttcgcaactcccccgtgccgatcggcaccgtgccgatgtaccaggccctcgaaaaggtcgaggatgatgcctccaagctgagctgggagctgttccgcgacaccgtgatcgaacagtgcgagcagggtgtggattacatgaccatccacgccggtgtgctgctgcgttacgtgccgctgaccgccaaccgcgtgaccggcatcgtctcccgcggtggctccatcatggccgactggtgcctgcgccaccaccaggagagcttcctgtacacgcacttcgacgagctgtgcgacatcttcgccaagtacgacgtggcgttctctctgggcgatggcctgcgccccggctccctggccgacgcgaacgacgccgcgcagctttccgagctcatgactctgggcgagctgaccgagcgcgcctgggccaaggacgtgcaggtgatgatcgagggcccgggccacgtgccgttcgacaccgtgcgtatgaacatcgagctggagaaggccgtgtgcaagggcgccccgttctacaccctcggaccgctgaccaccgataccgctccgggttacgaccacatcacctccgccatcggcgccaccgagatcggtcgttacggcaccgctatgctgtgctacgtgaccccgaaggaacacctcggcctgccgaacaaggatgatgtgaagcagggcgtgatcgcctacaagatcgcctgccacgccgcagacatcgccaagcaccacccgcacgcgatggatcgtgacaatgcgatttccaaggctcgcttcgagttccgttggctcgaccagttcaatctgtcctacgatccggacaccgccatcgccttccacgatgacaccctgcccgccgagccggccaagatggcgcacttctgctcgatgtgcggcccgaagttctgctcgatggccatctcccagaacatccgcaaggcattcggtggcgaggccgctcagcagcaaatcgtgaaggaggctgctgctggcatcgactccgaggcactggctaaggccaaggccaatgtcgataacgacgtggtgtccgccaacgtgctcagccccgaagaaatcctcgccggcatggatgcgatgagcgaaaagtacaccgcccaaggcggcaagctctactccaccgcccaggagtaaacctctctggctcccctctctgaggggagccaattattatgcccggtggtgtcttaattcgggacgacgctcgactcgctcgaaggcggtgacgaggtcggcagcacggatcgcgccgcggcggtccttggcggccaccagagcggcctcggtccagatggcgcacacttcggcgccgctccagccttcggtccgctgtgcgatatccaccaacggcagttcgccctcgattgacaacgaacgggcctgcacctgcagaatgcccaaacggtcgcgctcagacggcatcgggaaaggaatctgccagtcgaaacggcccggacgcaacaaagcgggatccacgtcctcaatacgattggtcgcagcgaccaccacaacattgcccttggactcgaaaccatccatcaacgtcagcaactgcgccaccaagcgcttgccgacgccattggtatcgttctcgcgcgaggacgcaatcgaatcgatctcatcaaagaagatgatggcgcgcttgtccgcctgcgcggcggcgaaaatcatgcgcagcgtttcctcactatcgcccacatacttgctcacgatggtcgggccggacaccagatagaactgcgcgtccgccacattggcgatgatgcgggccagatgcgttttgccggtgcccggagcaccggtgaagatcacgcccttgatgggcttggcaccgatcgcacgcatctgcgcactgttgcccagctgcgtttcgataagctccttggcgcgcgtgatcacctgctcataaccgccgaacgaatcgaaggtaagcgacggatcgctgcccggcgtgatgcggtactgcttgatgtcgtcatcgtgatcggattcgcctgggcggatggccgtgggccacagcactcgttcgatgccgaacaggtcggtgaactgcacggtgttgccgggcatgatcgaattcgggtaatcgccttcaagcagttcgaggccatcggaagtctccaggaccacgccttcgttgagcgcacggcgcacgatgcccacacggggcttcaacggccacacatcatgcggcactttacgatagaaatccgtgccgacgagcaacacgtcgcccacatcgaacacctcctgacgcggaaatgtgagctgtgtggtgtgcccattaggcattacgccaaaatatgcggtgcgttcatcgtcaaaaccggtgatgcgcaccaagacgccgtcacggcgcagtacatcgttatcagccatgtcccctcccgaacatttcatgaatcaatcgcaatcagcaaaccctccccatctcaccacaggagcggcaaaacatcaaggaaatcgctccgaaaaacatcatgggccccacttagaatgaacactatggcacaaattgcaacatctacactgcccgctgttctcgcgatctccggctccgactcgtccggcggtgccggcatgcaggccgatctgaagaccatgctggcttgcggcgtgttcggcatgagcgccatcaccgcgctcaccgcacagaacaccaccggcgtgcgttccattcaggacaccaaaccggacattctcgccgaccagatcaacatggtgtttgaggatattccgccggtcgcggtgaaaatcggcatggtgtctgccactgacatcatcgacgtcattgctgaacgactcaccttccatcacgccacgaacatcgtgctcgacccggttatggtggccacttccggtgccaagctcatcagtgacgatgccattgcggccttgaccggcaagctgttcccgatggctacggtcgtgactccgaacattcccgaggccgaagtactgaccgatacgctgattcgcgatcaggaggatatggaggccgccgtccaccgcatcgtggagcgttacggctgtgccgcgctggtcaagggtggtcatggcaccgaggatgccaacgatgtgcttgccgagacggatggaaccgtgacctggtttgatggcgcgcgtatcaataatccgaacacgcacggcaccggatgcacgctgagctccgccatcgcctcgtatctggcgcttggcgacacgctgcccaaggccatcaagcatgcgaagaagtacctgaccggtgcgctgaagacccagctgaatctcggccacggctccggcccgatggatcatttctggaagtatcgctgacataagtgtggctgttaagctccccttgccaggggagcttaacactactgaaaaaggagaatcatggttcttgaccgtaatgccgttactcaggaagtgccgatcgacccggaaaccggcaaaccgtacctcaacaccgtggcagccatccaggtgtcggccaatggcgtgggctccgaggtttcaccatacgtggctcaggccgtcgaagtgattcgcgaatccgccctgccgcaggaaaccaacgccctgttcaccaacgtggaaggcaatctggacgacgtgctcaaggtggccggtgaggccgccaagaagctcgccgagcagggctaccgcacttctctggtgctgcacatggatatccgtcccggcttcaccggccagctgaccgaaaagcccaagctggtggatgagatcctcgccgacaagcaggcgaaatagcaaagcatcgcttccaccagcaagggcatgctttgttattacacgtttcatggggcggtaactcacccatagggcggtaaatatctcatggggcggtaaaaccctcatggggcggtaggcgaaaacggctctattctgcggaaaggcaaaatccgctaaccgccccatgggccaaataccgccccatgagtgttttaccgccccatgggaatcacggttctgccttctttcaacggggtaagagcgtaagtggggcatatataggagcgttacaaactctgttatcgttcataatgtgaccgcaacgcggcgtgccacaagatcgaacctatagttaagccccatgtagtgagctatctcacaacgattggctcgctacgtggaattcaagacttggactgcaaacgtcgttcatcccacacaatgggagggcgaacggaacacgcagtccaatcaagagttcgctcgccgcaacatcattgagcagttgcacgcgggcaggtttgcaagaagagggctcaaatatgactgctgctgaacagcagatttccggcaatcccgcggctatggaaagcgcacaagcacgtaccaccgtgacggatcaagccaaggttcaggatattatctcgcgcgtggatcgcgcacatgaaaccccgatgttccatcgcatcgtggcgctggtcgccgctggcatgctgatggacagcatcgacgtatatattggcagcgccgttgcctccagcgcgttggccacacactggtccaccgttgcgcaaaattccacctttatgtccgcaggcttcctgggtctgctggtcggttcgctgctggccggcttcgtcggtgacctgaagggccgccgcgtggcttaccaaatcaacctgctgctgtttggcggcttcaccttcctcggcgcattcgccccgaacatggccgtgctgtccctgtgccgtctgggtgccggcctgggcctcggcgctgaaatcgtcaccggcttcgccatggtcaacgagttcgcaccgatgaaccgccgtggccactggtgcgcgattgtctcgctcgtggccaactgcggtgtgccgatcgctatgctgctgtgtgcatggatcatcccccgctggtcctggcgtccgctgttcgtggccatcggtctgggggccgccatcatctggtggctgcgccgcgacatccccgaatccccgcgttggctcgccgtgcacggccgttacgatgaggccgacgccatcgtcaagcagcttgaggccaacggctccgaactgatcgacgcagccgccaaggccgacaccagcgacacccgcaacgccggcggccgttcgctcggcatctgcctgcttgtagctgtggttgctgtggccgccacgaacgtgtgctcctacgccttcacttcttgggttccgacgattctggtcaagcgtggtattaacctgtccagctcgctgctcacctccacggcgatgatgctcggtgccccggtcggctgcctgattggctctctgcttatcgaccgcatcggccgcaagcgcacgattgtgccggccttcctgttcactggcgtgttcggtttaatgtatgccttccagacctctaccgtgagcgcaattatcgttggcttcctgctcatgatgtgcctgtacgtgcttatggcttccgtggtggctgtgtacgctccggaactgttcgccaccaaggttcgcttgcttccgttgcgtcggcttcgcgaacgccgtggccaagctgctcaatgtgttgatgcctatggtggtgggttggatgcttacctcgcttggtgccacgtccatctttgtggccatcagcgcaattgctattgcatcgatgctgattgtcggcttctttggcgcggagactgcgcagaagtcggttgggtgatcggtttcctcacagtggaataactgctgataatgtccattcggcgtcttgcgtggtgatatgcagggcgccgttttgttgttctagtaattgtcggtaacggttgagaccggtaccggtggataggtccgcactgccatccgcatccgaatccgatgacgtgcgggccatgtcgatgcaggcgatgcggacggtgtccagtccgatgccaatcgtcattacatagcccgcttccgggtcggcatgtttggcgatgttgccgtacagttcctccagcagcccggcgatcaggccactccgaccggctgcgccatgagcaccggaaataatcgtctgaccttcaaagccaagctctgataatcggcggtcaccattgctcgcaacatcacgaatttgctcggctagcgggcaatcagcgtctgtgatgccacatgcaatgccagaagcggcatcaacggtcgaatcatgcggagtcactgcactgtgcgccgcttctcccctgccttcaataacatcaatgacctgatgcgtgcgatccaatgcgcccatagccacgctacgcagttcgcgtaattcttcttcagaaggggtcttgccatcggcaatatccttgtcgaatcgcaaaatcaggtatgccaaatcattggatacgtaatcgtgaatgtcctgagctgtgcgttcctgctgacggcggtgagccaactccgctcgaaccaagctgcgttcgtgattccatcgcgccgccatgccaccaagcatgaagccaataaacaacacggccactggcatcacaccatagagggcaatcgcaccaagaatcacttgcccagtgcgatgctcggcagaagaaccgctcgattcataggcgcttccggtgaagtcgcttcccgactgccctgcgctgtcagacccactggatgaagagccaccatcagcagcgccaccatcagcaacactaccgtctagggcactactactcgccgcgccatccgcagaaccgctcatcgtgtctgagccgccatcaagccaaggaatggccacgccaccacgcgacaacatccacaccacaacggcaatgccggcaaccgccagcgccaatcgcttatcggcgtatccggcaatacccaccgccaataacacggcgagcattgcacccgacggcatccagatcggactcatgcacaacactatccaagccaccgctaccgccacgcatccggtgaccggacgaaacgccatccaccccacaatggcaacgaatatgaactccgcaaggcagtccgccgccgagacactgtcagcagccaagcccgccatggtttccatcgtgcatatcaaggcaacaaccagtatggcaatcaacagccatgcattgcgaacaccgctatccagctcggccaatcggtgtcgtaacgctttcatagcagttcctttcctaccatccatgccgttgcacataccgcccatgccaactcttaaatctcatgccgtttcacgcagattgatatggcatgagcgcgactgcgagcgccgagtttggcgagtgcgcggcgttcaaaagtcgccacagtggccacgctgatgcccaatcgctcggcgatttccttggtggtcgacccatccgcatacatacgcagggtgtcgcgttctttgccggaaagcgcgccacggtgcgcgtatgacgtatcttcgagcaccgcgtaggcggttgcggcatccatgaaggacagcgaattaccgctcccctcatctcccagtaccagctcattggtcgacaatccttgggctgcattgcgaatagcgagcgcaatgccgttcaaatcggttttaccaaccaaggcctgcgccccgcagcgagccgcctcgtcgtgaaatgacgcgagcgcgtatgaggtgacacccaccagcccaacctcgggtgttttggtacgaatcgcacgacagacttcggtaccgggcacgtcgcccatagacatatccgtaaccagcacgtcaggccgcttggtggggctcaggcatcggctgatggccacggcacccaaatcgcaggtccatatcacggcaaaatcgctggacatgcgctcgattagcgcgccgaacactttcagcgcatacgggtcattgtccacaatgccgatgcgtatgttgcggttgcgcgcttctcccattacattcaccccttcagtgtgcccgacgccgaactgctccgtcctgacatgtcatggtcactatgacaactatcattccacatttcctgcgcgatttacgatggaatcatcatcaatccttgacaaggcggtaaaggaggactgcaatgaaccgtgcacaagcactcagcaagctcaacaggagcgatatgcgcaatgccgccgccgagcgcgggacgcaacgaatattcgcgtggaaccgcgcgcattggattggcatggttgtactgatagcggtgttgttgctgctgcagtggagctcatcaatgtatctcatgcccgacgaggtccttgacagggctgccaaaaacctgttcgtatggttccccggtatggttctgcactggccattggtgttgggaatcaccaacctgatactcggttcgatacgatccggcagtctgtctttcccattggcgagcgcaatcatcggaccgctggcattcggctgtaccaatcttcgcttacggccggggttcccataccgttcctgggctcagtggtggaagctaatgcacgctgaaagcggccatcagctattggttcattcgttgatcggctcggccatgctgttgatctgttatacggccgttgcgttcatctgctatgcaatcggacgctacggtctgcgcgaattgtttgtggatccgaatccgcagacggcgagcggacgactgctcacatggattcgtcaggatgcgattcgcttcggctgctggctggcgacggcaatcatgtacggcttgctattggcgctgaccttacggggcggcatggctgcgatggccgccgcgttgctaatcaattttgtgattccgcccgccttgctggtcatcaacggcatctacgcgctacgcccggcctcactgacgtatccgtggaaaagcctgctgttcccgttggcgtgcacactggtacctgcgccgatgctcatggcgctcatcacggtgtatgaagacacgtgcccgataggaagtacctgcacgctgatcggcgaccgatacctctcctggggctcgatggatcaggtcttgcatttcgtcatcgtgttcgccgtggcgagcttcctcggattcggcgtggtgtgggccgtgcggtggattgtggctcgtcgcacaaaataagagagaccaaaatatactggaatcaggggcttcgtgcaatgatgcacgagccgatccaagcaaaggggctgaccatgagcgagaaactgatggaacagtaccggttgcgcaaacaacgcaaacgccgtaacgcttgtatcgccgccatcgtgacagtagtgcttgtccttgccgtcgccggcggcgtatggtggacggccggcgatggcagcgtactggttcgcaatatgttcaagccgaaggccacgcctgccacgcagccggtagtcgacagcaccgcagccttcgcctaccgcaccgcaccggaattcctggcgatgggagccggcgaccgagacaccggcaatgtgaactactcccctgcttcgatgtggatggcgttggccatcgccgcgcagggcgccaatggcacgacccgctcgcaactgaatgagctgctgtgctccggttcgctggccgacagcgactaccaatcgctgctgagttcgatcaacgggcaatattcgggggcgaaatccgagatgagcgccgcgaactcgctgtggatcgataacaactactcccttgccagcgattaccaatccaccgtcaagaaaatgttcgaggccgaagtcaccacgctaccgttcgacgatcaggccgccgccaagatgtccgattggattgccaagcatacgaatggttcgctcaagccgaagatcacgctgcgtgaccgtgaagtcctgtccatcatcaacactgtctatgcggatggccgctggaaggatccgttcgaagagcagtccaccggcgacggcaccttccacggcgaagccggagatgctcaggtgccgatgatgcaccggaccttcagccaaatgacttacagccatgatgagtacaacacttggcagcgggtggagattccattcgacaacagcggcaatctggccatcgtgctgccggccaaagggcatttcgacgagctggccggcaatgccgagaaactcggatgggcgttcggcacgtgttcgtcgacatcccctggcgaggacgcaatgggttgcaccgcggacagtttgcccggatggggcgtctccgtcaactcggccacggtgaacgtctcgctgccacgattcaccgtcgacagcatgttcgactcggaagccaccatcaaggcattcgaaaaactgggggtgaccgatgcgttcagtgcaggcgacgccgacttcaccaagatggtcgacaccgattcgcacggcgagaatctgtatatcggttcgattctgcaaggcacgcgcatcgaggtgaacgaggccggcgccaaggccatgtccttcaccaaagccggcgcagacttcactagcgcgccggtggacaacatcgagttcacggtggatcgcccattcctgtattcgtacgtcaccccggacggcataccattattcatcggtgcggtgcgcaacctcggcggagtcggtggagaacactgatactttcccgacagtccgtcaattagggtgtatcgtttgacgcatggctacgatgaaggaaatcgcgaacaaggcgggggtttccgtctctacggtgtcgctggtgctcaacggacgcgacgaggggcgcgtaaagtccgaaattgcggacaatgtgcgcgccatcgccaccaagctcggctaccggtcgaatccgctggccagttcgctgcgtacaggcaagacgcacatcctcggtttcatcagtgaggaggtggccaccaccccgtacgccggcggtatgattctgggcgcgcagaccgccgcaagccagttcggctatatgctcatcaccgtgagcaccgacggtgagaacagcgagagcgaggaaatcgccgcactcaagcgatacggcaccgacggtttcctgtacgccaagatgtcgaaccgcatcacccatgcgccttcttcgctggccaagacgccactggtgttggtggatgccaccgactcgcttggcaaaatcccgagcgtggaaccggacgagttccaaatcggctacgacgccaccaccagattggttaaggccggatgcgcacgtatcgcctatgtgggttgctcggaaccgatgattgcgcaggatggtcgtttggaaggctatcaggcggcgctcagggacgcctgcctcgactatgacgatcgtctggtcgtcaatgtgctcaataacgggccggcactgaccgcagtcagcgatttgttcgacgccgagcatccggacggattcttctgcttcaacgatgcccgcgcctggtatgtgtacgaatgcgccgcacgccgaggactcacggtcggcaaggacatctccgtgatcggcgtggacaaccatcgcgtgttcgccgaaacgctggaaccgatgctcaccactgtggaactgccgcatttcgagatgggctactgggccgtggccaagctggtgtcaattatcgaaggacgctcgatggacgacgtctcacggccagcgaccaccgctcccctgccgccgatcgacgcgccgattccggcgaagatccactgcacgctgatcgaaaaggcctcggtgaagtaaccgaggcccacgcgatttctcaaggcctccgttcagc

SEQ ID NO: 3147 - DNA, 124026 bp, Unknown
  R215_18m  MAG No. k141_73143
atgatttgattcaggcttctcacgttttggaaaaccttgacgaagaggccagcgctctggtccgtgaagcggaatccgtccgttcccaactggctgaaacgcgagtgggagctgatggaagaatcctcgaagggaacgacgaattcatcgaatccgatccacagcaccgccatctgtcccacctttacgaactgcatcctggcgcaggcatcacgtctaagactccgcgtctggaggaagccgcgagaaaatccctcgaagtgcgtggcgatgatggttccggctggagcatcgtatggcgtatgatcatgtgggcgcgtctgcgtgatgcggagcatgccaagcgaatcataggcatgttcctgcggccggtggatgcgaacgctgaaaccaatctgctgggcggaggagtgtacgacagtggattctgcgcccacccgccgttccagatcgacgggaaccttggattcccggcggccttgtcggagatgctcgtccaaagccacgatggctggattcgcgttcttccggccctgccggaggattggcatgagggaagcttccatgcgctccgcgcaagaggtggaatccaagtggatgcgacatggacggatcagacagtggaatatacgttgcgctgttcgaagcctacggagattacgctgaacgttctggggactgatatgggacgtgtcgcattgtctccggataagccattcaagggaaccatccggcgttaacgtattgcgttatatccgttactaaatgttgcggaccgtctttcctaatagaggaggacggtccgcaatctttttttgatgggaaaggagattccgccattttccacgattggtatgcgcagatgaacctgtacagtgaaagctatgcgtgtaatttctggacgattcaagggtgtggcgcttgctacgccgaaaacgggtacccggcctaccacggatcgcaccaaagaggcgattttctcgcacctcgactcatggggagtgctggatgacgcccgtgtactggacctgttcgccggtactggtgcgttgggcatcgaagcgctgagccgtggcgcgcgagaactcgtggccgtggaaagttcccggcctgcggcggcgctgattaccaagaccttgtcgcagttacagaagaatcgttcgtgggatgcctcgctcaaggcccgtgtgttcaccaaaaaggccgagcaagtggctggcggctttggtgaatcctttgacgtgatattcattgatccgccctacgcctatgagaccgctgaatgcaatcagttgttggccaatctggcggtgggcagcgccaccaacgagaacaccgtgattatgctcgaacgctcggtacgctccgacacccccaccgcccccgagggctggcaaatcactgaaagccgcaactacggcgaaaccgccgtcttctacatcgagcccgcggatgacgactcggatatagagcgttccgacgattccgccgcgtagtgaatctcccaccgtgtggtgaattaatcggcgagccggcgcggatgggtggcggagacctcccagcccaaggccatcagggtcttgcggtcggccttatccagcgccttgcaatccagtgccgcgataaggtctggccggatctcggcggtgcgggccagcgcttcgtcgcggcgaaaacggtccaccctgccgtggtcgccggacaacagcacgtccggcaccgcaataccacgccacacggccggcttggtgtactggcgatgttcaagcagtgcgtcctcgccagtgtaggattcctcgacaatcgaatctgggttgcccatgaatccgggcatcaggcgggtgatggcctcaagcatcaccgacaccgccacttcgccaccgttcagcacatagtcgccgatcgaatattcgcgtacgtcgacgccctgggagcggtagtagtccgggatgcgcgcatcgtagccctcataccggccgcagccgaacagcagatggtcggcatggctgagctcggtggcgtcgcgttgggtaaacaacggggccgatgggttcgggaagatgagcaccggtgtgccggatagggcggaggattcagacggccgcgagaatcccagcagttcgtccaggcattcgctccacacctcgggcttcatcaccatgccggccccgccgccgactggcgtatcatccaccgaatgatgcacatcgtgggtccagtcgcgcaggttgtgcgctttgatctccaacaatcccttggcctgggctttgcccatcaggctgaggttcatcacctcaaagtattcggggaacacgctcacgatatcgatcttcatgttatccagcctaacggtagccccgcccgcattacacggccaccactacactattgcggtgatgaatacgacgatgaacctccccacccgcaaaaagcccgaagtgttgtccccggccggcaacctgaggggcctgaaaaccgcggtcgattatggtgccgacgccgtctactgcggcggcaaagccttcggcatgcgatcggcccccaaaaacctaagccttgaggactttgaggaaggctcgcgctacgcccatgaacgcggcgcccgcgtgtacgtgacctgcaacgtgctgccgcgcaacaacgagatcgaagccatgcgcgagtacgtcggccagctcaaggacaccggcgtggacgcgctgatcgtctctgacatcggcgtgatgatgatggcccgccaagtggctccgaacctggaattgcatgtctccacgcaggccggcgtcaccaattaccaagctgcgaacgccttctatgagcttggcgctcgccgtgtggtgttggcccgcgagatggacttgcaggccgtgcgtgatattcgcgccaacattcccggtgacctcgacatcgaatgcttcgtgcatggcgcgatgtgcatggcgttctccggccgttgcctgttctccaactatctgaccgggcgtgatggcaatcatggcgaatgcgcgcagccatgccgctggaagtattcgatcgtggaagagaagcgccccggccagtacttcccgatcgagcagaccgagaacggcgcctatctgttcaattcgcaggacatgaatatgctggggcacttggatgatttgattgactccggtgccaccagcctcaaaatcgaaggccgcgcgaaaagcgcctactatatcgccgccatgaccaacgcctacaaaaccgcggttaatgaatacatgattcaacgcggttttgaagacgctgatggcaatgttctgaagcctttccgtgaccgtgtgattcgcccgggcgaccccgattttggccaaggaaccgaagatcaagtgatgagcaatgccgatgccgcgttcgccggtgtggccgatgagggatatgaccgtggctctgatactgcggttgccgattcggtcaccggctcggttgccgcagaacgtgaccgcgtgacggttgctgatgccgccgactcaactgcctctggtacgtcggccggcaccgccgtcgaacccgacggcatgagctcccacgcccgctccacgcgccgcaagtccaacaccgcggtcgaacagatcgagaccgattggaagcatgcggccgttcgcccggccccgcacgtcgaactgcccgaatggctgctcgaggaaaccgacaaggtggcccaccgcgactactccaccggcttctattacccggagcacaaggtcacacagaacaccgaccgctccgcctacttccgctcatggctggtagtgggcgaagtgctgagctggagcgcggacgaaggcggacgtgtcacgctgatgagccgtaacaagatcgagcccggtcaacaggttgaattcctgctgcctggcgagagaccattggtctttaccgtgccggaaaccggcctgcgcgatgccgatggcgcgccagtacccgccatcaataatccggcgcacgtgttctcgatgccctgcccgcaccaggtgcccatcaacgccgccatccgctcgcgcaccaaaaagcccaccctcaaagccgaataacctaccactccgcccccgctgactgggggtggtcatgggaatcatgaacaccgcccgcacccaagaaagaatgccttatgcctgaatacagcgaagaaatcctcgattccaacagcatcagctctaccgataaagccggtcgccctattccggtgaccatccccatcgcactggcccccggcatcaaggtggtgtacaccacgcgactgggcggcctgagcgccggcgattacggcaacctgaacctcggcggcaagtccggcgacgaacctgaggccgtactgtcgaaccgcatcgcactcgccgaagcggtgcaagcccgcctatcgctggtctcccaagtacattccggcgtggctgtggacgtggacgactcgttcgtcatcaacacccccttcggcttcgacgtgtccggcacacacggtgagactgacactccgcacgtcatcgaggcggacggccaggtcaccgcacaatccggcatcgccctaggcatgttcgcggccgactgcctgccggtgctgctgggcgacccggtcaccggcatcatcggtgcggctcactgcggccgtcgtggtctggagcgtggtgtgatcggcgccacggtagacctgatgaagagcaagggtgccgatccggcgaacatcgtggccacactcggcccgcgcatctgcggcgactgctatgaagtgggcgacgagatcgccgaccagttcatcaagcgcttcccgctgaccaagacgaagacccgtttcggtggtgccggcatcgacatcgccgaagccgcgatgatcgacctcgccttcgccggcgtacaccaggtggtcgattctatgccgcgcgtgcacgccgccacccagtaccttgaggaagacccggaactcgccgaactgtgccgcacggacggcgaaggcccggccgagctcgcggagcgcatcgacaacatcagccacagcatgtgcacgctcgaaaacccactgtggtactcgcaccgccgcgccgcgctcgccaacaaaacacacgaaggccgcctcctcgccctcatcgtgcgtgactaaacggagaatgcgggcacattccgtggagaagatgtgatgcagttcacggacggccagccctcaccctacggtggtgcctatgactgagagagatttcgatacccccgtcgagacgcctaccgtccagccggcccccgctcagggcgccaaaccggcacaaaccgtgccggtggtggccgtggtgctggccgccggcttcggtacgcgcttcgaccccgacaatcccaagcagcttgtctccgtgggcggcaagcccatcgtgtgctggagcattgatgcctttgaacattgcgatcgcgtcagcgacatcgtggtggtggtcaatcccaaggtgcgcggtgaagtggaaacgttggttggcgagatgggctacaccaaggtccgcgtcatcattgacggcggtgacgaacgtgtggacagtaccgccgccgcgctcgacatgctggctactgctggcattccggacgatgccaagattctgatccatgacgccgtccgtccgttcgtggaacagtccgccatcgacggttcgattgatgcgctcgaccagttcacggccgcgaccgtggcctacacctcaaccgacaccgtgctgttgaccgaggatctgggcgatttgaaagtggtcaagtcggtgccggaccgcccgaacaccttccgcgcgcagaccccgcaatccttccgcttcgcgacgattcgtcacgcttacgatctggctgccgccgacccggacttccatcccaccgacgacacgcgcgttgtggtcgattatctgcctgatgaacccgtcgccattgtctccggtgcggaaaccaacctgaagatcaccacgctggaggatattcccacagctgagcgtatcgccgaggagattctcggtcgtgatcccaaggaagaggcccgcgcccgcatgcacgccctgctggcccaagcggccggccagatgcatcgctagactggcattatgcgtgaactcaatgttgtgatctccggcttcgaccactatgacggcgtggaggtcaatcccgccgtcgaagtgcccaaggccatcgccgagcaggggttgggcgtctcctctgctccggacgatccgttggagcaggtcgccgtcaccgttcatgccgtcagcatcccggtgagcttcgccaaagcctggcccacgctgaaagagacgattgaggccaccaagcccaatatcgtcatcgccaccgggctcaagcacgcagcccgaggcgtgatgcttgaacgatgcgccaccaacctgatggacgcgatcaagccggacgcggacaacgtgaccccacgccgcgaacccatcgaccccaatggcccggccgcctattggacccgcctgccgttgcgctcgatcctgaatgatttcacggacgattcgattccggccaccctgagctcggacgcaggcacgttcgtatgtaattcgctgttctacaacttgctgaactggaccgccacccaggagcgggtgctgggcggattcgtcagcttcccgccggtcgtgccggcggattccagccagcatggtctgccactcgaccagcagatcgccgctggccgtgatgtggtgcgcgaagccgtgcgctactatctcaagccctccagctccggcatcctcatcgcctagcacgctgcgcgccacgccggaatagaacatggttcgcacgcattgtaacgattgcgcgtcactcaacgcccagcgctagtgcgatgcgctacagtgcttcaaggatgtgccaagagctttatgcgtgtgcgaaaggaataaacagcgatggtggatcgtttcccggtggtgctgcgaggatatgacaaggagaaggttgatgctgccttcgacgctactcaggagagtgtgaagcgtgcgcagcagacgttggccagcatgcgtgagcagattgcggcggatgacgaccgtattctgcaactgcaggcccagcttcaggaagagaagaacaagaagccggaaggcaacagcttcgcttccctgggggcgaacgcccagcagatgctcgcctccgccgagcagacgagtaccgaactgttggaacgcgccaagcaggacgcatcctccatccgtaccacggctcaggctcaggccgaaacgctgatcaacaacgccaagctggatgcccagcatattgttgacgacgccaatgccaaggccgcctcgattctgacgaacgccaacaatcaggccgaatcagtgaccacctccgccaacgaggacgccgcacaactgcgctccgaaaccgccaagaccatcaccgaacagcgtcagaccgtcgagcttgagctcagcaacgcgcgcgaagagcacaccaagaagatggcttccgaacgctccacccaagagcgcgaaatcgccgatatgaaggcggaagctacccagcaggttgccgcgatgcgcaaaagcgccaatgaggagatcaccaagcttaagtccgattccaacgatcagattgaggcggcgctcgccgaggccaacaagaagctcgccgacgtgcgcgagcaagtgtccaagatgatgaccgaagcccagcgcaaggccagcgaaatcattgatgcggccaagaccaagggtcaggaaatcactgatgaggccgaggtcaagcgcaccagcacgatgagccaggtcaacgccgaagtcgagcagatccgtcacgacatcgccgctcagcaggatgaggccacgaagaaggtcaacgaactcctgcagcacctcgaagagcgtcgtgtggcggccaagcgggaagccgatgagttggtcggccaggccaagaacactcgcgaccaagccgattcatatgccgcgtccaagcgcgaggaggcggacatccaggccgccgcaatcgtgcataaggcgggcgaggaagccgatgcgcagatcgaggagcgtcgtgccgccgcccaaagcgagcttgacggtctgtccaagcgcatcgccgatctgcaggaacgcgagtccgtcatcacccagcgtgtttcggaactgcgttctatgttctcgcaggcgttctccggattcgctttcggtggtaatgcggcggcctctggtcagagtcaggaagccgctgccgtggcgtcattgccggtggtcgcgcccgtcccggaagtcaagcctgtacacaacgaggccgatgatcagccgggtgagttgagcggaaacgagtcggctgccgacgatcacaatgagacagatgcggcaccggctgattcggctgattcagctgcgcagaatgagcagtccgaatcgtctgagccgtccgagcaccagacacagggcgaaccggaggccccgactcaggagaatccagccgtatctgagcagaacggcgaatgacaggccttcgattagactactagcggtaagaattacggcacctgcgctttcgagccaggtgccgcattcgtttggatctgcgccacaagcgcaccatcacagaaggagtatgacatgagtgaattgacgcctctgaccggcgaagcattgaataccctgcgcggcgatttcgcacagagcggcaccaaccgtctggccatgaacgcggtgaccgccgccggcatcgacaaggtggctcgcaattatgaccgcgctcgtctgatgcagcgccgtttctccaccatcgttgacaatggcgaagccacccatcaggatcgctccggccgctgctggctgttcagctccctgaacgtggcccgtttcgtggccaagaagaacatgaacttgaaggagttcgagttctcccagaactacgcgatgtactacgacaagctggagcgcgtcaactacttccttaaggatgtggccgctctggtggctgccggagagccttccgactcccgcctgatgcagcacctgctcgccgacgtgatgggcgatggcggccagtggaccatggccatgaacgtgtacaagaagtacggcgctgtgcccaaggacctgttcccggagaccgaatcctccaagaacaccggtgaaatgaacacccagctgcgccacatgctgcacaccgccgtggcgcacatgtacgccgctgacggcgatgcctccaaggtcgaggcgattattgccgacgccactgctgccggccaccgtattctgaccatccacctgggcgagccgccggtctccttcgactgggaatggaccgacaaggatggcgaattccaccgcgacggcgagattacgccggttgagttctggaagaagtacgtgggtccggctggtcttgaggactacgtgtgcctggtggatgatccgcgcaccgagcacgccaagggcaagaagatcggcatcgagcacctcggcaatgtggctggcggcgacgccaccgagtacctcaacgtgccaaaccagttcatgaaggactgtgtcaagcagattctcgttgagcagggcatcccggtatggttcggtgccgactgccacccgttcatggaccgtgagaacggcgcttgggccaccgacctgttcgagtacggccgcgtgtacgacgtggacttcgatttggacaaggaagcccgcgtgcgcttcggtgactccgccatgaaccacgccatggctttcgccggcgttgacgtggccgacgacggcaccacccgccgctggcgagtggagaactcttggggcaccaagatcgccgacaagggctacttcaccatgtccgacgactggttcaccgaatacgtctacgaggtagccgtcccgaaggccctgttgccggaggaataccagaaggccctcgaagagccagccaccatgctccccgcatgggacccgatgggtgccttggcctgacttcgccagcctcccggaatcggcctgacggccgatgctgtgttttttcgcagcctgccggctgctagggtctctccctctgtcagcgcgaagccgctgacgggggggccgcggtcgcaggccgcacaacaacacagcatcgccgcaggcgagtccacgcaggcgagttcacccaaagtccataaccgccggcccaacaagcagtccccgtaacagactgctatagttgggcttttgcgtctatagcgccataccgacggtacgtatacaaggaaaggagtcgagcaatggcagcactacgtggtccggatagttccgaggatgaacgtcgtttgggggagcaggccgtctttcccgagaccgtcgatgtcaacattcgtcagcttgaccccattcccgcgccgcgtgccttcctcagggagcagccgctcaccgatgagatgagcgagctcgtgctccactcgcggcaggaaatccgcgatgtgctcaacggccgcgacgaccgactgctcgtcatcgtgggcccctgctcgatccacgacccgaaggccgcgcacgagtacgcagaaaagctggctgccgtcaagcgcgagctggaagaccgactcgtgatcgtgatgcgcgtgtacttcgagaagccacgcaccaccatcggctggaaaggcctcatcaacgaccccgatctggacggtcgcttcaatattcgtaagggcatgtggctggcccgcaaggtgctcaccgacgtgctgagcctcggcctgcccgccgccaccgaatggcttgaccccatcaccccgcagtacatctgcgacgcgatcagctggggtgccatcggcgcgcgtaacaccgaatcccaagtccaccgcgaactggccagtggcctgtccatgccggtgggcttcaagaactccaccgacggctccatcaaggccgccgccgattcctgcttcgcggccggcttcgagcatcacttcctgtccattaacttggacggtcgcgtgatttccgccgaaaccaaaggcaacccggattgccatctggttctgcgcggttccagccacggcccgaactacgatgccgaatccgtgcgtcaagctctggaagacctcaaggtttccaaagcgtccggcccgagccagcatggcctcgtcatcgatgccgcccacggcaactgcggcaaagacgaaaaccgcgaagccgaagtcatcgaagagatcgctgagcgtctggcgcacggcgaacaaggcatcaccggcgtaatgatggaaagcttcttggtcggcggtcaccaaaagccggccccgctcgaccagttggtctacggtcagtccgtcaccgactcttgcgtgccgtgggaacgcaccaacgagctgctgcacaccctagccgacgccgtcaccgctcgcagctcggctaaatagctttgtctttgtaaaaatgctcactgagacccactcagtgagcattttttgccaataacggtggtcatgtcagtttgttcccgtgacaccttatccttgggaaagatactgatccaaggagagatgttatgcagcagcaggaggaagcagcacattcgctgcatccgttgcaagtcggtccgcagccgttgaacaccccggaagagcttcgcgccattcgtcaggcgatgggggaggggaagaacccgctcgttgccactgatgtgccgcgctgggaagatcaggtgggtgtcagtcgcatcatcaaccgccgcgtattggagctggagccgctgcccacgcccgcgcaagtgctcgctgagctcccgctgaccgatcaggctcaggaaatcgtcgcctactcgcgtgatgagattcgcgcgtgcctgtacggccaagacgacaggttgttggtcatcgtcggcccctgttcggttcatgacccgaaggccgcgctggactacgcgcaccgattggccaagctgaaggacgagctcggtgagcagctgctcatcgtcatgcgcgtgtacttcgagaagccgcgcaccaccatcggctggaagggcctgatcaacgacccggatattgatggcagccacaatattcgcaaaggcctgttgcttgctcgcaaaaccttgcttggtgtgctgaaggaaggattggcggccgccacggaatttctggagcccaccagcccgcagttcatctcggacgcggtgagttggggcgccattggtgcgcgcaacacggaaagccagatccaccgccaattggccagcgggctttccatgccggtcggcttcaagaacgccactgacggctcggtgaaggcagcggtcaacggttgcttcgccgctgctcagcagcacacgttcttcggcattgaccatctggggcgtgcctgcgcagtcgagacccttggcaacccggactgccatgtggtgttgcgcggctcgattcacggcccgaactacgatgccgagtccgtggccaaagccatggaagacgtacgcgccgaaatgcccgccgaatccgcagcttcgcacggtctgattgttgattgctcgcacggtaactccggcaaggacgagcatcgtcaggccgaagtcgtgcgcaatattgccagcagaattgcagctggcgaacagggtattaccggcatcatgatggaaagctttattgaagggggcaatcagaaggccgcgccgcttgatcagctggtctatggcaagtcgattaccgacaagtgcatcagctgggaagaaaccgaggccttgctgcgcgagcttgcggaagccgtggccacgcggcgttggcactgagttgcgccatcggctctctcggggggagcaatgtgacgaaacgtctgactacccctcagcccgccattcggcggccagctcccctgacaaggggaaccgaaagtgttgtgaaaggaacttacgtatgggtatgaaaactgtagctattattggcgcattggatgaagaagtggcactgatcgccaaatcgctcacgcatgtgacgcacaccgccaagggcagccttgacatcgtgtccggcacggtcgactccttcggttctgacgtcatcaaggttgccgcaacggtaggcggcatgggactggtcaatgcggccgccaccacgcagctgctgattgacgagttcgccccggacgtcgtgattttcagcggcatcgccggcaacctcaacacccacctgcacatcaacgacgtggtgctcggcggcaccctgcgctacctcgacactgacatgcggctcgtaggccagtggaagcccggcactgcggacgctccggtggaggaattccactctgatgaccgtctgctggaagttgccgacgaggcgcttgccaatgcgggcattacccacatcaccggcatcatcgcctctggcaactacttcgtggacacgccccaaaaggtcgaggaggtcatccgactcaccggggctgacgccgtggagatggaaggcgccgccgtggcacaggtcgccgcccgcaatgacgtgccggcactggtgattcgtgccctttccgacaacgccgacaccgattacgaggtattcaaggagttcgacatctccgagtacgccgataccgccgcccgtctggctgtcgacatcgtcaagcgcctgtagtcggcgggctggcccatctcaccatccacgttttgggtatgatgaccacaatatgagcgttttcaaactattgcttataacctgagccatactcggtgttcggcacagcgatgtgcggggttcatcgctggggccacaagccgtaccagttcttctcccgcatgccggtcgctgtgctcaattcgttaagcgacgacaacaccgtcgcgaagcattgaatacacaatgcgcacgctgcactggggtttatctgcagcatgaggagagaaaaaatgactgcaagcgcaaccgcggctgtgaccaaaccggtgaagaaggattcggttcctgagatcatcgccgcttccatggtcggtacggccatcgaattctacgataactactgctattccattgccgctgctagctacttcggcatgatcttcttcacggacgtcgccaagtccaaccagaccctcgccacgctgatggccttcgtgaccttcgccgtttcgttcctcgcccgtccgttcggctccatgctgttcggccacttcggtgacaagctcggccgtaagaagacgctggttatcgccctgatgaccatgggtatcgccaccttcctggtcggctgcctgcccggttatgagcagattggcgcatggtccgtcgtgattctgtgcatctgccgtgcctgccagggcgtgggcctcgccggcgaatggtccggtgccgcgctggtcgccactgaaaacgctccggccgacaagcgcgccctgtacggttccttcccgaaccttggcgccccgattggcttcttctgcgcttacggcctgaacctgctactcgaatccaacctgagcaaggaacagatgattgccttcggctggcgtatcccgttcctgtgctccgccgtgctggtgatcattggcctgtacgtgcgtgcccgcatgtctgagaccccagtgttccagaaggccactgaagagaagcgcacctccaagcacccgctgcgcgacctgctgccgtactggaaggaagtcgtgctcggcaccgtagccatgggtatcacctataccctgttctacgtactcggcacttggtcgctggcctacggcgtcaagggcttgggcttccagcagggcgagtacctgctcatgcagatgtgctccgtggtgttcttcgccatcttcatcgtggtctcctgcgtgtacgccgacaaggtgggccgcaagaaggtcatgattgccgtgaccgccgccgccttggtgttcagcttcttcgtgccgatgctgctcgtgcactccgccgcccatatcatgatcttcctgtgcgtcggcttcatgatcatgggtggtttgttcggcccctgcggcgcctacctgcctgagctgttcccggtgcacgtgcgttactccggcgccggcctgagctacaacctcgccgccatcttcggtggcgcattcgctccgaccatcgcccaggccctggtcgcctccaagttcggcgttgccggtgtgggctggtacatggccatcatggccgccctcgctctgctcgctctgttcctgattaaggaaagcaaggacaaggactacgagctgtaaatagagctccccatattatgctcccgctggcgggagctgtccacgaaagcggactgagggtggccaatgggatttcggttctttgaccaccctcagtctcactgcgttcgacagctcccgccagcgggagcattttgttatgtcgtcccaccaaaaatgaacaatagacgaacttacgtagtttgggcatctcactacgccttgcacgttttactctggaaatcatggatatctggcagatcgtcgtgattgtggtgctcgccgcgctgatactggcgtgggttgccgtcatcgcctacaacaaaggccgcgtttcaggtcggctcgccgccgaacaggacctgtccggcgacgaggatacgcgttctctattcggtgatgatgcgcccgtgcgccccaccgagcgtcgcctgattgaagtcctgcccgaagccctgattgttaccgaccgcaacggcttggtccaatattcaagccccggctcagtgccattcggcctggtctccggcgaccgactcaactcgcgcgaagtcgaggacatcctcactcaggccgccgccgacggtggcgtgcgtgagcgtgaggttcagctgccggtcaatcgcaattcctatccgtcctctaatggccgaggactggaggccggccagtcacgcccgtccaacatgctgtatttgcgtgtgcgcattggcgatatcggcgatgacctgtacgccatcttcatcaacgacatgtccgagcagcgccgtttcgaggccgttcgccgtgactttgtgaccaacgtttcgcacgaactcaagactccggccggtgccatctcgctactggccgaaaccgtgaccgacgccgccgatgatccggacgccgtacggtatttttccggccgtatctccaaggaatccgcgcgcctgaccgaactggtacatcatcttatcgacttgcagaaagcccaaagcccgcaaagtgtgattgatgcgcggcgcatttccgcgctggatgtggcacgcgctgccatcgccgccaatcagacccaagccgactcccgccatgtggatattcgactgagtgtcaacggacagtcagtgcccacgaaggtcgaggagctggccgatggcgaaggttccttggaagaatcaggcagcccggccacgagcggtccgatgatcaaggccgacaaagaggccatgcaaaccgccgtcaagaacctcgtagagaacgccatccattactcgcccgaacacaccactgtggcggtcggcgtgggggagcgcgatggcaaagtcaccattcgcgtggtcgatcagggcatcggcatccccgccaaatcactggaccgcattttcgagcggttctaccgggtcgacccggcccgttcgcgcgagaccggcggttcgggactcggcttggccatcaccaagcactgcgtgcaggagaacggcggtcggatttcggtctggtcgcgtacgggggaggggtcgacgttcaccatcgagctgccggccgccccggatgaggatgacgacgaggcccggccggacgagtcgacacaagcgtagggccttggttggtgcccgatatggtgccattccattgccgcacaatcacacagtgggcgaggtgcgcacaccgtgcgtagcgcaattacgcaattacgtactttcaggaaacagcaggctaacggagaacaaatggttacgatagtatcggaaaactttgcgcctatgcgcacgggaacatacccaagaaaggctactatggcacgcattcttatcgtcgaagacgaggaatcctatcgcgagccgctggtataccagctcacacgcgaggggtacgacgtgtccgccgccgccactggcgaggaaggtctggaactgttcaccaagggcggcatcgatttggtgctgcttgatttgatgctgccgggcattgacggcactgcactgtgccgtcgcattcgtgagcagagccgtgtgccgattattatgctcaccgccaagagcgccgaaatcgataaggtcgttggccttgagattggtgcggacgattatgtgaccaagccgtactctttccgtgagctgctggcccgcatccgtgccgtgatgcgtcgcaatcaggccacggcccaggcttccggcactgtggatgacgatattccgctggtgtgcggcgatatcgccatgcaggtaggccagcatcaggtcaccgtacgcggcgaaaccgtgttcttcccgctcaaggaattcgaactgctcgaatacctgatgcagaacaagggccgtgtgatgacgcgtcaccagctgatcgaccgcatctggggttcggattatgtgggcgacaccaagacgctcgacgtgcatgtcaagcgcgtgcgctccaagatcgaggaagatccggcgcaccccaagtatctgactaccgtgcgcggtctcggatacaagatcgatactcccgcggagtaaatggaaggcggccttcgggccgccttttttgttgtggattgtgggctcgccgcaggcgagtccactccaaaaactacgtagcctcaacgtagcccacaaacatccaagtgttcatcttctgtttactgatttcggttttgggcccttgaaaccaccaatacgcttgtagttgtcatgaattgaccgggcagcgctgagccgcccgcgaatagttgatagagggattaagtaataatcatgcagaagaacatcctcattcgctccattgccgctctgtccggcattgtgatgctcgcttccgtggccgcctgcggcgataacaccgccaccacgaccgacaacagctcctcctccgattccacttccaagtccaccccggtctccggcaacttctcgggcgccggcgcctcctctcagcaggccgccgttgaagcctggatcgccggcttccagggcaccaaccctgaagccaagatcgcctacaacccgtccggttccggcgctggcgtgcagaccttcctgaccggtgccaccgcttgggccggctccgataaggcccttgctgatgacgaagttgagcagtccaagtccgtgtgcactgaaggcaccgccttcgatgtcccggtctacatctccccgatcgccgtggtcttcaacctcaagggcgtttccgatgccggcaagcacatcaacatggacgctgccaccatcgccaagatcttcgacggcaagatcaccaagtggaacgatccggccatcgccgatcagaacaaggacctgaagctgcccgacaccgccatcaccgtcgtgcaccgctccgataagtccggcaccacccagaacttcgtctcctacttcaaggacgtcacccctgacaactggacctacgacctctccgagaactggccgaacgaggttggccagggcgccaagggcacttccggcgtgatctccaccgtcaagcaggccgacggcaccatcggctacgctgacttctcccaggtcggcgacctgggcaccgtggccgtcaaggtcggcgacaagtacaacgagatttccgccgaggccggctccaaggtcatcgaggactccaagcaggacgacaccgttaagggcgacaaccgcatcgtcatcaagatcaaccacgccaccgaggccgagggtgcctacccgatcgtcttggtctcctacgacatcgtctgcccggcctacaaggacaccaagcaggctgagttcgccaaggcttggctgacctacgtgacctccgacgagggccagaaggccgctcaggatgccgccggcaccgctccgctgccctcctccctgaagtctaagatcaccaagtccatcgaggccatcaagaccaagtgatgacgtcggcccgcaagggtcgtgtggactggacctgacaactgaacgatagactgtagtagtaagagcagtcgccgccaactttaagccgcagtcgtaaaccatacggctgcggcttaaagcgggtcaggacccgaacggtttggcaaagtcacagacgaaaaccgcaccacttgaatacttgataaccaccctatataaggagaatccgtgagttcgcaagacaaaacggctgtgcagccagttggaggcaagaccgccgacaaggtgtttcgcggtgtggcatacgcctgcggcatcctgatcctggttgtacttgccgctgtgttcctgttcctgtttttccgcgcctggccactcatcggtggcgatcaggccgccaacagcgacaccgtgtccagctttaccggcggcaaggccagcagcttctggggctacgtgctcccgctgttgttcggtactgtgctcgtgtctttgctggcactgctgattgccttcttcgtgtccatcggcattgcgctgttcatttcgcactatgcacctaagaagctcgccaccgcgctgagctatgtggtcgatctgctggctgccatcccgtccgttatctacggtttgtggggcggcctgattctggtgccggccatctacccgttctggaactgggttgccaaccacctgggcttcattccactgttcgagggcccggccgccaacccgtcgcgcaccgtcgccaccgtggctgtggtgctcgccgttatgattttgccgattatcacctccatgtcccgcgatatcttcatgcagaccccgcgcctgcacgaagaggccgcgctggcgctcggcgccaccaagtgggagatgattcgtctggccgtgctgcctttcggcaagtccggtattgtgtccgcctccatgctggctctcggccgcgcgcttggtgagacgatggccgtgttgatgatcctgtccccgggcctcaactactccatcaagctgctgcaggcctcgcagaaccagaccatcgccgcgaatattgccgcacagtaccctgaagccaacgatctgggcgtctccacgctgattggaaccggtctgattctgttcctgatcacgttcgtggtcaacttcatcgcccgtaagcttaccgagaaagcgactgcgtgatgactgctgctgagaacactgaaaagactccgatggacggcacgcccgaaatcgacttcgatcgtttccgcccgacccgttccgccatccagcgccgtaatatcatggaccgcttcatgtgggccctgatcgcggtggcgtttgtgatcgcctgcatcccgctgatctccctgctgtggaccactatcgtcaacggcatcaagcgcctgaacctgaacttcctgagctacaacatgaccggtgtggtcggtggtagccagaccccgtccggtggttacggcggtgtgctgcacgccatcatcggtactctcgaaatcaccgctggcgctatggttatctccattccgatcggtttgatgtgcgccgtgtacctggtcgaatactcgaaccgcggcaagctcgccaccacgatctccctgctcgtcgacgtgatgagcggcatcccgtccatcgtggccggcctgttcgccttctcgatgttcacgattctgctgggccccggtaccatcaacggtttcgaaggctccgtggctctctccctgctgatgctgcccaccgtggtcaagtccagcgaggaaatgctgaagatcgtgccgaacgatttgcgtgaggcttccttggctctgggcgttaccaagcagcgcacgattaccaagatcgtgctgcgcaccgctctgccgggcatcgtctccggtgccattctggccatcgcccgcgtgattggtgagaccgcaccgttgctgatgaccgccggctacatctccagcaccaacgtgaacctgttctccggccagatgaccaccctgccggtgttcgtctaccaggagtactcgaagctcagcgcgaactgcccgcccaacgccgacgccacctgcgtgaccacgattccgatggaacgtgcgtgggctgcggctctcgtgctgatcgtcatcgtgctgctgctgaacctcattggccgaatcgtggcgaaggtcttcgccgtcaagaccgagcgctaagccagtcgctaagcctaagccttaagaacacaaggaaatataaggaaacatcatgggacaacgtattgacgtcaaccacgagaacatctattacggcgactttctggccgtggaagatgtgaacatcaacatcgagccgaacaaggtcaccgccttcatcggcccgtccggctgcggcaagtccaccgtgctgcgcaccttggaccgtatgcacgagatcatccccggcgctcacgtcgagggcgaggtgctgctcgaaggcaagaacctgtacgacaaggacgtggatccggtggccgtgcgccgcgacgtcggcatggtcttccagcgcccgaacccgttcccgaccatgtccatccgtgagaacgtgctggccggtgtgcgcctgaacaaccaccacctggccaagtccgacgccgacgatctggtcgagtgggctctgcgcggtgccaacctctgggaagaggtcaaggaccgtcttgacaaccctggcatcggcttgtccggtggccagcagcagcgtctgtgcatcgcccgcgccgtggccgtccaccctcaggtgctgctcatggatgagccctgctccgccttggacccgatttcgaccttggctgtcgaggatctgatcaacgagctcaagagcgactacaccatcgtgatcgtgacccacaacatgcagcaggccgcccgtatcgccgactacaccgccttcttcaacctgaaggcagtgggccagcccggtcacctcgagtacttcgcggacaccatcacgatgtttaacaacccgcaaaacgaagaagccgagcgctacatctctggaaggttcggctgatcgtttcctgcgcgcagcgtaatgatttgtgcgtaggagaaacggcaaagcccgccgcaaggcgggctttcgcatattcaacgcgagtattgccgagtattatcgttctcgcaacggagcgagctggaatactttgtcggactgggcggcgacttcccgcttcggtcgatcgacgggagaacggcgggtaaagcggtacaagacaagtccgcacgatgaatactctgtgatgaatcttctgtttacggtgcgagtgtggaagaatggtcacagcaaggtccagcaaaggagcataggtgagtactggtctgatcgtcggcattgtcgttgtcgttattatcgttgtcttgattggttggggcgtcagcgcctataacaacctggtgacgctgaagaaccgtgtgaagaacggttgggcgcaaatcgacgtgcagttgaagcagcgcgccgacctcatcccgaacctggtgaataccgtcaaggggtacgcatcccacgagtctgaagtcttcactcaggtgaccgccgcccgcgccggcgtagtggctgcggccagcaacccgagcacgaccactgctcagcgcgccgccgccgaaaaccagctgtcccgcgccctgttcaacctgcaagccacggctgaggcatatccgcagctgcaagccaaccagaacttcatggatctgcagaaccagctcaaggaactggagaacaagatcgcctacgcccgtcagttctacaacgacgtggtcctgaagctcaacaccgccatcgaaaccgtgccgacgaacatcatcgccggtctgttccactttgagcaggcgcaatacttcgaggccgatgacgcttcccgtcaggtgccacaggtccagttctgacccgcttcaggcccgtccggtaagccgccggccgggcccgtattgtcttaagagagggaagatatgcggatacgattcattcgcgccggaatcatcagcattgttgccacggtggtgttggcagttatcaccttggcgataatcgggacttccgcgttcggcgattcggccgacctcagctaccgcacgctggactatgacgtgaccgccaccgcgaacggtgatttgaaggtcacgcagcatatcgacgtcaagatgcgtgagcgtaccgacagtgacgacaacaccaagccgtggaagcagctgttccagcaatacacgctgaactccggcaccttgactgatatcagcgatatcagcgtgcgcaacgtcaccgacggcatcgactacgcacaacagagcgagcccaagctgcccagtgacgtctcttccgacaaggaatggaacagcgactacgccaaccattggtatgtcgccgatgtgagcgatggcagcgaccatccaaaggcatacacgcccggtaccgatggcctcaagcccagcgcctccgccaccgaagatgacacaaccgtggagatcggctggaatattccggtcaccaccgaggccgacagcatgaagttcgatgtaagcttcaccatgcacgatgtggccaccaaatggaaagacgtggcctccttccaatgggagccgttcggcaagaagaaccaagtgcctatcggcacggtcaccggcaccgtccatttccccaacggcatcaccggcaaaacctcatggacatggctgcacaccgagcgcacctcggaaaccaagcgcaacagcgacggcagctacacgttcacggcctacaacatccacaatggcgactacctcgatgtggtcgcggcgttcgatgccgccaaagccaagggcatcgcccgcaagggaaccggcaatcatctcaaggacctgaaacaggacgaatataagcaacagcagcgctggctcgacaagcaacgattcgctgccagagctcgtctcgtgttctggattgtcagcatcgtgctcggcatcgtgttgtgcgcgtggggtatctgggctgtgatctccagcaaccggcgtgcgcaatacagtggcagcgtcgaatactggcgcgaccagcccggcatcagtccggcttccgcagcccgtctgattcgcgtggtcgatccgtcgacgcgccaatccgatgaagaccgccagctgaccgccaccatgctgtcgctcgccgtcaagaaggccatcgccatttatccggggccgtcggacatgtatcgcggcatcgacatgagccaggccacgccggtgggcttgagccaaatgattgccgccgaccaaggcaagcagtatgcggcaggcatcaccagcaccatcgtgattctgccgctcgccattgatgaggcacccaacgcgcaacagttgggattgagcgaatcggaagatgcgctgctgaacctgctcatcgtcatttctcagcgcgtgggcagcccggtattcgacctgaaccagatgaaggcgacctgccagaactggcaagacggctatattgagctcggcaaattcaccggtgcatgcagcatggaataccagcggctgggtgccacgcgctctgtgggctggcaatggatcctacccggcgtattggccgtcgtgctgggatttggttcgctgctggccaacagctttatcggatacccggtggctggtcttatcgggctgccgatattcctggtcggactgttctgctcgatggccggcgcgatgaccgtgctcactgatcaagggcaggatatcgccggccggactctgggccttaagcgttatatggaagacttctccaacttcaccgaccggggtaccgccgatttggccttgtgggattggtatatggtctacgccgccgcgtttggcatttccgatcgcgtgatgcgtgaactggccaaagcatatcctcaggtcaacgacccggcttggctggatgccaacgcctccaactcgttgttctactggaactaccgcccgtatggctggtacagccaccgtcataatggtccattcgaccacgatgctgccgggcagatggacctaggcgttggcggcccagctccggcttacggaggcacgtcgtttgccggcggattctccgacctcggctcgcagctgaactccggtctggcggacatcagctcgaccatcagcgcggcagcaccatccgccgattccggtggcgatttctccagcttcggttcgggcggcggctccggtttcggcggctcgttcggtggctcaggtggcggctcgttcggcgggcggtagcgcatgcctatgtcgaaacgcattgttcgtgccctgggcttaagccttgtcggtgcgctgattcttgccgcactctgtgccggtgccttgattctcggcacagatggtgccgacctgagctaccgcacgcttgattacgatgtgaccgccaccgccgacggcgatcttaaagtcacggagcatatcgatatcaagttgcgcaaacgcaaggatgacgatggcaagaccaaaccgtggagatcggctggaatattcccaccaccgtaaaaaccaacagcatcaagttcacggtgagcttcaccatgcatgacgtggccaccaagtggaaggacgtggcgaccttccaatgggagccattcggtgagaacaatcaggtgccgattggtacggtcaccggcacggtgcatttccccaaaggtgtgaccgcgagcaactcgtggacttggctgcacactgaacaaacctcggaaaccggccgaaccaaggatggcagcttcaccttcaccgtaaatgatgtgaaaagcggcgagtacctagacgtggtggccgctttcgacgcggccaaggcgggagatatggctcgtgtcgagaccgacgatcatctgcaggagttgaaggaagacgaagccgacgacgaacggttctggcgcaatctggaacgccaacgcgccacaaggcgcctgaacaactggatgaccaccatatcggccggcctgatattcgggattattggtgttgttgcagccttacgctcctccggacgttcacgttaccgtggctccatcgaatattggcgcgatcgccccgagctgagccccgcatcggcggccaaactcatcgatatcgtgacttccggcgacaaacccgacatttccgagcgccaactcgtcgcgaccttgctttctctggccgtgaagaaagtcattgctgtgttccccggttcggcggacctgtatatcggcgtggatctgaaacaagtttctccggtggagctcagtcagcgaatcgggtccgatccatacaagcgcaataatgcgcgtaccaatagcacgattgtgatgctgtggcagtccgattacggcgtatctgagggatttgatgaatcagtattcgtcgaatccgtatttgatggatctggatctggcggatctggatctgccgcatctagcgtgtccgatgcacaccagcccgatctcagtgcttctgagcgggcattgctctatctgctcaccgtgatttccgagcgcgtaggtcgtacggcatttgacatggatgacatcaaagacgcctgcaaggattggaaagacggctacaaggaactcgaaaagttcaccaatgcgtgcaagaccgaattcgcggcggcggatatcgcgccgaaaaccgagaacggatggctcattcccggggcaatcaccgtgctgatcggtggcgccagcatattcatcaacggtttggccggatatctggtggccggggccctcatcggcattcccctgatgacggtcggcatattctgcttcctgatggggaattcctacgtgctgaccgatcatggtcagcagatggccgggcaatgcttgggtctcaaacgatatatgcaaggcttctcgaacttcaagtaccgtggagtcgcggatttgacgctgtgggattggtatatggtctacgctgccgcatttggcatatccgaccgggtgatgcgggagctggccatggcctatccgcaagtatccgatccggaatggcttgatgccaatgcctccgacacggtgttctattggaattatcgtccgtacgactggtatgggttgcgtttctacaatggctcggcgttcgcggattccgtggctgacagcggattggccggagcggtgccagcgttcgggggcacgtcgttcgcggctgggttctctgacctcggcacgcaattgtcgtacggatttgcggatatcaccgcgacaatcaatgcggcctcgccatccggtggctcaggcggctttggcggtagcagcggcggttccggcggcggttcgttcggtgggcggtaagcgatgtgcttctgaaagtccctatagctttgaaagtaaaaggcccggtgtcataagacatcgggcctttctctcaaaatcgaggtgaggagacctcaacagtcaggtccaacggggcgaaagtctgtggcgccgccgagaagattgcctcgaagctagcgtgacctttctgctacaacacagcataccagcctccaccgaagctcaccagtacactggactgaccaaaccaaggtctactagcgtgccactttggcgcggtgtcgttgtgtcaaccggcataatgacgtctcaaaattcaagaggaggttctcatggtaggcaacgaccatgacaaccgtccgagacaagaccggcaataccgggaaggtctgatgaccggcctgttgatcgccctggccaatcaagttggacagtggtggtcgacggccatcatcattgccgcactggtattgctgggaatgagtctcagacgaggtcactgatctatcagcggaacagccggaatccatggggttccggctcctcgttttcgctgaactgggtatgagtaagttgcgttttctattccgtgaagttgcggaaatttcatagattgattgtgcgggcaggccgagagtgtgaaatccaacgggatgcttaggcttgattgtggatatcgagtttccataagtttcacgaagggaatcaccatggcattgttccgtaacctcgggccgttctccaccaccgccatcggccacggcgaaatgccgctgaccatcgaaaacaaccgcggccacgaggtcggcatcgaaaccctgcatgcctcgctggacgccggctgccgccacatcgacaccgcttgggcctactactgctccggcggcgaagaacagaccggtgaaaagctggtgcgcgaggcccttgagacctggaagggtccgaaggacgaggtgctggtggccaccaaggtgggccacttccgcaacttcaccgacggccgccccacgtgggatgtggacggtcgcccggagaacctgattcggcgcggcaaggagagcgcactggcgctcggcgtggacgccatcgacctgctgtacttccaccgcccggacccgaaggtgccgtacaacgagtccgtcgaagccatcaagcagctggtggacgagggcgtggcgcaggaggccggtatctccaacgcctccatcgagcaaatcgacattgcgcgcggcattctgggcgacaagctcgtggccgtgcagaaccagtactcgccgattcacctggagacccaggacacgctcgactactgcgccaaggtcggtctggccttcgtgtgctggagcccgctcggcggctaccgtcacccctatgatgagaccaagttcgacccgttccgcgaggtcgcggcggcccacggcgtgagctaccagcaggtcgtgctggcatgggagctcgccaagggcgaccacatgttcgtgattcccggcgcccaccaccccgagaccatccttgactccctcaaggccgaccagctcgaactcacccccgaagagctcgccaagctcggctgattgcccattccccatcctcccgaatttgtgccgctgacgttggcttaacgtcacaaattcgggaggattgattcgtcttgaaggaaccgccatgcgcaaaaaactcatcctcgacctcgataccggcatcgatgacgcgctcgccatcgcatatgccctaggcagtgccgacgagatcgatctgatcggtatcacggccacctacggcaatgtcgcggtgccgctggccgcgcgcaacgcgctggcggtggtgcacttgttcggccgtgacgacgttccggtctatcccggagtcgaccatcccatcgccccggcaacattgccgaaaatgcgtggcaccacaccagacgagcggacccaggcctacgcgcgctggcagaacggcggcgcggacggctggcaaacggacgcttcgtgggcaccaactcccggctcggtggcggtccaccatcccaacggcatcggcggcgcaatcatccccgactccccgcgcgctccggaagcaccaggctcggcggtcgatttcatcatcaccgccgcgcacgaatacggcccggatctgaccatcgtacctacgggcgcgatgaccaccatggccaccgtattccgcaatgctccggacctgaaggattccggcgtgaacgtgacgttgatgggcggtgccctcacattgcccggcaatgtgagcccggccgccgaagcgaacatctcccaagacccagagtcagcagactatctgttcaagtgtggcgcacgcaccaccatgatcggcctcgatgtgacgcaccagaccgcgctcacccgtgagaaagcccatgaatgggcgtctctggggacgccggccggcgacttcctcgtcaccatgaccgactactacatcgacttctatctgaagaaccagccggagattcgcggatgtggactgcacgacccgctggccgtggccgccgcgctcgacccatcgctggtcacgaccttcgggttcaacttgcaagtcgatctcgagggcccgttccgaggccgtaccatcggcgatcgttcacggctccaggaccccgacaaacacacccaagtcgcattgggcgtcaacgtgccggaattcctcgaccgtttcatgacccgcgtcaccgccgccgcgcgcgggtgaacgattacgcttcggcagggaatagggttctgcgtcaagtgcgtctgcgactcgcatgatggtgttgaacgagggctgcgaattcgggcgaagcgccttatataaggattcgcggccgaggccggattttcgggccacattggtcatgcctcgtgcgcgtgcgaccacaccgaacgcatcttgcacaaatgcgggatcatcctcttcgagtgcgccattgagatatgcgatggcatcctcgtccgaattgatgtatgagaatcaccaaaacttaaccacctatttcacatacccgaaaaaacagaaaaagaatcagatggtcgctggattttccctgctcttttcgatctgacgtttgagatattcgcccagcccatccacgcaccaaagtgggatgttcgtcagccaagattgcttcctatagcctatttctcctatacggataccgtggagcccgtatctgttgcagacatacgagagacttctcgcacgaatattggaagaggacttcacttcgatgggaaaaacctcgtctccctgttccattacgaaatctatttccgcatttccttgaggatttgggttagcccaatagcggggtctgattccttgagctaccagctgctgacatacgtattgttctacgaacgcgcccttgaattcggaaaagagcttcgacttgttcaccagagtattcacgtcgagaccggacagtgcgcccagtatgcccgtgtcttccagatagatcttgaacgtgttaagactctcatatccgggcagaggaatatgcagagcatcgaggcgggggactttggtaatgatcccgtagtccgtcagccaagtgagcgcttcctcatattcgcgggcgcgggctccttgcctgacaacaccgtaaacgaatttgcggttctccttggcgagttgtgatggcagtgtgttccatacaagccggatacgctcgcccagcgtatatgcggcatgcttggaaaaatcaagatcgtaggcgttgagaatatcttgttggacagttcgcacatcctgcggaatcccgttatccaggtgagcgcttaatgctgctggcatgccgccgacccacatatatgttttgagtaggtcattcatctgaggttcgagagcttgtggaatgtcctcgaaccggccttcacgtatggtgtcggcgatcatgtcttgtccgatgctgtccagatattcggcgaaggagagcggatgtaggttcatcatggtgacttttcctacaggaaaagaggttttgccgtgcttggatattcccatgtaggagccggtggcgatgatgtcatagtcaggtgcctgctcggtgaagtatttgagagaggtcaacgcgagcggactttcctgtatctcgtcaaagaagagcagtgttctgccggggagtatccgttgattggcggcgagttcgagctgacggattattcgttgcgggtcaagatcctgctcgaacatcccggatagggatggccgctgcatgaaatcaaccgagacgatgttgtcgtattgtccattcgcgaactcgttgacaagccatgtcttgcctgtctgccgtgcgccacggatcaggagaggcttatggtcaggtgtggtcttccactgcttgagcgttttcagtgcttttcgctggagcttcatgacgaatatcctatgataaatgtgcgatgcttacacatttatcatatcataaatgtgtaagcatcgcacattttttatagtttattgcagtcgcagtagttttagcgcaacggataccagctgatcggtacgggtcttgatcgcttcggcatcccatttggttatctgtgaggctcagccatcttacgcggtataaacgttaaggagcaaccaaagggcggtctttctgagactaatctcagaaagaccgccctttgcgatggaataaattgagtgtggaactcggtattggtttgaaagactgtttacagcccgggaatcagaccgccgggcggatcgagcgtgaggtattgctcctccagatcgatgtcggggaccaaggcctccacgaacgggaccaatgcggtcttttcgaccacatcctcgcccttggaattctggccggttaccaccggctcggtcaaacgaatcttgagcagggactgagcgggggagtcgaccacatccaccactttgccgaccacttggccggtgggcagtcccagaccgttgccctcgactagacgggcctcaaggccaataagatccttgggataccattcgtcggcttcgagcatatcttctgcgtcgtcggcctcgccatagagttcgacaccgtttagggcctcggcggcattgcggtcgtcgacgccctcaagcttgagaatccaacgatctttgaacgtgcgcgagccctcgacgatgtactcggtctcgccatcctggctgtagagcacggagtccggctcgaagcgccactcgggatcatcggtgtacaggcgcacggtgacttcgcccttcaggccctgtgcgcggccaatacgagcgaccctcagcaactcgagctgctgagggtcgtcgtgcatgtcttgctgtgccatgctgtgaattgttccttatcggttatcgacggacgtccatgatgtcaacgcggaccttgtgatcagacagtgcctgaatcacggtgcgaatcgcgttggcggtgcggccgccacggccgatcacacggccgatgtcttccgggttcacgcgtacacgaagcagttcgccgcgcgcgttctcatgggacttgacggaaacatcgtcgggaaaatcaacgatgttcttgatgaggtgttccacagcctgtgcaagcatagctagcctttcgtttccgctcaggcctcagccggagcttcttcggcggcctcttcagccggggcttcctcagcggcggcagcggcttcggcttcagccttggccttggcggcagcttcggccttggcggccttcagcttctgagcctggttctcaacggccgcgatgcgggcctcggcgtccgggccagcctcaacggtcttcagggtgccttcggcaccttcaaggcccttgtacttctgccagtcgccggtgatgttcagcagcttgaagacgggctcggacggctgagcgccgacgccgagccagtactgagcgcggtcagacttgatctggatggtcgagggctgggtgttggggttgtaggtaccgatctcctcgatgaccttgccgtcacgcttcttgcgggaatcgacgaccaccacacggtagaaggcgtagaacttcttgccctgtcgcttcagacgaatcttggttgccaaaatggctctccttgtaatgctaggtgtgcgggttctcggtttgccatgtggggcatgaccggccggaatccacgtgtcctcgcggctcggggtgtagagggcgccacgcgcgcgcgaataaccgtactagtgtaacgcggaagccggatattgcgcatcggtccggtcgtgacgcacggaatcgccggacggacggcgtgtcggcggcgcacctaccgtcttcatgactgatagcctgattgatggcagtgcgagacgggaaagggggcgctgatcgatgggtgagtgcgtgatcggccccggtgcccgggcgcgtgtggatgcggatgacggattcttcttcggcatgggggccttcgagaccatcgcggtatccggcggcgcgcccttgttgttggacgaccatctgacgcgtttgggtgagacgttgcgatacctcggcatcgaggcgcgtcgcgccgatctggagacgatggtgctccgcgcatgcgccggactcggcgcatcggacgattcggccctcaagctcacggtcaccgagcgcaaccgcgtcgtctcgttgagacgcaacccgtatgccgcgccgggggcgaagcgcgtcttccgctgcgacttcgccgatgtgcgcaggaacgaatcctcccccctcgcgcgcatgaagacgctggcgtatgccgaaaacatcatggagaagcgtcgcgcccgtgaccgcgccgtcgacgagccgttgttcctcaatacgcggggcgaggtcgccgaaggggccgtctccaatatcttcgccgtcatcgggggagacgtcgtgacgcctcccgtctcctgcggtctgctgcccggggtcatgcgccatgccgtgatcgggttcacgggggccgtcgaacgcccgatcatgcccgacgagctgcttcgggccgacgaggtgttcctcaccaactccctgatgggtgccatgcccgtggccggtatcggcggcgtggaattcgaaccggggagcgtgtcgcgcgacgtgaacgacgcctacgcccgcatggtggcgcaggcgcgggcccgggcgcaggagaaggagtcccggtgagcgcgcaggtgttcaagctcaggacgttccgaccgcttgccgacatcgtggagtgcgtgcgcggcgaggaacgcttcgcgttcctggactcctcgatgccgggggcgcaggggcgctactcgatcctgggactcttcccctatcttgtgatcgaacatgggcggggcggatgcctcgtcgacggcgttgccgtggagggtgatttcctcgatgtcgtgaagaagcggcttggaccctgcgatggcgcgcgcgatccgcgtctgcccctcacgggaggcgcgatcgggtatctgggatacgatttcggccgcgaatcgtgcggcgtgccgaccaggcacgatcccgtcgcggccacaccggaggcgagcatggtcttctacgacctgctactcatcgaggacgtccggtcgcgggcgttgttctgttgctgccaggggcggacgatgacggccgcccacgccctgacatgggcgcaggacctggtggattcatgcccgcccgcccctcatcccgcgcgccgacgttcgctcgccccatgctcctccgatttcacgcgggccgggtacggcgacgccctggcccgtctcgtcgatcatctgcgcgccggcgacgcctacgtcgtcaacatggcgcagcgcctgcgcctggagacgtccgagagcccctatgccatctaccgttatctgcgcacccacaacccggccccgttttccgcctatctgcgcgcaccgggtctcgacgtgtgctgttcgagcatggaacggttcatggagattcgctcggggcatgtggtgacgcggcccatcaaggggacccggccgcgcggcggcacgccggacgaggatcgggcgaaccgcgaggaactcgcccgcagcgagaaggaccacagcgaactgctgatggtcgtggacctcgaacgcaacgacctgtcgatcgtctgcgaaccgggttccgtcggcacggaccccgactttgccatcgagacgtatccttccgtattccatctcgtcgcgaccgtcgaggggacgctgcgcaaggatcgttgcgccgtggacgcggttcgcgccgcgttccccaccggttcgatcaccggcgccccgaaggttcgcgccatgcagatcatcgacgagctcgaacgcgcgccccggggattgtacacgggcagcatcgggtatttctccgatacgggcgattgcgatttcaacgtcgtgatccgcaccatcgtgcgggagggaggcgggacgtcgctcggcgtgggcggaggcatcaccgtggaatccgatttcgacttcgagtacgacgagacgatgcagaaggcccgggcgctgcgggaggccgcttccgttgacagggggagcgtcggcgagtacaatcgcggacaaaacgaataactatcttcagggcagggtgcgattccctaccggtggtacagcccacgagccgcaaggcatgatttggtgagattccaaagccgacagtacagtctggatgagagaagatgaaagtacgttcatgctttgtcgtacgccctgaaatgatgccatatcatttcagggcgttttcgtgttcgcatgaaccttcttttgtatgccttggatagcgtatgggcgcaacatgcttggaggcgtacatggacgatgcgcagtacatgggactcgcgatcgagctggcgaagcgaggggccggatacgtgaaccccaatcccatggtcggcgcggtgatcgtcaaggacgatcggatcatcgggcaggggtatcacgaggagttcggcggattgcacgccgagaggaacgcgttgcggcattgcacgcagtcgcccgccggggcgacgttgtacgtcacgcttgagccgtgctgccattacggcaaaacgccgccatgcacggaggcgatcgtggaaagcggcatcgcaagggtcgtcgtcggaaccttggaccgcaatcccgtggtgtccggcaagggcgtgcgcatgctcgaggaccacggcatacgggtcgatgtgggggtgctggccgacgagtgccggcatctgatacgggtgttcagcaaatacatcaccacgcatacgccgtatgtcatcatgaaatacgccatgacgatggacgggaagatagcgacccataccaatcaatcacggtggatcagcggcgaggagtcgaggcgtcgggtccatcagctccgtcgatccgtcgcggcggtcatggtgggggtgaacacggtgatcgaggacgacccgttgctgacatgccgcatggcacacggaaggaacccggttcgcgtcgtctgcgatacgcgattgaggacgcccctcacctcgcggatcgtgcagacggcgaatgacgtcaggacctatatcgccaccgcctgcgatgacgaacgcaaggcggagggctaccggcggcacggctgcgaaatactcgccgtcggaaggaagggcgaccacgtcgatctggcggacgtggtgcggcgcctgggggatatgcagatggacagcgtgctgctggaaggcgggagcgcgatgaattggagcgccctcgaacagcggatcgtcgatgaggcgcacgtgtacatcgcgccgaagatattcggcggcaccgcgaaaagcccggtgagcggccaaggagtcgccctgccttccgacgccgtcatgctccggccccgcgcctgctcccgggtgggagaggattatctggtggaaagcgaggtggtgtattcatgttcacgggaatagtggaggaagtcggaacggtggcggacatacggaggagcgccgccaactgcacgctgtcggtcgatgccacgaacgtgatggaggacctccatatcggcgacagcatggcggtgaacggcatctgtctgacggtcgtcgatttcgaccggcgacgcttcaccgtcgacgtgatgaatgagacgtggcgcagaacctcgcttggcgtattgcgccacgggagcggcgtcaacctggaacgggccctgccggtgaacggaaggttcggtggccatatcgtcaccgggcacatcgacggcacgggcagcatatcctccgtgcggcgcgaaggcaatgccgtgtggtaccggatcgcggcgcgaaacgagatactcgaaggcatcgtcgagaaaggctcggtcgccgtcgacggcatcagcctgacggtcgcggaggtcacggaaagggacttctcggtatcgatcatcccgcacaccttggcgcagacggtgctgggcgagaaacgggtcggcgacgtggtcaatctcgaaaacgacgtattgggaaaatacgtgcggaacatgatgacgacccggacgggactgacgcaggatctgctgtcccggtgcgggttctgagaaaggatgtatgaatcatgaaccatcagtcggtgcaagcggcgttgcaggcgctgcgggaaggtaagctcgttctggtcatcgatgacgaggaccgggagaacgagggggatctcatctgtgccgcgcagtcggccaccacatggaacgtcaatttcatggcaacccacgccaagggattgatctgcatgcccatgagcgagcaactggcccacaagctgatgcttccgcccatggtcgagcacaacaccgataaccatgaaaccgcttttacggtgtccatcgattaccgtggcaccacgaccggcatctccgccgaagaacggggattgacggctcgcatgtgcgtctccgatgacgtggaacccctcgatttccgcagaccggggcatatgttccccctggtggcgaagaagggcggcgtcctggaacggaacgggcacacggaggcgaccgtcgacctcatgcggttggcgggattgcgtgaatgcggcctgtgctgcgagatcatggacgacgatggccggatgatgaggacccccgacctgacccggttcgcccaggagcatcagatcccgctcctgaccatcaaggaactgcaggaatacaggaaagcgcacgatacgctcgtcgaatgtgtctcgaccgtggcgatgcccacgcgatacggggaattcacggcgcactgctatgtgaacaggttgaacggcgagcatcatgtcgcgctggtcatggggaatctgggcgatgggaccgatgtgttgtgccgggtgcattcggaatgtctgaccggtgacgtcttcggctcgttgcgttgcgattgcggtcagcagttggacgcggcgatgcggacgatcgcggagcatggctcgggcgtgctgctgtacatgcgtcaggaagggcggggcatcggtctggtcaacaagctgaaggcctaccgtctgcaggacgagggcatggacacgctcgacgccaatctcgcgttgggattccccggtgacgcgagggagtactacatcggagcgcagattctcagggatctggggatacggtccatgctcctgctgaccaacaatcccgacaaagtgtatcaattggaagactatggaatggagatccgcgacagaataccaatcgaaatcgaagccaatgcttacgacagtttctatctcaaaaccaagaaaaaccgcatgggacatatcctgaacatggaggaggaataaatgcacacgttcgaaggcgatctggtagccgaaaacatcacgataggcatcgttgtggcgaggttcaacgagttcatcacctcaaaactgctggcaggggcgctggacaccctgaaaagggagaatgtccgcgaacaggacatagcggtggcctgggtgccgggcgcctttgagatacccctgatcgcgtcgaagatggccaagagcaagcgctacgatgcgatcatctgcctgggcgcggtcattcggggcagcaccagccactacgattacgtgtgcaacgaggtctcgaagggaatcgcgcagaccagcctcgacaccggtgtgccggtgctgttcggcgtgctgacgacggattccatcgaacaggcgatcgaacgggccggcaccaaagcggggaacaagggttccgagtgcgcgcagggcgcgatcgaaatggtgaatctgatccgctccatggacctctgacggcgaaccacccggctgcgggcgggggtcttccagacgttcccgcccgcttcgcgccacacggccaaggcccgatcgatcgccgcgcccgctaccgcagggtgagcgttgcggccaaagccagatggtcggtgtccggcacttcgaaggacgtcacgccggacggtctgagcccttgggtgaacagaatatggtccagttcgatgcgcggccacttgagccagcgcgggaaggtgagattcgggccggcggcttgaatcagacttgcgtccttgaatccggacttgagcaacgcacggaagctcgggtggtcggtgctcgagttgagatcgcccataacgacgacgatgttgcgattgctgacggattttgcacgggcgagttctcgcagacccagaatgccggccgaccaatccgtgcagccgcgcatcggcgatttcgggtgagccgaacaaagcgtcaccgtgcgattaccggaggttttgagggtgatggcgggaacgtcggcggcagggatggagaccacgttgggcaccgctgcgctcggctcgtagcgggaatagatcacgttgaatccgccgttatcggtctctttggcgtctccgaactgatggtaggggaggagttcgttgatgtcggcttcggtaagacgtgtgatgaggtcgtcggtgacttcctgcaaggccaatacgctgatattgcgttcgcgaatattgcgaatgatttcagcggcgtcggcgcgtccgtatcgacaattcatcgtcataaccgagaactggggcgagagtgtttcacgcgttgtttcacggtgcccatcggggactgtttcgggtccttccttcggagtgtttgaggtgctcgatgtattgctgttatggctttttgacagcgtcggcgaagttgtttcacgggctgtttcacggtgggattctctgcgtttgccggctgggtcgattgacgtaccccagtagttgatgcgctgtgagctggcaatcagcgcgaccacaataagcgacgacatcgcagtccattcatgttgccatgcggcgaccgcggccagaatcatcaaaggaacccacagcagcggagtcagggcaatcatgtacggaagcggcatacgggcctcgagaccggcgggcagcgcgcttaaggccgtccataacagtgcgatgattgccaccgcgctgaagattgtcgtcatggaagttcctttcgaaatataaattgaaccgagatataacttggctcccctctgcgaggggagccaagttgtgagatcagcggccgaacagtccgccaaggcctccgccgaggttcggcggcagttcagtgccaccgtcgacgttgcccatcatctgttcaaggccggcgggcagggccgggttctgcggcttcttggcgaaggcggaaccgccggtcgaaccggaggatttgccggccagcttgtcgcgcaatgccttctcctcggcctcgcgcttcatcggattgccggatttgccgcctttcttcttgttcttgcccttcttcttgccgccgcccatagccgggccgccgaagccggggatgccgccgcccatgccgccacgattggacatgcgcttcatcatctttgcggcctgctcgaaacgctgcagcaaagcgttcacctgagaaaccgtcacgccggaaccataggcgatacgggcgcggcgggaaccattgatgatcgacggatcgcggcgctcggccggggtcatcgaacggatgatcgcctcggtgcggtcgatttccttctcatcgaactgctcgagttccttgcggtgctgggccatgcccggaatcatgccgagcagcgacttcatcgagcccagcttgcgtacctgctgcagctgatcgaggaagtcgtccaggccgaaggagccttcggagattttctcggcggccttgcgggcctcttcctcatcgaactgcttctgcgcctgctcgatgagcgtcatgatgtcgcccatgtcgaggatgcgcgaggccatgcggtccgggtggaagacctcgaaatccttcaggccctcaccgttggaggcgaacaggatcggcttgccggtcacggacgccacggacagcgcggcaccaccgcgggcgtcgccatcgagcttggagagcaccacgccggtgaagtccacgccctcgtcaaaggccttggcggtcttgacggcgtcctggccgatcatcgcgtcgatgacgaacaggatttcgttggggtgcacggcatcgcgaatgtcgcgagcctgcttcatcagctcctcgtccacgcccagacgaccggcggtatcgatgatcaccgtgtcgtagagcttctgcctggcgagttcgatggaatcgcgggccaccttcaccgggtcgccggaggtctggcccggagctgcgacggcctcgccgccatcggattggacgcccttttcgggagcatagacgggcacgccggcgcgttcgccgaccacctgcagctgcgtcaccgcgttcggacgctgcaaatcggccgccaccagcagcggcgtgtggccggaatccttgagccagtagccgagcttgccggccagcgtggtcttaccggcaccctgaaggccggcgagcatgatgatcgtcggcgggttctttgcgaagttcagcggacgatcgaccccttggccgagcacgtcggtgagctcctcgttgacgatcttcaccacctgctgggcggggttgagcgcgtcggacacctcggtgcccagtgcacgctcacgcaccttgccggtgaaggaacgcaccacgtcgagcgccacgtcggcgtcgagcagcgcgcggcggatttcacggatcgtaccgtcgatatccgcctcggaaagcttgcccttgctcttgagatgcttgaacgcattcgagagtctgtctgtcaaagatgaaaaagctgccataatgggcaacagtctagccgccacgcgggaaattgcggtgttggggacgactctttccggggattgcgtcgcgtagtagtcagggatgttgggcattcagacggcaaatgccgtgccgtccgctcgtggcgaagccaatcgagtgcttccgataccatggaaaccgtaaagaatcctgtgttttttggaatgcttacgctgttttgaaaatcgctggacaccgcttatacgcagactgccgtgcgctccgaaccatgacgttcgggccaacgcagacatgccgtgcaataaggaaggcccactgatgcccacccaaaaactactcgaacgcaaagtcctaatcgttggtatcgtcatcaacgtgttgcaggtcttagccggcatggccgtgttcttcatgaccggcctcaaggccatgttcctcgacttctccttcaccgcgatttccgtcctgtccggaatggtggcggtgtacctctcgtcgcgcacggtgcgaaccaccgagcgcttccccaatggcatgttcgcactggaacccatctacgcgatctgcaaggccattttcaccatgtcgttgttggtgtattcgctgattgacgtgtgccgagtagcgtacgactacttcgtgttcgggtccggcgaacgcattgaaaccggcccggtggtcatctacgagatcctgaccgtaatagtgtgcttcagcctatacatgtattaccggcgttccaaccgctccatcggcgattccagcaccatgctcaccgccgagtgcaagagcacgttggtcgacggatcgatgtcgttcggcatcggcgtggttgccatcttcctgatgctgctaccggccggcggtccgcttgacttcctgcactacaccggcgatttcttcattaccgtggctttggtggcattgaccatcaaggaaccgttcagcgtgctcaaagaggcgttcgtggaattggtcggcggcgtgcatgatgacgatgagaccaacgcctacgtggaagccgaggcacagcgccatctgcctgccaacaccgactacgagcagacgctgatcttcaagaccggcatgaactacaccgttgacgtgtatctgagcggcatcggcgaaaccattgatgtagctgacctcatcgaatgcaagcgctcgctggagaaggagctcatcaagcgcctgcacatcgtggacgtggacttcgtgtttgactgattgatgggtttgaagcagctacttcaggctccaagtggaaccctgcgggccgtcttcgatggcgatgccggcctcggtcagggcgtcgcgaatctggtcggccttggcgaagtccttggccttgcgggcctcggcgcgggcgttgagctgctcggcaatcagtgcctccagcgccgcatgttcgggcgactcggccgtgccatcagcggcaccgccagcagacatccacggctcggccagcgggtcgagacccaaggtgtcgagcatggcacgcacggcgagcagcgcctcacgcacctcggccttggcggtttcggaatcggcgcggtcagccagctgtgaaagcaacgtattgccggaacggatggcggtgaagatcgcggcggttgcaccagacacattgacgtcgtcattcatggcggccacgaaatcggcgggcaaatcgtcggcggagacggcagcaacctcctcgcgagaaggctgaccgcccagtgccacaccggcgcgctcgatgaagttcgagacacggtcgtatgcagcctgcgcctcgaccaacgcctgatcggaccattcgagcatcgaccggtactgcacggagcccaaagcgtaacgtaccacccaagcggaatgctcggccagcacgctcggcacggacaggccggtgcccagcgacttcgacatcttctcgcccttggcggtcacccatgccgaatgcatccagcgcgcagcagaggggtaaccggccgcgcaggtctgcgccatctcgttttcgtggtgggggaagcgcagatccaaaccgccgccgtgaatgtcgaagccatcgcccaggtaacggtgggacatggcggagcattcgatgtgccagccagggcgacccacgccgaacggcgtcgaccaacgggcgtcctcgggatcggtgtccttgggggccttccacagggcgaaatcacgcgggtcgtgcttgtcgggggaggcgtcggccgggtcgaccggattgtacttgtcggcaccggtggcgtccacggacgggcccatgcggtcggccacggcggcggcctcatcgacttcggaggtctgcttctggtgggtgagttcgccgtaatgcggccaggatgccacatcgaagtacacgttgccggtgggcttgccgtccgcatccgtgaccacatagccgtggccgttgtcgagaatgcgctgaatcaggtcgatcatgtccgacatgtggccggtggcgcgaggttccacggtgggcggcagcacgccgagcgtgttgtacgcctcggtgaattcgcgctcgtagtaataggcgcgggcccaccaacgctggccggcggccgcggccttatcgagaatcttatcgtcgatatcggtcacattacgcacaaaagtgactttgtaaccgagcttcaaaaaccagcggcgcacgatgtcgaacgccacggcggcacggatatggccgatatgcggtgacgactgcacggtggcgccacacacataaatgccgacttcgcccggcttgagcggcacgaaatggctgacctggtgcgaggcggtgtcatacagattcaggccttctgcggccttggcgacatgcaccggcgtcaggcttgaaggcatgacggaaatgttgaaatcctgcggttcttggctgtttcccataacgctcaagcgtagggtccgaaccagacatgctgaatcgttactcgaagagcttggtgaacgcttcacaggcggggcccgaacgaggtgacagacggatgagaagcgggacaacagtctcgcgagaacacgtctttgaccgctgcggaaactgcgagattcatggatttgccttgcctgttacgcaaacggggaacgctcgtgccacaatagaagtcatggccacaccacaagtgctcattttgcaacatgtcccatgggaacgtccgggacgcatattgtcgaacctcgaagacatcggtcttgagacggtgacgatgaatatcgtcgacaaaaagaaaccggacttgcctgatttcggcgaactggctggcgtggtaatcatgggtgggcctatgggcgcgcttgattacgacaagtatccggggctgaaggcggaagccaagttggcgcgtgccgccgtggcttcaggcaagccgattctcggtgtatgcctggggcatcagattatcgccactgcgcttggtgcgcagctgcgtaagggcgatgcgccggagattgggttcgcgccgatcaagcgtgtggacaaacatgacttcttctccatgtgggataagcagctgacggtgctgcactggcataacgacgtggtgggcttgcccgagggaggccagttgctggcgcgttcgtcttccaccaaggtgcaggcattccgactgggatccgcactgggcatgcagttccatcttgaggtgtgcggctcgctgctggacgaatggctggatgagccgagcatggtcaaggatctcaaggccgcgggtgggtccaagtcccaattgcgcgagcagttcgcccaatacgatcagctactgcatccgctcgccgagcaagtgttctccggttttgcggcccgctgcaactcctacgctcagacgctgaacaaataacgtttgtgggccgccgctgggcaagcgtggcgctacattggtgagtcatgccgacttatgacattggactggaacacgtttcgctcgctttcgccaccaaaaccatcttcactgatgtgacgcagggtgttttcgagggcgaccgcatcggcatcgtcggcaagaacggcgacggcaaatccacgttgctgcacctgttccgcggcacccaggagccggattccggccgcgtgacgaagcgcggcggactcacgttcggcatgcttgaccagcgcgatccgctcgacgacaacgccaccatccgcgaagccgcgctcgaaggccgcgccgactacgaatgggcgtccgataacacctcccgtgaaatcgtcgaggcattgctcggcggcatgagtctggatgccaaggtcggctccttgtccggcggccagcgtcgccgcgccgatttggcccgacttctgctcaaggattgggatattctcgcgcttgacgagcccactaaccaccttgatgtggtcaccatccactggctcgccgaacatctgaagaaccgctggtccaaaggccagggcgctctgttgctcgtgacccacgatcgctggttcttggacgaggtctgcgaatcgatgtgggaagtccacgatggcgtgatcgagccgttcgagggcggctattccgcatatatgctgcagcgcgtcgaacgcgaccgccaggctgatgtgcgtgaaacgaagcgccgcaatctggcccgcaaggagctcgcatggctttcccgcggtgcccgtgcccgttccaccaagcagaagttccacgtcaaggccgcacgcgaattgattgccgatgtgccgccgatgcgtaacacacttgaactgaagcaaatggccacctcccgtctcggcaaacaggtggtcgatttggtcgacgtgacgcagattttcgaaaaaccgcagggcatggccgatatcgacccggatgtggcggcgctctccgcgtccgcttcccgcgtggatgtggtcaacgccatgtacgccgagccgcagctgcacggttccgttgaggtggcggtcaccgacatgactgacctgcgcctggtggacgccggcgtgccggaagccgtcgaggccgctgaggaagcgcgtaagaaagccgaggctgagagcggcaatccgcagcttgctgacgatcgcgaggttcgtcgcatgaacacgggtggtgaaaccatcggcggtgacactgctgcaacgaattcggatgatgacactgctgcagccggtgtcacctcggctgcacgcaaggtgatggtttccggccgcgagattcttgacgatgtgacttggctgattggccccggcgatcgtttcggcatcgtcggtgcgaacggtgccggcaagtccacattgctgaagttgattgacggttcgattactccgaccgtgggccatgtgaacatcggcaaaaccgtgaagttcgccgtactctcgcagcgcctcgatgagctggagaaactgggccagtacaagatcaaggaagtgctttcccgctataagccgagctacattgtggatggcaaggaagtaacgccgggacagttgatggagcgtctcggctttgaatccgcccagttgatgacgccgattcgcgacctctccggcggacagaagcgccgcatgcagttgctgctcatcctgctcgacgagccgaacgtgctcatcatggacgagcctggcaacgatctggacactgatatgctcgccgtcatggaggatttgctcgatacttggccgggtacgttgatcgtcgtatcccacgaccggtacctgctggagcgtgtcaccgatcagcagttcgcgctgattggcggcaaggtacgccatctgcccggtggtgtgcaggattacctcgatatggttgaggctattaagaacggcaagggattgccggctgacacgcctggcttcgcgggcaccggtagcagctcggcgaagtctggtaggggtaaggcggccgccgtcaatgttgctgcatctctccctcagtccacttcgcggacagctccctcgtcagagggagccaataacggtgaggactccacctcgaagctcaccggcaaggccttccacgaggcatccaagcgcgtgaatgccatcgagcgcaagcttgccaaactggaagagcggaagaccgaacttgaggcacagatggccgcccatgacccgagcgactacgagggtctcaacaagctcaatgaacaactcaccgccgtcaatactgaaagcgataatctcgaagccgaatggctcgaactctccgaacaattggagtagcgggagaaaccgtaacgttcacaaggcctcggtagtttgccggggcctaccgctatgcaaactcccacggattaatcaattccacgtcggtaccttcgaagtccttgatattgcgcgtggctatggccgcatcccaggaacaggcaattgccgcaatcatggcgtcttgaatactggtaggtgtgcccctgcgttcgcgttcgacaaggatatgggcataatccgcagctgcctgggtgtcaaatgcgaacgtcctgtcctctaatgtcataagcgccagcttgacggtcgtatctgtgtactttcgtcgtttgccttcaggcatgcgacatattccgaccaacaactcggcgacggtgatggcggtggttgccagattgcttgtatcttggttcctcagccaattggcaacgtgttcgtctggctgtttcttgatgatttcgctgatgacgttggtgtccagaataatcatggccgattcctattcaaaagatactggcggtcgggaatcggtggaatttcgctcggatagtgggagttcccccttgtcgagtccctcaaaatccatgttcttcatgaattcgcggatctcgtcgtagaaattggtctttcgtgtgatttcatgcgccaccgtgccggccagccattcttcaagaatggatcgcacctgagattccatggagcggttgtttttctcggccacttctttgagctgttgaatctgctcatcgggtatttttcggatggtcaatgttgccatgatgcacctccttgttgctgtcataatgctagcataaggtgctgtcattttgcttgcagcacgggtgatgaggtatgcacgcatgaaaaaggcggatatgcatcatgcacatccgccctttgagcttggactgggtctccccgcagtcgccgaatcagcgcccggtaacctcggaaccgacgaccttttcgctcagggcgcgcgggccgcgggtcacggctacggcaccggagcgcaccagctcaatcacaccgtaatgctccaaaagccccagcagcgcatcgatcttaccttcggcaccggtggcctcaatggtcagcgattccggattcacgtccaccacacgcacgcggaagaggcgcacgatctccagcacgtcggaacggttggattcgtcggcggccaccttgatgagcaccagttcgcgttccacggtggagttcgggtcgagctccacgatcttcagcacgtgcagcagcttgttgagctgcttgatgatctgctccagtggcacggcctccacgtcggcggtcaccgtgacgcgtgagatgtccggacgctcggtgggggagacggacagtgagttgatgttgaacgcacgacgggcgaacaggccggcgatacgcgccagcacgcctgggcggttctccaccagcacggacagcgtatgacgctgggaaccaggctgggatgcaggatagttagccatgagtgttctcctctcctcagtgctcgctcgcagcggcagcggcggtctcgtgctcgaacacgccggtcgcatgctcgttcggaccggttcccggagccggggtgccgccggtcagcggcttgatgccgggcttgtacgtcacctcgtcgttggaagcgccggcggctaccatcggccacaccatcgcatccttccacacgcggaaatcaatcagtaccgggcggtcgttgatctggttcgccttttcgatggcggcaatcgcctcttcctcggtgaacgcgcggatacccacgcagccgtatgcctcggccaacttgatgaaatcaggcacttcgagcggcgcatcgccgtcgaccagtgccgccgcaccatcggcaccgtgcgcctcgccatcgagcaggttggtctgcgagtagtggtgctcgtagaacagcgtctgccactgacggaccatgccgtacacggagttgttcagaatcgcgatcttcaccggagcgtggtccaggaacgcggcggccagctcctcagaggtcatctggaaggaaccgtcaccatcgatcagccacaccggcttcttgccctcgaactcgcgggccgagcccacggatgcgccgatggcggctggcagaccgtagcccatcgtgccgaggcctccggaggagatccaagcgtgctggttctcgaaatcgatgaactgcgaagcccacatctggtgctgtcccacaccggtcacccagatggtggacggatcggccatctcagagagctttttgatgacccactgcggggccattgatccgtcggtcggctcatcccacgtcatcgggtattcctcgcgccagccgtcgattgccttccaccagggggccagattcggcttgccctgaatggcctgcgtgcgctggatttcgggaatcaagtcgtcgagcacggtagccgcatcgcccacgatcggcacgtcgggctgacggttcttgccgatttcagccgggtcgatgtcaatatgaatcacgcgggcggtcggtgcgaaggcgtcgagcttgccggtcacgcggtcgtcgaaacgtgcaccgatggccacaagcaggtcagcgcgctgcacggcaccggttgcggcaatcgtaccgtgcatgcccagcatgccgaggttcttcgggtcggagtcgggaatgatgccgcgtgcgggcagggtcgtgaccacgggggcgccggtcaggtcggccagagccttgacctgtgcgccggcgttggagcgggcggcgccgccacccacatacagcaccgggcggtacgactgagagaacagcttcgccgcgtcggacagcacacggccgtgcgccttggtggtggggttgtagccgggcagaatcatgcgctgcggccatgaatagtacatgtcgccggtctgtgcggtcttggtcagatccacgaccaccgggccggggcggccggtgttggcgatgtagtacgcctcggaaagcacgcgaggaatgtcctgcgcgcgggtcacgaggaaggagtgcttggacaccgggtaggtgatgcccacgatatccgcctcctggaaggcgtcagtgccgatggcctgcacgcccacctgaccggtaatcacgaccatgggcacggagtccatattcgcgtccgcaatggccgtgaccacgttcgtggcacccgggccggaagtcacgatgcacacgcccaccttgccagtggccagtgcgtagccttcggcggcgtggccggcggcctgctcgtggcgcataagcacgaagcggaacttcgtgttgtctttgatctcgtggtagacgggcagaatcgcgccgccaggaatgccgaagacgtcctcgacgccgagatcctccagcgaacgcaccagcgcttgggcgccagtcatcttctcgccatcgacgatggtctgcttatcgggggccgcgttgattttcggcacgccgctgaatgcctgcaaaggcgtgggtaaagccatgattcctctcacctcatagattttgccgcgaacctgcccgaccttgggatggggccgggtgcccgcgtgtctgattccagtcgcttctccgagacttgtggccccggcacgactcgtcgctcatgttggtattagtctattcgcaaatctgacagcgggcttacttagtccgcgtcttgagcgagtccagtgacttccagcccgcttcggcggccgccagctgcgccttacgcttgctggagcccttaccgatgccgatgatgtcgccgttctcgcccaatgagacgcgcgcggtgaagatctgcgcgtactccgggccggagacctccatatggtagaccggctcatccttgccgaggccgtgcgccttgacggtcagcgaggtcttccagtcaagtgccgggccctcggtggccacttcggcgagcgtgtcgtcaataagccggtgaatcaccttgcgtgcctcgtcgatgccgtgttccaggaaggtcgcgccgatgagcgattccacgatgtcgcacagaatggagttcttctccgcgccgccctgctcggtttccccgtgacccagcagaatgtaggggcccaccttgagcttggttttggcgatggcgctcagcgcgtcttcggagacggccttggcacgcatcttggccagttgcccctcggtcatatccgggtgaatggtgaacagcgtttcagtggagaccagttcgagcactgcgtctcccaggaattcgaggcgttcgtaattggccacgccggggtgctcatgcgagaaggagcggtgggtgagtgcctgcacgagcagatccgggctgagagtggtgcccaacgcttcaagaagctcgttggccggcgtcggctgctgtggggtttcattactcatgattgttgtatggtccttcacgcgatggtgatgtgttgtgtgttgtgttgtgttgtttgcgatgcgatggtgtacgtaatggtgcacttatgcgaagaccccgccacccgtcgatggcagggccttcattcaagccgttatcgcaggactcacttggtgtgagccggctggatggcggagcggtaggtgcggccgcggtagttaccgcagctcgggcaagccatgtgcggcagggccggagcgccacagttcgggcagttcacggtcgcagcagcggtggccttccagttcgcgcgacgcgagtgcgtgttggcgcgcgaggtcttgtacttaggcagtgccatttgagtatcctctatttcgttcgaacaattgagcttaagcgtccgttatcttaacgcacggctcgtacaaactccgttcaggcgcgcgtcactcggcctgctcgccgttctgctcggcctcgagctgggctttgagccccgccaatccggcaaaacggatatccgtcacatcgtgatgatggtcgggatcctcgttcagatcggcaccgcactgcgagcacaggcccttgcaatccggtcggcacagtggctgcaacggcagcgattcgaccagcgtgtcgcggatcatcgcctcgatgtccgcgaatgcgccgttctccagcagcggatacgtgtcttccgactcgtcctcgccggcgatgatgtcgatctcgtcgtccttcttgttcttgccgcccttgccgttggccttgtcctgacccgactcatacgggaagaacaccgtcacatcaaccggccagtcctcgtcaatcggcttcaggcagcgcgtgcactcgctgacgaatggcgcgaccagacggccggtgaagatcaggccgtccacaatcgaatcgaactgcccgctcacatgtacgggctcaccatccttgatgccgacgatgctgtcgccaatgccggaaggggccgggaaatcggcgtcaatcggcttggattgaccggcgcgcgaagcaatctgcgctaccggaatggcccacggggaatcttcaactcgtgccatggtatgttcttggtgcctttcgtatgttggctggagttattcgttactggcgttattcgcgttactgatgttgctggtgctgctggcgttactgggcttcgggatagtcgttcagcgtcaggtgcggcatctgttcgccggccgcacgctggcgctcttccagcacgttaagaccggcctgcacatcccgactgagtttgccgagctgctgggacagcccttccatcaccgtagtgcagtactggtccgcgccttgggtcagatggtcggctctggtctgtgcctggtcaagaatcgcgcgcgctttctgccgtgcaagctcggtgacgttctcttggccggccaggaactgtgcctgttcgttggcgtccttgatcatgtcggctgcgcggctttgtgcggaggcgacgatggcgttggactgggtctgtgccgattccagacggcgctcggcctcgcgcatgagggcggaggcgcgctccaactgcaccggcagcattttcttcaactcggaaagctggtcggtgaattcgtcgcggtcaaccttcaccatgccgggggcgaatatgctggacttcgcttcgcccagtgccgcctcgagctggtcgatgatgtcatacaccgtggtgaattcctcgcggctcttgaccgtggccgggtcgtcgtccgtggtttctcgcaggtcgggcatttcgttcatgaacgaggggcgagtgccggcggcctgagcggtctgagcttgtgcccgggtctgctgagctgcttgggcctgcgctttggcctgcatctgtgccggagtaggggtaggcgcggcgggcggcgatccggcgagaacatcggcctcttcggtgggtgccggcgcggcttgcgtagacgcgggcggttccggggcggacggctccggagtggacgatgcggcgtccgcattcggtttggtcagatcgacgtatccagtggggtggtcatcgctcatagtcattagtgcatcagtccttccgctgacgttcctcggccagggcatcggccagcatcggcacgacacaatcgggcaccatgccggtcacgtcgcctccatggcgggccacgtccttgacgatggaactggagatgtgttcaagaatcggatcggccggcaaaaacagggtttcgatgccggcgagcttgcgattgaccagcgccatgccgagctcggcttcatagtcgccgttctggcgcagacccttgacgataacggtggcgccgaccttcttgcagtagtcggtgatcaggccgtcggtggaagaaacagtgacgttcttgcaaccggctttgtcaagggcacggcggatcacgtcgactctggtggcttcggaaaacatcggtgttttcgcggcgttgacggccaccaccacatgcacctcgtcgaaaaaccgtgccgagcgctcgattacatccaagtgtccggcggtgacggggtcatacgagccggggcatactgcgatagtcatgccttatagcctaccgcgaatggtgtgcaatggtgcgcttcgtgcggccacatgttacatgcggagggtttcgcggtttgcgatgggaatctatgatgggatgcagttgaatcgtacagtacgaggaaagaagtgcactatgacttttgctgatctgttctccaatgacgccgaaccgctgcgcaaccccgaccagggtgccggaacctccgtgctggaacgtccggagaccaaggagtcgccggtgcgcgacgatggcggcgacgccgaccgctttgcacactatgtgtccaaggaccgtatcgcggaatcccgcgcgaccggccgtccggtggttgcgctgtgcggcaaggtctgggtgcccaagcacgatccgtccaaataccctgtctgccctgactgcaagcgcatctacgaggaaatgacgcgctgagctgctgcgggttattgcttggctcccctctctgaggggagctgtcgtcgtagacgactgaggggagtagcgggcgcgggtccactagatttcccgaatatgtgacactgaggttgcgctagtgttacatattcacaagcgggaaaatgatggtttgtgtttcagctgccgtatatggatatgtccattatgtggattttcgctgtcggaatcacgatgtgaccaaaggattcgctattttctgcggtttttgatcaccgatgatcagccgttataagtactctcttcatactttcgtaacacgttggccacgggggtagcaatagcgccatatttgttgtcttctcgaaaaggagtggcatatggcgtcttcacaaacgcaagttgccggcaatgaggattccgcaagcaagatatcccagacacagaatgagcccattcaggacagcgactacaccctgtctcgtgttccggccgaggccaagcagccgttctggaggattctggtaatccgtatcggcagcatatgctgcgtctttcagctggtgctcggtgcatccctcggctacggcatgagtttctggggcgcgttctgagcgacaatgctcggatcagtgctattgcaggtgattagctgggcgctgggtactgcggcggcgcgtgaaggcctgtccaccagtctgctgtcccgttggaccggattcggcaaaatgggttccgccatcttcggcggcgtgatggccatttccatggttggatggttcggcgtgcagaactcggtgttcggcgaaagcatggcgaacattctttcgttcactgacttcctcggcaagttcgagaccctgatgtgaagtgtcgggaccggatcattgtttttcccatcaaaagaggaggacgatgatccggccctcgtctcgtataaaaaccgtagatatatcagtagttcaaggagtgtgccataaccatgacacagacaacggccgtcgcgccggcacaggagccggctttcgaatcagacagccttcatattccggatagcggcaggcgcggatggttgtccatcgcctgcgtctggatcggtaattccatcaacgtgtccaccctgatgaccggtgcggtactcggcgcaggactgaccttgtgggatgcattctgggccgcattcatcggttttggcatcattctcgcctacatgtgtttcgtggccatggaagcaaccgacaccggccttcccacctccgccatgtccactgcagccttggggcgcaagggcggacgctacatcatctcaatcatcctgggtgtctcactgatcggatggttcggtgtgcaggcggcagtctgcggatcctcattctccctgatggtcggcaagctcgggctagacgtttcgctgcaaatctgctctatcgtgctgggcgcgctgatgctcgtcaccgccatcctcggtttcgacggcgtcaagtgggtcaactacatcgcggctcctttgctgttcatcatttgcgcctatggcctgtttgcctccctgtccaatacgggcatgggcacgttgacctcctacgtgcccaaggaaagcatggggctggtagccggtatcaatattgccgtgggcttcttcgccgtcggcggcgccactgtgggcgacttcacccgttacacgcgtgatcgaaaaggtgcagtgctgtccagcatcatcggcatctggccacccatggtcatcctgcttatgatgggtgcgatgctctccgtcgtcaagcccgaatcgggcggcgatatttcccagatcatggcatccatgggtcttgccggagccgctttgatcgctcttgtgctatccacgtggtccgtcaacgtgggcaacgcctactctgcaggactcgctttcgccgtcatcgcagacaagggagataagggctatcgcgtttccaccaccatcgctggcattcttggcattatccttgccgtggctggcatcatggactacttccagatgttcctgaccgtactttccgcgatgattccagcgctcgcgggctcgatgatcgcagattactggtttgttcgcaaggcccgtccgcaaaacttcaagccacttgacgggttctccgtgcctggtctggtttcgttcatcgtgggatcgatcgtggctctgattaccggtggcacatttgcttcggtgccggcacttgcattccttgaccacccattcttccttggtccggtcaatggcatagtcgtgtccatcgtgctgtatgtggccgtgtgcaagctgatgaagctgccgagcttcgacggccccattctgttgacgcggaaggggcatggttaccgagtcagaaaacgttttcacattgatggcagcggatgctaaaaaagtggtcatttggaacctgcgtgtcaaggatggcagcagaaattaggcaaaggaaatcacatagtttaataatttttttgtcaacatatgttgagcaagtgctgaaaccgtgtgtgatgatggctaagaaacggtggaattacagcgaaatacgtacttctgtggcatgtgctcagtgtgtgatgaaacgcggcgttcaatcaggcgaaacggcgatgaaaatttcacgagcgccgatttgctcaatgcaaacgaaagccataatctcgtatttaggtttgtggataactgaagtcgacgttccccaatgacgcggaaagttcaccgccgaaggggtgagaacggggatgatgacattcagtacatagagctatttgaggagcatgaaacgatgaggcatcaggtggaacggctgaagcacgtagcgctgaaacgagggataaaaccggcccgtgcactcaccgcaaccctcgtcgccgtcggcatgatggccacggccgccatctccttcgtcctgcccccccccaccagtgccaatgcggattcaggcaagcccgatggcagcctttgcacgcctcagaccattgatttgggggacgatacaagtaaatccacggtcgattccggtgtggccacttatgttggcggcaatatgtacgtgggcgccaacacaggaaactattccgaactgaataaaaatcaggggcctgataaatcatatgccgtggaagccgaaggcctgacgcttgtcaacggcaagctcgccatcaactccgcgaagcaaagctggagtagcaggggcttccgttttggcgtggtcggcttcggtggtcagtaccgtccgaaaagcggtagcgatgtgttggtcgtcggcggcaatagcacgctgacgatgaaagataacaactataacggtgttcaagacgtatccgctctcggtggttgggtgaatggcagcaccgcgcgtggtttcgtgaatgttgatacggagagccagtactacaaagccaagattaagggcaatagcagtatcgccatcaataaccttaacggccaaaactattctcgatccgtttatgacgcaggcaagagcgcagaggacacgggcaacgtcacttataatgacagtgtttcactgggcagcgtcagtgttaatggtgaaaccaaggattattcgaagttcctcacggaaaacgtccagggtgtgtccagcaaactcctgaaggtcaaggcgactggaacggttactgcaggcactgcgtctgctggcacctattcgcgttaccactaccgctacggcgttcccggctatggagagaatacgaagtatgatttcaacttcgttgagggcgctcctgacgcaaaccagcagaaggaaaagctgattaccttcactggtacgcagaacccatcccttgaggtgttcgatgttaatgcctcaatgttggattctgaaggctacagtggtatctctttcgcctttacgaacatctctgatacggcatcagtggttatcaatgtcgagggtcaaaatccgatcacgttcaataatggttggcgcttctggtggaacggtcaggaaatctccaacggttatgtgacgactgacgtgaatggtgcagtcaccaaagagatgcgagacgcatacagcaaggccgcgcagaagatcatgtggaacttcgccgaaactcccaagctcactatcaagggcgggcaagcacttaacggggattatcataagcggggttacccgacggattccaccaagatcctgacctcccgggatgaccccgccgcagccatgctcggcagcattatggtgctgaacggcagcttcgaaagccacgtaaccaccaatggtcgtgtgtatgtcggcggcgacttctccatgtacaacccgaacaacatcggcgtggatatgggcgaaggcgcgacctcctccgtgatcgatatggatcaagaacgccacaaccttccctggaacggtcagctgacatcctcctgttccacgattcagtggtccaaggtcgacgctgatggcaaggtgttgggtggcaccacctggtcggtgtacggtaaggaagacaatgctgttactgcggctaccccgcttaccaccatcaccgataacggttggaacgatggcgatgaggatgatggcaagttctcgcttgctggtcttgctcccaatgccacgtattacatcaaggaaacgtcgaccggcagctatgattatgagctgaacgaaaacatctatcaaatcaatactggtaacgaagacacttcatccgcaaccgtcaccgccgtctatagcaagcaaggtaacgaagtgactgatgcttcggtgaagcttctgatgaatggcaagatcgtcaacaagaagaggggcgcttccctcgaatggtccaaggtcgattccgacgatacggatacaaggcttgccgggtccatgtggaacctgaccaagtacaccgatgaggagcgtgcggatgttgaatctggttggccgaagagcattcatgacaccacggtcgcggtgacaggcgtcagcattgtcggttcggatggcgcggcatacaccgatggccaggatctgggtaataaggcggtcaacaacgtattcacgctgtccgccaccgtcactccgagcggggctccgtccggcgtggtgtggacctcgtcgaacgattactatgccactgttgacgccggtagtggcatcgtgacaccgaagtccaacagcggcaatgattacgtcactattacggcatgctcgacatcaaatgccggtgtctgctcgtccgtgaagttcaaggtgaccggtgccaccgcagccaaggtgacggtttcccccagcgctgcgacggtggttgaaggtaagaccacgcagcttacggcgaccgtcaactcccagcagaatgtgacttggtcgtccaataatgaactggtcgccaaggttggccagaacggtttggtgaccggtgtttccgctggtactgccaccattacggcaagcaccgcggatggcgcatctgcttccgctgaaattaccgtgacatcggcgcagaagtatctcatcctgtactttgattcgaataatcagggaaagtggtacgccaacgacgtgcaggtgcactaccgcttgaacagtggcacttggaccgatcagaagatgactcagatgagcggttcctgcggccagtatgcgtatgcgcggattcctatggacaagatcagcgtggacagccagttcggcttccagcatctggacggtagtgattggtacggcccgggcaatgcgaatgttccgaagagcgacggcaacttcaagttcaccagtggaaccacactccctgagaacgtgaccatttccgcaggccctagctacagcaccaccgctccgaacggttgcgccgtgtccgccagcacgcggtcggccaagtccactaaggcggttcgcaaggctgcgaagactgccacgcaggcgagtggaaccagtcgtgcggccaacgccgctcaggatgagttgaaggatgaagacaccgatccgggtgcgttccgcatcagcaatcttgcggacggctactacgttctgaaagaaaccggcgagccgaacggcttcgatgtcggcggcgagtacaagatcaccatcaagaacggtcaggctacgtgggatcccgccaaggccggcaacaagctgccgaacacccgcaagaccggcatggtcacgtggaacaaggtcgataagactgatggcaccaagctgttggacggttccgaatggaagctgacccggacgaagagcttctcctgggtgagcggcaaggcctcgtacacggacgcgaacaatgaactcgcaaccatcaaggattgcgtggactcttccgcaacgcagtgcgccgcttccgccaatgcctatgcggacatcgatggtgaggccggccggttcaagcttcagggactggcatggggtgagtaccagcttgtcgaaaccaaggctcctgacggatacgatctggacagcacgccgcacacgttccgcattggtcccgccgaaggctccgatgtgaccggtgaatggtacacgtccagcggtttcaacgcgaacgccaccggcgtatacgacgcgaatacggcattcactgttgacggtggatctattaccaacacccctggcgttgtcctgcctggcacgggcggcgaagggctgaacaagatgtacactgcgggattcctcgcagtggcgattgccgcggccggtctggccttgagcctcaggaggcggcaatgatggaaacgtctaggagaagggggaccggcccataacgtagcgaactcgctgccctctaggcaataactgaatatgaacaacccaagttttaacaaaacaagaaagaaagggagaacaatgaacaaggttctcaaaggcctcgtagctgtggcagccaccgtagcgatggccgtcgccggtttcgccggcgcctccaccgccatggcggcagatccaactggtggtatcaaagtcgctgacggagatacccacacctattccgtctaccagattttcacaggtacgtacggtacggatggttctcttggcaacgttacagctggccagaacttcaaggccaagaacgcagccggtactgatggtgctgacctgacagccgctaaagctgccgagactgtggctggacttgatagcaatgcttccgattcgacgaagcttgaaactatcaaaaagttcattgatatgactaaaattgcgtacggtacagtatcggccggcaagccgctgagcaacgttccggctggctattacctcgccaaggaccagaaaaatgtaaccggtaatgatgcagctactctgtacatcgttcaggttgtcggtaaccaggcagtgaccatcacccgtaaggccgataagccgaccttccagaagaaggtcaaggacaagaatgatactgatggaacgacgactgattggcaggattccgccgattacgatgtgaacgaccatgttccgttccaattgactgcaactctgccgacggataccaaagatttcgcggcgtacaagacctataagctggtctttactgataaccagtctaaaggtctaacttatgatgatgagaatgcgggatcctctgtctcttccttcaccgttaagtacgtttcgaaggatgggacaaagaccgcgactcttgatagcagcgcatataccaaggtagtgactcaggccacggaaaaggcagacggttcttttaccattactattaatgatgtcaagagccttgctctcaaggattccaacaaagctgatgttactgtcgctgcaggcggcaagtttattgttgaatacacttccacgctgaacgataaggctgtgattggttccaccggcaacccgaacgaggcgaagctccagtactccaacaacccgaactacactggtacaggcgcgaattctccgaccggcgagactccgaaggataaagtcattgtcttcacctaccagctcaatgtcaacaagaccttcgatcaggggactccggctgataacgatctgccgaagttcaagctgtacaagaagacccatggtgtttccgaaaataacggttatgtacaggtcggttcggaaattgaagtggctaagacctctgataataagtacattgcctccttcccgcgtattgatgatggcgactacaagctcgtggaatcttatactccggccggctataacacggctgccgacacgctgttcactgtgaccgctgagcatgatgtttcgtctgacgatccgaagctgacttctttgaagattaatcagactgacggtgataagacgaatggtaccgttcaggccgacgtcgtgaacaagaagggctccttcctcccgtccaccggcggcatgggcaccacgattctgtatgctgctggcgctgccatcgtcctggtggctgccttcggcatcgccttcgctgtccgtcgtcgcaacgctcgctgagcgtagccacggccagccaagaaaatagacgtgggtcaagcgcgatgcttcaatagtggtcgttcaatgggtgaagatttgggcctgctattgcggcatccgcttgattccaccccacggcaaagccaaaataacttaacatgcacatgacccggatccggctacgcaccggatccggccgtcagtgcccaaccgcaccaaactacacacaacacacgttgtacccgcctatcaaggcatcacagcgcacgttgtgcccaaccacgtcgcccaacacaacatatgttgagccgtgtgccctgaacttgtccttatgttacgaatggccagcaaacgcgccgaacacggttgccagctgtccgcatcctaaggaccctgaccaggaaaactagggaacttccgacgaggggaaagaaatgacaagccacaacgagagggcagagatgaacaacagaacggcaaaacaccgcatcatcatggcgttgtgctgcatgttcgcactcatgctcgcaaccatcggcttgagcgcacccgccgccaccgccgccacggcatccggcaccactgcggaaggcagcctcaccgtcacctaccaataccagaaagccgcgctcaacaacgccgacatcagcctgtaccgtctggccgactggtccgccaaaggcggctacactcccgcaggcgacttcgccgatcacggcaaatacccggtcgactgggatattctcaacgccgaccagcagaccctgcgcgatttcgccaacaccatggccggatacatcgcagtgaacaagcccaccgcggaaagcaccctcaaaaccgatagcgccggcgttgccacctttaaccaactgaaggacggcctctacctcgcggtcgtcgccccctaccagggcaacgtgctcacctgccagaccgccgccatgctcgtcgccctgccgaacgtgcacaagaatgtcgacgaccagcgcgccctcagcatcgaaccgaaagccgactgcgcagtgccgcccaccaccaccatcagcgtgaacaaggtgtggaaagacaaggatcagtccaagcgccccgaaagcgtgacaatgaacctgctgcaagacggcaagatctacgattccatcatgctcaacaacgccaacgactggaaatacacgtggaaggacttgcaaaccaagcacgaatacaccgtggtcgaagcgaacgtgccgggcaactacaccgcgctcgtcgaccgtgaaaacaacgattacacggtaaccaacaccgccaagaccgaatcggcgaaaaccggtgcgagcgttgccatcatcgccgtgatcgtagtcgtactggccgccgccggcatcgcaatcgccgtaatcgtgcgcaagaagaacacttcggaagacgacgtggagcagaactccacggaacagcccttggaacaggtttcggagcaggcctccacggaacagccttcctcggacgatagcgagtgatgttcgaaacacacggaaaacgtgccggcaaccgtcagcacgaacgtcaaacagcggatagcgacgccgaaaacgtcgcatccgctgaagtcccagacaccgaaaacacagccaccgaaaacatggctgcggatacgcccaccgacgcggtgaccgatacggcagaccaggccaacgaagcagatcagactgacacggcagacccgtccagccaatccgggcaatctgattccgcatcccagtcatcggaaacgatgacccgcgtcgacctgcgcaaaaaacgcaaaaaagacaatctcggcctgaacctcatcatcgggttcctagtcgtggtgctgatcggcggcctcggcctcattgcctacccgtccgtggccgactggtggaaccgaatgcaccagtcatacgctgtcgccgggtacgtggccaaaaccaaagacatgtccaaagccgagaagaagaaactcctcgacgccgcgcacgcctacaacctcaaactcgccgccaccagcgaccgctggcatatgaacgccacacagaaagagcagtacaagaacacgctcgacatcaccggcaccggcatcatgggctacgtgaccattccccgcatcaaagtgaaactgccgatctaccacggcaccgatgaaggcgtgctgcaggtcgccaccgggcatttggcaggcacctcactgccggtcggcgggccgaccacgcacgcggtgatctccggccataccggcctgccgtccgcgcgactattcaccggcttggacgagctgaaaaagggcgacaccttcgcgttccacgtgctcgacgacacctacacgtaccaggtcgatcagatcaaagtagtgctgccggatgacctgagcgcattgaacatcagcacctcaatggacttcgccacgctcataacctgcacgccctacggtgtgaactcgcatcgactgctggtacgcgggcatcgcatcccgaacccgaccacgccggacaacacgcaatacgatgatccgaccaccatggtgttcaccacgatcatcgtcgcgctgctggttgtcgccatactggtggcgctcgtaaccgtgctcgtgcgcgtgcgtaccgcccgcgaatcgaccggcgcgcacaactccggacgcgcctaccgcaagcgaaagcccaaacatcgcagcaaacgctagcgtatgacaatgtgcgttgcgctagtactgcaaaactatgacaagcgttaatccagacagtgcttttcggaatgccctgttagacccacattgacatgtggcagttggattgttggcaccgtcaagcctgtcaataattcttgaatacaccgactcaggggtcacgaaccacaaaggagccaggacgtttctaacgtgccgaaatctcgtcgatcagcttgagctcctcgtcgctgaagtgggtgttcttcagcgcgccgatgttgtcgagaatctgctgaggcttggaggctccggtcagcacggaggtcaccttaccatcgtgcagcagccatgccaggctcatctcggccagcgtctggccgcgttcggcggccagattgttcaggtccacgacctgcttgtgcagtttctcggtcagggcggaatcgttgaggaatcgcggatcgtgagccatgcggctgtcggccggaatgccgttgagatagcggttggtcagcaggccctgtgccagcgggcagaaggtgatgaggcccttgcccagcttgaaggcggtctccttcagaccgttctcctcgacggtgcggtcgaggatgttgtatttgttctggttgatgatgaacggcacgtgcaggtcggcgagaatcgcggcggccttctccatcgtcggaccatcgtagttggacagacccacgtacagggccttgccggagttcacggcctgagccagcgcgcccatcgtctcctcaagcggggtttccgggtccgggtggtgatggtagaagatgtccacataatccaggcccaggcgttcgagcgactggtcgaggctggcgagcaggtacttgcggctgccgaggtcgccataggggccggcccacatttcgtagccggccttggtggagatgacgagttcgtcgcggtggtgcctgaagtacttggcgagcagcaggccgcagttcttctcggcctggccgggttcggggccatagttgttggccagatcgaagtgggtgatgccgttgtcgaaggcggtgaagaccagggacttcatctggtcgaatggcgtgatgtcgccgaagttgtgccagaagccgagtgagacggccggcagcttgaggccggaggtgccggcgtggttgtaagtcatcgtgtcgtaacggtgcgggttgggggcatagatggcggttggctcgaacattaaatctccttacaatgtcatttttgttcttacgaatgcttacctgcgatgggcaaaccgacgccgattgagtggcattcgtaagtgttcttggatactatggttccagttcaagtgaacttgaatgcaaacggctgcgacgcttcggcgtgtcgccgcagtaaggagtcatggtgtcctacaccattcgtcaggtggccacgcagttccatatgcagccctctacgccggtgaagactggccggattggcgcgagtacaaaaaccgcgcctattccattgaatgctgaggccatcgagtgctgagctggatgccggctgggcactaagaccgatgtgcgtcgatcgtgggcgcgtctatccgagtaaggccttgctcggcagtgcgcggtcgagcagccagacaacgagcgatatcacgaagaacgctatggccagcttgccgcagctaatgccgaacccttgccagccgagtgcgtcgaggtcgatgaagtcgtacggatacggactgccgccggccgccggtccggaccccggccaaatcgtcgcacgggccagcacgaagaccaagtatgcagggaagtacgccagccacgagaacatgtaatgccagcggaaacgccggtgcgggtcgaatagcacgaaatcgataaccgccataatcggggcgattttgtgcagcatcgtattggtcatgatgccaataacctgtggcacgtatgccgggtcgtccggaggcatcaggaagaacgccaccagtgcggtgactatggcgtacacagtcaggcatcccttaggccatgcaggcggctgaatgcctttgagcagtgtggccgcgccggcccacagcatcacgatgcccagcacgaaaccggtctggaacgtgaaatacacccagaactgcggtttggaccatgcctcatatgtgcccacgaagcagaaaccggcgatcgcaaagcgccacaacgccacgatgaatctcatgcatcgagtctaccgcttcgccagtgggctgtatggctttgcccggactacacttaggtgcaacttcaccacttatgtaggaaaggccttgcaatggtcgattattcgccggctctgatgaccgacatgtatgaatacacgatgctcgacgccgctctgaaagacggtaccgccgaccgcaaatgcgtgttcgaggtgttcacgcgtcgcctgcccgaaggccgtcgctatggcgtggtggccggcaccggccgcattctggatgcgctggaacatttccacttggacgaagcggacctgaagttcctggccgaccgtcacgtggtaagccccgagaccattaagtggctggagaacttccacttctccggtacgattcgcggttaccgcgaaggtgagatgttcttcccgaactccccgattttgcaggtcgaaggcacgttcggcgaatgcacgctactggagacgttgattctatccgtgctgaactacgattccgcagtggcctccgccgcctcacgtatggcgtcggcagccaaggatcgtccttgcatggatatgggcggacgccgcactaacgagtgggccgccgtggccgccgctcgagccgccgtagtgggcggattcaagggtaccgccaatctgctggccgcccagctgtatggtctgaaggccattggcaccgccgcgcattgcttcacgttggtgcatgattccgagcgtgacgccttcgaatcgcagatcgaggcattgggcaagaacaccacgctgctggtggacacctacaacatcgaggaagccgtgaaaaccgccgtcgaggtggccggtcccgaactgggtggcgtgcgcatcgactccggcgacctagccgccatggcccagcgtgtgcgcaaccagctggacgccctgggcgccacgaacaccaccattaccgtgaccaacgatttggatgagtacgcgctcgccgcattgcagaccgcgccggtcgactcctatggtgtgggcaccatgctggtcaccggctccggcgctcccacttgtgcgatggtgtacaagctcaccgaacgtgaaggcgctgacggcacgatggttccggtcatgaagaaatccaaggacaaggccacagtgcccggtcgcaaactggcattccgctcctacgaatacgcgttagccgaagccgaacacgtgatttccggctcggaggagaagctggccggtttcacgcctgaaccgacgtggaagaacctgttggtcgactttgtggatcatgggcagatcgacgctcagtggcagggccatgacgccatcatggccgcccacgactaccacgccaaggcgttgtccgaactgcccatcaccgcgcagagcctcatgaagggcgagccagtgattcctacggagactcaggttctctgacgagaactttcgtctccataggaatccgtcgcagcatagctgctccccttacctacggacagcccactgggctgtccgcttaacggttcgaccacagagaccaaagtcctctgaccgtatctcactggccgcatccctttggttacattggctactcttccctctgtctgtgttggccgcactcctgtggtcgccgccgaggcggggagatccaaccccggtcgcacccccgtgtttgcaccccctgtggctgtgtcccggggctgtattggccgcgtcccctcgggctgaactgcgtcccggttcgccggacgtggttccagctgagggtggccccccttgtttttttttggggggggggtactgttcaccggggaaatatgtatatgtgcatgctgttgcaatgtacattttgttgtcagttgacaacgtcttgattcagatgaattggcgggaaatggccatttgtcttatccaattgatttgaagaacgttgtcagttgacaacgttttgtacatggtgcggaacgacacatattcctatcctggtcaggatgccgacgaggtggagtgaaaaaccaaaccatttcagaggatattgcaccgagacgttgtgggattgccgtgttgtcggtgatgttacagagatggcgcagtgttgcgtgaggggtgttgcgtgaggggtgttgcgtgtgatgttgcgtgtgatgttgcgttgggctgattgggaggaatagtgtgccgatagaatgccgtgatgcgtgcagagcaatcgtttgcggagcaatcgttgaagaatcgtgtgaactgatgcgatacgaattataccgtctctgaattgtgggatatgacgaatcgtatcgtcatgggattgtgggatatgatgattgcggtttgatgaaatgaccgggaaatcggccgaggcaaggtgacttcgatgagtgaaactctcaatgatgagaacgcggcgggcaacgatgacgtatcagagcggcgcgctgtagagcatcgagcgttagaacagtgcgatgtcgtgcatcacggtgtggtatctggttgccctgttaattcgtgtgcggctgtgctgaatgaagtgatgtcgcagactggttggaatgcctatgagcttgcacagcgtactggtttggatcggtctgcaattggtcgcgtattgcgtgggcaaagaggtatgttgtttgatgttttggccgaggggcttgagcgggctggttttggtcttcacctagaagccgtggccccctcgcaaacgattccggaagacgaattgcacatgttgttggcgcaactgcgtaggcctcctgatttcgatgcaatagaaagcggagcgacctggtctacgttgaagatgctctgcgtcaatctgattcatgctcggaatgttcaacatcaacgtatatcgttcgtccgagcggttgcacgggtgaacgatgcgtgctggattgcgtttctcgctggtttataccgttttctgcgttgggatatcaacccaaggaacagacgcttgacattggttcctccgtaccggtatggcttggatggatggtggtccccactgccgagcgcggcaattatgcacgtgcttcatcgatatgaagagccgttgcatgacatggactatacatatttgccgttaatcgattacgaactcaacgctatgcagcgcaagcaattcaaccaagatttcatggaatatggcattcttattccagcggacgatctttcccaatcctcatcaggtacgcaggcattgactctgtaagcgagtggtgcataagaaaatagtggcgtgcagccaagtgtcatggaatggatatgtaagcagggaatgacattgcgctggggtttgatgatggttgacgagttgctatccaggcatagagcggatggcgtatgctggggcgcatggttgaaatcaaagacatgcttggcaatcaccaaataattcgtgccgacggccgcaaggtcgacgagctgcgccccgtgcgcatcacccgccacttcaccgacgcccccgaaggctccgtgctcatcgaatgcggtaacacgcgcgtgatgtgcaccgccacttttacccctggtgtgccgcgttggcgcaaggactccggcctcggctgggtcaccgccgaatactcgatgctgccgcgtgccaccgccgaacgcaccgaccgtgaatccgtacgtggcaaaatcggtggccgtacccacgaaatcagccgactgattggccgctgcctgcgtggcgtcatcgatatgaaggcgctcggcgaaaatcagattcagcttgactgcgatgtgcttcaggccgatggcggcactcgcacggcttccgtaaccggtgcgtacgtggctttggtcgacgcagtcaattgggcggagaagcaccgccatatcaagtccgccagccgcgtgcttaaggactatgtgtccgccgtatcggtgggcgtgatcaacggcaccccgatgcttgacctgccatacattgaagacagtcaggccatgaccgacatgaacgtggccatgaccggttccggcaccttcatcgagattcagggcaccgcagaacaccgtccgttcaaccgtgccgaactcggcaccctgcttgacttggccgaaaagggcaacaaggaactgcaagccgcccagcgtgccgctttgtccctagactaagccagctccccttcctttaggggaggttgtcggctggaagccgtacggtctgcaatgtccagctcccctgacaaggggagccttcttaaaggagaacccatgcaaatcgtcgtcgcaacccataacgaaggcaagcttgtggaaatccgccgcattctcgaagaggatcttggcgtggatgccgaaaacatcgaactggtgtccgctggcagccttcacctgccggacccggtggaaaccggcgtcaccttccaggagaacgcgctgctcaaggcccgcgccgtggccatccgtaccggtctgcccgctgtagcggatgattcaggtctcatcgtcgatgtgatgggtaacgctccgggcattctgtctgctcgctgggcgggtgctcacggccacgacaaggccaataatgcgctgctgctcgcccaaatcgaagatattccggatgacaagcgtaccgcgcgcttccgctgcgccgccgcgctggtggtcccggacaccgaggccagtgccgacgtgaccggtggagtggctgccgacggcatcaccgtttacaccacggctgcagatgggagccctgccccggtgcatgcccggtacgccatcaagtcggagacagtggaactcggcgacatgccaggtcgtatcatccgcgaggctcgtggtgaacacggtttcggttacgatccgctgttcgtcccggacgaccagcctgccggtcgcgtcagcactgagcctgaccatgaaggcgagccgctgaccagcgccgaaatgactccggccgagaagaatgcgatttcccaccgaggcaaggcgctgaaagccttggtccccgctatcgaggcgctgctgcactaagtcgtctaggctgtctaactgcactgagccgcgactaagccacagttgagtcgcggctcagcaactcagcccctcccgaatcgggcaagtgtctagcaagcgcctatgacctagcaagggcgatacgaaagaaggccggcgcttagtgcgtcggccttcttgatgaacaagagccacccgatagaatcgaactaccgaccttcccacgaacgagggggatgctctaccactgagctaaggtggcgtggctccaagagccaagtagagaatatagcactgcgtttgattcaacgcaagccggacgttcagcatcttcgggccattgttctttgagccattgtggaggcaatagtgcgaacgatgtgcacacctcatctgctcggaccccattcgtcgtgtgcgcgttatgctagcatggtgagcctgattgactcggaggcagagggaagcatgcgtgattttgtgctggtgaagttgacagacgaagagttcgatgatttctccgccaggcatccacaaggcaatttccaacagatctcggcgatgggacgccttcgcgccgcgcaggggatcgacgtcgaatatctggccctcaaggagggcgagaagatcgtcgcggcggcgctgttcgaaactcaccgctctcgattctctacatttgcggccatccatgatggcccgatgtgcgactatcacgacaccgaagcattgaccttcttcatggatgcgctgaaacgccatgccaaggcaaagggtgcttcacagctggaaatcacccctgaatccccgtatcggcttcgcgacaccaatggagcttctttgccggatgaccagaacggcgctcccgacaataagctgatagaacggctcgaggcgatcggcttcactcatggcggtttcaccgtgggctacacggcggttccacgttggcgctacctcaaggatctgaccggcattaccgatgagaaaagtctgctgaagtcctatgacaagcgcacccagtggagcgtgaagcgtgcccaatcgatgggtgtgcatgtgcgtgagctgtcggacgaagagttgggggtattcgcacgaatcgagcagcaaaccgccgaacgtcgtagcttcgaataccgtggcgaagcatatttccaccgtttcaaggaagcgtttggcaacaaggcgcattttatggttgccgagatccacatcgacgaatatgtagcggacatgacggccaagcgtgaagcactttcggccaaggtggcggcattgaccgccaaaaacgccgaacaccccaccaccaaaaccgaacgtcagctgggggaggagacccgcaatctggcggcagccgaaaagcgcctgaacgaggcggccgagttcgccaaagacggggatgtgctgccggctgcggcatcactattcgtggagcatccgcgcgaggtcatctacctgttctccggtagcgtcgagcagtacaagcccttctacgcctccgcgctgattcagcatgacgcgatgctgcatttctgcgtggaacacgggctgtctcgctacaacttctacggcatcgacggcgtctttgatgatcccgatgacgaggggcgtggtgtactggagttcaagcagggcttcaacggatatgtcgaggaacttccgggcgagttcgtactgccggtcaaaccggtcgcctatgccatgaagcaatttgcgcacaagctgctgtcgcggtaaacggacgcagcacacaggccgttccagagcccagagtaacgatcagagtaacgacaagtaagaaggttcgattatgacgcaatccgatgcaggcgtcgcctcgctcacccctaccaagatcactcctgccgagctggatgcgttctccgcagctcaagtgcaaggtagtttccagcagacctcgcagatggccgccatgggtgcgttcaacggtccggtggactatgtgggtgtcaagcgcggtgacaagctgattgccgcctgctacgtggtgtacacgcagtcccgtttcggtttggaaggctcggtctggtgcggaccgctgtgcgattatgacaatccacaggtggttgaggcgatgaccgaagccctgcgtcgttcggccaaggcccatcacgccatcagcgtatcctgctggccggccgcagtctaccgtctgcatgatctggacggcaagccgaccagcgacccggacaccacgatgatggacaacatggcccgcttcggttggaaacatggcggcttcaccgtgggctacgaatccgtggtgaaccgctggaacttcgtcaaggggcttgacggcattcataatgagaaggaactgctggcctcgttctccaagtaccgccgtaagaacatccgcatcgcccaggattccggtctgcgcgtgcgccggctggaacgcggcgaactgagcactttcgtcaagctgtgcgatatgagcgccgcacgtcaaggcttcaagagccgcgatctggcctactatgagcgtctgttcgataccttcggcgacctgatcgagttcaaggtggtcgaaacccatttcgacgaatatctggacaccctgcaatccaagctgaatgcggcctccaaagacaagcgcaacctcgaacgcctgctccagcgcgcgcaacagcggccggaaggcacggccaagaagggtgcctccgacccggcaacgctggaaaagcgcatcgccaccgcagacaagaagatcacggcgctggaaaagaccatcggcgaagtcaatggcatcatcgcctcggacggcccggtcattccggtggaagccggtgtctacttctggcatccgaacgaggtcgtctgcctgtccagcggcgaggacgatcgtttcatggattactacccgtcttccctaatccacttcgaggcgatgcttgactgcatcgcccgtggcgtggagcgcttcaacttctacggcatttccggcattttcgacgccaacgatccttcctacggcgtctggcagttcaagactcgcttcggcggattcgtggaagagcttccgggcaagttcacgttgccggtggacggactgcgcttcggtgtatccgaagccgcacacaagctgctgcatcgctgacaaacagtggcgagcacggacacagaaataaggcacaggtgacgacgagatgagcgcgactgcgaatcgaacagatacgacgtatacgtttggcgtgattacgcccgaagagttcgaccggctttccgaagccacaagccagggcagctttcagcaatggtccgggcaggtccgtcttgccaagattcgtgggcatgaagccgaatgcgttggcgtgtgcgacgcatccggcaatctggtagccggctgcgtgattctgtacctcaatggtcgtttcggtgcagatggctccgtatatttcggccccatcggcattagcgatgatccggctctgctgcgggccataaccgaggcgattcgtgaatcggcccgtcgctaccatgctgtttccgtggcatgctggcctaacgtctcctaccgtctgtattcctcggacgggcagcccgacggcgagccgaacgatgcactgctgaccggattcaccgatgccggctggacgcatggcggattccataccggttatgacgtggtctgccagtggatgtacgtcaaggatctcaccggcattaccaacggcaaggaactgctggcatcattcggcaaacgcgctcaatggagcgtcaagcgggcgcagtcgatgggcgtgcacgttcgtgaaatcggccccgacgagttcgacgtgttcgccgatatcgaacggcggaccggtgaacgccgcgggttcgcgacgcgcggcgcggactatttccgccagttcaagcaggcgtatggcgcggatgcgcatttcatgctcgcggaaatccacatcgccgaatatgtggcggatatgaccgccaagcgcgaggccttgcagaccaaggtcgcacagctgcagacgaaatacgatgaacgtccgaccacgcgcatcgaacgtcagctgggggaggaatcgcgcaatctcgcggccgccgacaagcgtctggctgaggtggagggatatgccaagaagggcgatgtgctgccggcagcggcttcaatgttcgtcagtcaccccaatgaggtggtctatcagtattccggttcgttggaggagtacaagccgttctacgcctcggcgctgattcagtacgaagcgatgctgcacctgtgtgtggaacagggtgtgagccgctacaacttctacggcatttccggcgtgttcgacgatccgaacgacgagggccgcggcgtgctggaattcaagcagggcttcaacggctacgtcgagcagatggtaggcaaattcacgttgccggtggacaagttccgcttcggcgtgagcaatctggcgcacaagctgctgcaccggtagcagctggcggccgggggacgaacctatgtgggctgcgtctcgcctgaccgtgtgcccgccgtgcgcccgtcgtgtgcctactcgcgcatttgctcacacgcccatcagcacgtgagcaaatgccatcatcaccagtgaaatcatcgcggtgattgccagcgagaagccggccagtttggcgttgccgagtactttgtcggtgaacagcgtggagaaaatggcgattggagccaacgcgcagatcaccatcacggcgcgaatcgaagccgagaacggcagcaggaaccacgagatcaacgcgaaggcgacactgaacggtatacgccaagcgatgacggccatgacttccttcacatcatgcttggactggggcaaatccatgagcatgcccaccatcagcatcgacaccagcgcgttggcaccgctcaacggctgggttatagaggcgatccaatcgggaatcttcacgttggcgacggtcaacgcgatcatgagcagatacgtgtcgaacggcaccgagccgaagaagctcttgccgatggtgcgcagcaatgcgcggcgggcaagccgtttggcgtcgcgatccttgggcttttcgtacggcaaggtgggaaccgaaccggcgtgttgttcggcaagtgttttgccgggctgaatatgcagcagttgctgggtgagcacattggtgccggcggccaccatcacgcagttgccgatatcgaacatcgcagccggcaccaccgcgcccgcaccccagaatgactggacgaccgggaaagagaaacaaccgagattgaagccggcgccattgagcatcaggaaggcgcggtcggtcacattgcgcttgcgggtggccagaaagatgaacacgatcgggataaaagcaaacaggaatgcgaataccgaaataagcagcagcgagatgtcatacggattggtggcgaacgagtatacgatggcaccgggtagcacgatgttgaattccgcggtttgcaacacgcgataatccttctgcccgaacaggccgaaccgcttgaacagatagccggcgagaatgatcagcaataggccaaccggcgtaagaatggcggacatacacttctctccttgactcacacaggctcacggcgcacaggctcagacccacaatgctgtgaccattatatttgccgccttggcattgccatatgtagaggcgtccgcaagggcttgcaattgcctcacgcatatacgaagagcctcccggaatcgttggcgatccaatgtttccaggaggctcaagccggtgcgcgagatgggacttgaacccacacgtcaaagacacaggaacctaaatcctgcgcgtctaccaattccgccactcgcgcgtgcatatccgcgtttccacaggtgtggaagatatacaaaaccctaggccggacagccattacagaccagccagcctagggcatccgagccacttgtcagaatcgaactgacgacctgctcattacgagtgagccgctctaccgactgagctaaagtggcttggttcgcggaaggcatttcgccagccgcgcacaagaaattaagtataagacatctccgcgaaaagtccaatcggcggcttggcggttgtgtcgtgaccgctcggttgaagatgacggttgtgccgcgccacgaactgttcgataatgcaaacgatggcaatccgacatcgctgactgatttttgttctgttcatgtccgaatttgtgagtattctgtttggtgatacggagcgcatccgagccgtgagcgaaggcgctccagtcactgatgaaaggaatggaatcctatggccatcaatccgcccgttgacgccacccagacccctgagtgggctgccctgcagaagcactatgacgagcttcaggccgaaggcgtgagcctcaagaagtggttcgctgaagacgccgagcgtgtcgacaagctgtccttcgacgccggcgacctgcacttcgatctgtccaagaacctgatcaagccggaaaccctccagctgttcgccaaccttgccaaggccgtcaagctcgatgagcgcaccaaggctatgtacaccggcgtgcacatcaacaacaccgaagaccgcgccgtgctgcacaccgcgctgcgccgcccggtcgaagacgagggcaagtacatcgtcgacggtcaggacaccgtcaaggacgtgcgcgaggtgctcgaccgcatctacgccttcgccgacaaggtccgttccggcgagtggaccggtgtgaccggcaagaagatcgaaaccgtggtcaacatcggcatcggcggctccgacctgggtcccgtcatggtgtacgaggccctcaagccgtacgccgacgccggcatctccgcccgctacatctccaacatcgaccccaacgacctggccgagaagaccaagggcctcgacccggagaccaccctgttcatcatcgtctccaagaccttcaccaccctggagaccctgaccaacgcccgtgaagcccgcacctggctgctcgaagagctcaaggccaagggcgccatcgacggctccgacgagaagaacgccgaagccatcaagaagcacttcgtcgccgtctccaccaacctggagaaggtcgccgaattcggcatcgacccgaacaacgcgttcggcttctggaactgggtcggcggccgttactccgtcgactccgccgtcggcacctctctggccgtcgtcttcggcccggcccgcttcgaggagttcctgcacggcttccacgagatcgatgagtacttcgccaacaccccgttcgagaagaacgtcgtggtgctgctcggtatgctgaacgtctggtaccgcaacttcttcaaggtcgcctcccacgccgtgctgccgtacgacagtacctgcaccgcttcccggcctacctgcagcagctgaccatggaatccaacggcaagtccgtgcgttgggacggcacccccgtcacctccgagaccggcgagatcttctggggcgagcccggcaccaacggccagcacgccttctaccagctgattcaccagggcacccagctcatcccggccgacttcatcgcgttcgtcaacaccccgaacccgaccaaggacggcgaccaggacgtgcacgaactgttcctgggcaactacttcgcccagaccaaggccctggcgttcggtaagaccgccgacgaagtgcgcgccgaaggcaccccggaggagatcgttccggcccgcgtgttctccggcaaccgtccgaccacctccatcttcggtgtggctctgaccccgttcgcagtcggcgagctcatcgccctgtacgagcacatcaccttcgttgagggtaccgtgtggggcctcgactcctacgaccagtggggcgtcgagctcggcaagcagcttgccaagcagatcaccccggccatctcccaggacgacgacgccctcgccgcccaggacgcctccacccagagcctgatcaagttctaccgcgcaaatcgcgaattctgattcgctttgctcggtcagaattcgtgattcgcgcgaccgcggctgtgctgtctggtgggcagtctggcgactgcccacgtcgcgagttctgattcgttcctctggtgccccctcgggtgagaggaggtgtcagtgtagctgactgagggagtctctctcacgactagtgcccgacatcttcggatgccgggcactttgcatatacggattgctgtcagtcagatgagtcgaacatggtcatattccgcttcggcatctgtttgcaggcataaaggcactatctggccaactcacgtggctgattcgcttattcgcccttattcgcctcatccaggctcagcagatcgtcatcggcatcgtaatcgaagagttcgccgtaacggccccactccacggcgatggcgaactgctgatgcgcctcgtcgttggcgtaacgggcgcgcagcaggtccagcatgagcccgccgcggagcttgccttccgcagacttccgcagtgcatgctcaatgttgtgcaccagcggcgcgtgttccatcgccagtgaggcgaacacctgcttggcccgcagaatgtccgccttatgccaggcgtcgcccgcttcggtgatctgcacatggccgtcgcgtaccacgatgacgcgcagcatcgtaccggcatccaccagcgggaacaggtcgtccacctcgaacgaaagagccgaggccaaatctgccaagtcgatgccgtgaggatgctcggcaaccacatccagcagaccggcaagcccgcccggcgtggcgttgggcagcggatgctccttgattttctcgatggtcttggcgggctgaaggtctgatgcgtccgtgacagatgcgtccgtgacaggtgcgttcgtgagcgatgccgatggcgatagagcctcggcttgttgcgtaggctgcgaggcctgtccggtcaaaatcgcgtacagtcggtccaccatcgcctcgaattcgacactgtgacggtcgcgcgggcgctgcagatcaacccgcacatcggcaatcagatgccccgggtgcgagcccaacaccaccactcggtcggccatctccacggcttcctcgatgttatgcgtgaccataagcaccgacttgatgctgcgctgttcgctcgaccacagcttgagcacttcctgacgcaggttttcggcggtcagcacgtccagggcggagaacggctcatccatgaacagcgcgtccggccgcagcaccaaggcgcgtgcaatgcccacgcgctgcctcatgccgccggacagttccttcggatacgccgattcgaagccgtccaggccgatcatgtcgatggcatccagagccagtttggtgcgttccgcacgtggtacgccgcgcgccttcagaccgagttccacattgtcttgcacggtgagccacggcatcagcgcgaaggtctggaacacgagtgcgatgccgggattcgggccggtcagggcctcgccgcgatacttgaccgtgccgctggtcggcttgaccagtccggccagcgcacgcaggaatgtggacttgccggcacccgaacggcccagaatggccacgatctcgccctcgtacaggttgaacgagatgttgtcgaacacggtgagttcggtgccgttgtcggccgtgaagcgctggccgacgtgctgggcttcgatgatggtgttctgcggggtcaccgcccgcagcgaacgaatggtttccattgcaacagtcatattattctccttaagtctttagttcagtgcgaaacggcgctcggccatgcgctgcagcgggttccagaacaagcggttgacggccaccacgaacacgctcatcacggtcacgccgatgatggtcctcacggtgttgccgctttcggtggcctcggcgatatacgcgcccaagccggaggcggtcagcgtatgccgtccataacttacgatttccgagacaatcgaggcattccacgccccaccggccgccgtaatgccgcccgtgacccacgagccgaataccgccggcaaaatcaaatcgcgccaccgctgccagcgccccagctggaagctgcgcgtcatctcacgcagatcgtcgggaatctggctggccccggcgatcacattgaacaggatgtaccattgcgtgcccaacgccatcagcagaatactgccccagttgatatccacgctgcatgccacgaaccagagcgtgacgaacgggaacgtgaagttcgaggggaagctggccagcacctgcacaatcggctgcataaaccgcgaaacgcgcggattcatgccgatcatcgcgccaatcggcacccaaatcaccgagcagacgagcgtaagcagcgccacgcgcaggaacgtcaccatgcccaacacgaacgcctgcccgagctcgccgaatcccgcatcgcgatgaatcaccagcataagctgcaccagtccgaacgcacacgctgccaacaccagcactgtgaataccacgtcaagcgcgcggctgcgtgcggacttcacgtccgccgcccaacgtccaccggtccgacccaacgggcgggccagcgtgtcgaacaggtcgccgagaggcctgaacagccaggccaccatctcatcgatatgtgactgacgaatgatggtcagcaccacactggtcttgcgcaccgccgactcgctttgcgtaatgcggaacttctccgcccacgcggtcagcggcttccacagcagtacgtcgataagcagcaccaccagcaccatcgtcacgatggcccagcagatggccgcgagattctcctcggccgccgcctgtgccacgaagctgccgatgccgggcaacgcataggtgcgattgttcaccgagatcatctcggaggcggtcaggaagaaccatccgccgcccacgctcatcatgcagttccacagcagcggaatcatcgcgttcggcacgtccagtgtccagaatcgttgccagcgtgtgagctgtagtgagcgggccgcctcgtcgagttcagttggttcgctggtcagggaccgggtgaacgagaacgccatgttccaggcctgactggtgaagattgcgaaaatcgacgcggcctccacgcccagcatcgagccggggaacagcaccatccagatggtgatggtggccgaaagaaagcccagaatcggtaccgactgcagaatatccaacagaggaatcagcacgcggctcaggcggcggcagcgcgcggccgccgtgccgtagatgaacgtgaacaccagtgagaagaacagtgccacgagcatgcggaacaccgagcgcagcgcgtaatacggcaggtcggcgagattcgtactgacttgtgacggcactcctttcgggccgatcggttcgccgatcgccggcagaatccaagcgatcagaccgaacagcgccagaataccggccacgaccagtacgtcggaggccaggcgcacggcgaatggctggcggtcggacgcggcggtggaagggttgcgggccgacgcatttggacgctcgccgacgcgattgaatgaaaacatggtcatgaaaagacctccctatgcataggaaagacgaattatgcaagggttatccggggagccaaggaacactacaggcgagagcccgacttccggataacggaatataagaaaacatggtcatcaccaccgcaactatgactgttgccggcggcggaactactggaataatcaccgtccatcggactctcacctccttcaagccgtgcgctgaaacgccagatcaataccatcgtcggtatccatgcgaccagcaggaggggcggaaagtattcgaatccgccgattcgagccatcgttcaagcttcagcatcgcagggcggtggaattgcgttagttcatgccttgatccgacaagaactgctgacctgcgtgcagtgtctccactgttagcggcagcaacccatatccctgcggtagcctcgcctaccgacgctcccaagataaagcccgcctgcaggtctgtcaactacgtcgcagtgccttggtgttggaatgccatccgacagccattctgtccgcaataatccgtacaattgacgattgctgtgtcgagaagtgggccgccgcataagcccacgtctccatgggtccagtccgaacggccgcaaggcctgactttcggcggatcggcaggcttcccaagggcaaacccgagggataacgagaacaggccaacgcacgtgatgcgcaatcgcgtggatggccccagatctgtggctgatatgcggcagcactgaaggaaaacaatggttaacgctgttgaggcttttgacgccaagcacatgaagccggctgaggaaatcccggccttccgtcccggcgacaccgtcgacgtgaacgtgaagatccaggaaggcaacaactcccgtatccagaccttcaccggcgtggtgatcgctcgtaagggcgctggcgtgcgtgagaccttcgtggtccgcaagatcagcttcggcactggtgtggagcgtcgcttcccggtgcactccccgtccatcgactccatcaagctcgtgcgtaagggccgtgtgcgccgcgccaagctgtactacctgcgcgctctgcgcggtaaggccgctcgtattgccgagcgccgcgacaactccgctaagtgagtcgattcgcgggtgcaatcgtgggcctgatgatgcaggtgcgcgaataaaccgtgaaattcagcccggaaccgtttcggtttcgggctgtttccgtattttccacgtatgatggacgggcgccggcacccctcatatccggcagcatgaatcgcgaggagatggtatgcaggacgatcaggataacggcgaattcccgatttccgacaatccggagagcaaccagacctcgtatgatgacgaggccgatgcccgcgattcccgtacgttccaagtcgccgaccacggcatcgccccgtccccggttcccccggcaccggcgcgcccggcgcacgccgcttcttccgctggcgcgaatgccgcggcagcatcatcgatggatgatgaccacttcaccctacgcgactttttcctgtggtgcggcgttcccgtgcttatcgtgctgctgattcgcattttcgccgtcggcttttacgagattccttcgcgctcgatgatggacaccatggtgcccggcgatcgcgtggtgaccagcaagctcacccccaagatcttcgatctgcagcgcggcgacgtcgtggtattcaaagatcccaacaactggttgaacgaggagcagagcagcgctcccggtggcgggtacctcatcaagcgactgatcggcctgcccggtgacgtggtcgaatgcaagggcgcgggccagccggtgaccatcaacggcgtggccatcaatgagacctcctacattcgccccggcgtggacccgagcgccttcccgttctcggtgaccgtgaccgaggaccacgtgttcgtcatgggcgacaatcgcgccaattccgccgactcccgctatcatcaggatgacggcgatcgcggcttggttcccatctccgatgtggtcggagtcggaatcgcgagatactggccgcttgaccggcttggtgcgattgatgaccaccacgaagtcttcaaggacgtgcctgacgcttccggctcgaattcctgagtcttttttgaaccgtgtgagtctttgaacgattgagttccgggccgtctgaatcctgaaccatttgaacctggaccgtctgaatcctaaccattgtgagacgatgggagccgcgcatgattaccccgacacttgacttggaacgcagccttgcggcccagggctatgaccttattactggattcgatgaagtcggccgcggcgcgctcgccggtccggtgatggtcgggtgcgccgccatctgggcctgtgatttggcgccgcttgacggcgatgattccgccgaactgtccgggcggacctacctcggcgtaccggacggcgtggccgactccaagatgctcaccgaacataggcgcgaggcgattttcgacgaactgcgcgactggtgcgcggcctacgccgtaggccaggccagcaacaccgagatcgacgaatggggcatcacctatgcgctcggcgtggccgccctgcgcgcgctcagccaagtcgaacgcgaacttggcttacggcttggagggggattgacggcaaaaaaggctgcgggggagattgtggaaggtcgtccgggagactccgtaggggaatccattggaaattgtggggaaagcgttcgcgccctgcccaaagtcgccggaattctcgacgggccgagcgattacatcaccaaggcgctcaacacgttcgacgcgccggacgtgccgattccagccgatataacgaccaaagtcaaaggcgaccagcattgcgccaccgtcgccaccgcggcggtcatcgccaaagtgacccgagaccggctgatggtcgacctcgcgcaaagcaacccacgttacgccgcctacgaatgggctcataacaagggctatggttccgccgcacaccgtgccgccatcgccgaacacgggccgactccgctccatcgtgtctcatggcacctgacctgagccgcgtgcgacacgacagtgtgagcgctaacgcaaaactgttgtggacgcgctaaagtcagtattgattaaggtacaagcctggccgtgcacggatgccggccgccagaggggaggttaggtagcatggtgaccggccgcaagccaagcaaacgtccatccatgttcgaagtggccaagctcgccggagtcagccatcaaaccgtctcccgtgtgatcaatgactcgccggacgtttccgacgccacccgtgcgcgagtccaggccgccattgaccaactcggctaccgcccctccaactccgcgcgcgcactggcttcccgccgttcgcgcaccataggcctgatcgccggaggcctcaaattcttcggcccgatttcctccatctcatccatcgaatccatggcccgtgaacacggtctgttcatgagcgtgatgatggtccacgaggccttgtgcatgcagtccgaattcgacaacctgtgcgacaccttcaacgagcagaacgtcgacgccttcatcttcctgaccccgaccgacgtgatgttcgccgccgcctgccgtgcgcgagtcactcagccgcgcgtcatcgtcaccgccacccacggccaaatgaccgtgcgtgagggattgggccttatctccaccgaaaacaagcgtcgcactgcactggtcggtatcgaccagtggggtgcaatggccaaagtggtggccttgctgggcgaatacgggcacaaatcggctctgtattttgccggtcccaacgaatggcgcgacgcccacacccgactggatgcgtggcgcaagctcgccgcctcccgatccatcgattcacagatcgtgcgctgccatacgtgggatgcctctgaggcatatgcgcacatgaatcatctcattgatgagtatgggcgtcgaggcacggcgttgcccaccgcggtcgtcgccgcgaacgacaatcaggccgtcggcgtcatgcgcgcgttgcatgagcatgggcttcggattccgcaagacatcagcgtggtcggattcgacgacatgtctggcgtggataacatgtacccaccgctgaccaccgtgcatcccgatttcgaggggcttggcgtggccgccatgcgcgagacgctgcgtttgctgggggagggcggcgagccgaccttcctgaccacccagcacggcatgggactgatccccgccgaagtgcgtgctcggcggtccttggggccggctccccggcggtaaattggcgctgttatcaaaccgttatgatgcgtgacacggtataagttgtgtcgaatgcaggttatcggtagaatgtttttttgaaattgtgagcgctaacatcctccccaaggaaggggataacagcgccggcgctccaaggcaaaggaaagatatggcagcaaccgacaacgcggccgagcaggccgcccacatcgccgagaagattcgcgctggcaagaccacgctgggcatcgaattcggctccacccgcatcaaggccgtcctcatcgacgacaacttccagaccatcgcctccggcgactacagctgggcctcccacttggaggatggtctgtggagctacaccaccgaggagatctggggcggtttgcagtccgcttacgcctccatggccaacgacgtcgagaccgcctatggcgagaagctcacgcacgtcggccacatcggcttctccgccatgatgcacggttacctcgcattcgacgaggccggcgaactgctggtgccgttccgcacctggcagaacaccaacacctccgaagctcacaagaagctctccgagctgttccagtacaacatccccgagcgttggtccatcgctcacctgtaccaggccgtgctcaacaaggaagagcacgtctccgaggtggcttacttcaccacactcgccggttacgtgcactggaagctcaccggtgagaaggtcctcggtgtgggcgatgcctccggcatgttcccgattgacccgaccactcacacttacgaaaccgcattcatcgagaagttcgacgctctgcctgaggtcgcagcccagccgtggaagctggagaacctgcttcctgagccgctcgtggccggcactccggctggcgagctgaccgaggaaggcgccaagctgctcgatccgtccggtgccctgaatcccggcatcgtgctcgccccgcctgagggcgacgccggtactggcatggtagccaccaactccgtgcgcgtacgcactggtaacgtctccgccggcacctccatcttcgccatggtggttctggagcacaagctcaaggccctccaccctgaggttgacttggtcaccaccccggccggcgatctggccggtatgagccacgccaacaacttcacctccgacctcaacgcttgggtcggcctgttcggccagttcgccaaggccatcggccagtcggttgatgccggtatgctgtacggcaccttgttccgcgcggccatcgccgacgacgtggacgccaactgcggcggcctgctgaactatccgttccgttccggcgaattcctggccggtctgcctgaaggccgcccgctgttcgcccgcagccccgaagccaacatgaccctcggcaacttcatgcgcgcccagctgttctccgcgttctccccggtcaagatcggcatggacgtgatgaccaagcaggagcacgtgcaggtcgactctctcgtgggccacggcggcatcttcaccactccgaaggtggctcagaagattctcgccgctgccttcaacaccccgatcaaggtcatgtccaccgccgccgaaggtggtgcctggggtatggccgtgctcgccaactacctgtggaacaccaacgaggatcacagcaacctcgctgacttccttgatggtttcgtgttcaaggacgcccagtccaccactgagaagccggtggcttccgatgtggttggtttcgaggacttcttcgcccgcttcaccaagggcctgcccatcgagcacgctgccatcgaaaccatcaacctcgaagataagtaagcctttctgacctccctctattgagagaggtccttgagattttgaaaaaacgtccatccatcacagtggaaaggaaaaccaataatggcaactttggctgattacggccccgaggttcgcgccgaggtcaagcaggttcgtgaggtcgtctccaacctgcaccagcagctgatcaagtggaacctggtcgtgtggaccgcgggcaacgtttcccagcgtctgcacaccgccgacctgttcgtcatcaagccctccggcctgcgctacgagtacctgaccccgtcctccatggtcgtgtgcgaccttgacggcaacgtggtcgacggtgccgaagccccgtcctcggacaccgcttcccacgcctacatctaccgcaacatgcccgacgtctacggtgtcgtgcacacccattccacctacgccaccgcttgggctgccactggtcagaacatcccgtgcggcctgacgatgatgggcgacgagttcggcggcccggtgccggtcggcccgttccgtctgatcggctcggaggcgatcggcaagggtgtcgtcgagaccctcaagaagtacccgaagtccccggccgtcctcatgcagaaccatggccccttcaccatcggcaaggatgctgaaggcgccgtcaaggccgctgccatgaccgaggaagtcgctcacaccatgtgggccgcccgtcagctcggtgacatcatcgagatcgaccaggccgacatcgataagctcaacgaccgctaccagaacgtctacggccagcactgatttgatggagtgtccgccgcgttgcggaaggctcgacgtaccttcgtacgccttcgccttccgcgccttgcgggcacacacatcaaatcagcgctgactccgccagcacggtggtgtcttggctcccctctctgaggggagcctcggtcggcgaatgaaacttaaacaaacccccataaacaaagaagtaaaggaagtaaccctatggttatggaaaaccccttcgagggcaaggaaatctggttcggcgttggttcgcaggacctgtacggcgaggaagccctgcgccaggtcgccattcactccgctgaaatggtcgactacctgaacaacaccggcaagattccggccaagatcgtcctcaagcccaccctgaagtcctccgacggtgtcaaggagttcatggtcgaggcttccgccaacccgaacgtcatcggcgtcatcacctggtgccacaccttctccccggccaagatgtggattcgcggcctcgaagtgctgaccaagccgctgctgcagctggccacccagcaccacaaggaaatcccgtgggagaccatcgacatggacttcatgaacctgaaccaggccgcccacggcgaccgtgagttcggttacatcgtctcccgcctcggcatcaagcgcaaggttgtcgtcggccactacaccgatcctgaggtcgtcgagaaggtcggcacctgggcccgcgcctgcgccggctgggatgcctccaacaacatgaaggtcatgcgctggggcgacaacatgcgtaacgtcgccgtcaccgagggcgacaagaccgaggccgagcgcgtgttcggcgcctccatcaacacttgggccgtcaacgagctcgtcgctgcgtacgacgccgtcaaggacgaccaggtcaaggagatcatcgaggactacaaggccaagtacgacgtcgacccggctctgctggacgccaagtacgactccctgttcatcgccgccaaggaagaggccgcgatggtcaacatgatgcgcgccaacggctgcaccgccggcgtcgacaatttcgaggacctcggcgctctgccacagctgccgggcgttggcccacagcgcttcccgtccgagtacggctggggcttttccgctgaaggcgactggaagaccgccgtcctcgtgcgcatcggcgccgtcatgggctacggccttgagggtggcgcctccctcatggaggactactcctacaacttcaccgagggcgacgagctcgacatgggctcccacatgctcgaggtttccccgtccatcggcaccatcgccaagccgaagctggagatccacccgctgggcatcggcggcaaggccgacccggtccgcctggtcttctccggcaagcccaccaaggacgccgtcgtggtctccatgtccgacgttcgcgaacgcttccgcctgctcatggacgtcgtcgacgtcgttgagccgcagggctccctcaaggagcttccgtgcgcccgcgccgtctgggagccgaagccgagcctgaagaccgctgttgagtgctggatcaccgccggtggttctcaccacacctgcatgaccacctccgtcggtcgtgaggcttgggaagacttcgcacgcatcgccggtgttgagctcgccgtcattgacgagaacaccaccgctcgccagttcgagaaggaactggagctgtccgagatgtaccaccgtctcaacaaccagcactgattggcggagcgtataccgcctttcctcaggttcgacgtaccttcgtacgcccctcgccttcggacggcggtctccgcacgcgccaatcagcgctggcaagccagcaccgatgactaaatcagtctgctgactgctaccgctgaaaaagggctgttccggaaaaccggagcagccccttttgctgttatcggcaactccccacaaacgcatcaaaaatcgcctgcgagcgtggatctaccttgtagagaaactcgggatgccactgcacggcccacaggaagtggcttgccggccggtacagggcctcgatcacgccgtcgggcgcaacggccatgacttcgagaccgggggccacatcacgaaccgcctgatgatggtagctgttcactgcaatctcagtctgccccgcgaacaatgaagccaggggagtgccggacaccaaggaaacgctgtgcccgaacgcatcgtacggcggattcatatggtgttcgatatcgctcggatgctggcttggcaaatcctgccacaacgtgccgcccagtgccgcgttgatgaactgaatgccgcggcagatgcccagaatcggcttgtcccaagccattacagctggcagcagaatcgattccattcggtcgcgctcaggagagagcacctcgctacggccggtggcggaggccgctgcaccaaccatcggtcccacatccggcccgcccgtaaacagaaacgcgtcaaaccgttcggcacattgcgcaagaatgtcggcgtcatcggtcagcggcaacatgatgggcgtaccgccggcccgcattatcgcctccatatatccgggcagcatccacagactatcgcgcccgtaatccatcagcggagtcaccgcaatgagcggtcgattcgtggtcatgcctgcctcttttcgcccaagtgtcgctttcgtcgttctgccgcaaatcgcttgatccagtggccaataatgccgtcactgtaccgaaccaatgtaaccggtcggccagcattatttcgtcagccagccgcgacgagattgcacaatgtgccaatgatgggggcattcggtgcggccttgtcaatgttcgggccattgcacgttcggcggggaaagcatgcccctgtccgcgcatcgtgatgaacgagtaaggttgacggggagggagaatcacatgaaccaggcatgcgtacgcaacgacaccatcgacgcgggcaaccatcatggccgaccgcaataccgggcgttcctgcgatttctgacatcgcaggaacgcaacgtcatttggctgttgctggccgtcgcttttcttccggtggacggcaccacgcttggcctgtacgcgccgttctggtcgccaatcagtccggcgctgttcgccgtgtactgcctatgcaattggcggcaactgcgcatcgcagccaaccggtacctgccgatgttcctcctaccggtggtctgtataatcctgtccatcccgggatggctgaagttcggcatccacctcaacgccgcgttcatgagcatcaccggattgctgggcgtgctcgccacgctgggcacgctcgccatcgccttcgacatcaagcgcgttccctggcacacccccatacgggtgctcatcgcatcatactgggtttccttcggagtgggcgtcgtgcaatggctgtccatccgtctgcgcgccaaaccgttgaccgactatttctcgcacctcatgtaccggcaatacatcagcgacaactcggtgtggggcggcggccgtccgcagttcctgttcgccgagcccagctatatcggcatgcacctgttcggcatactgcttccgctcatgtggctcatgcgcgggcgcgaccgcatctacgccaaacggctgcgtgacctcatcgtcacgtatgccgtcggcgcggtgctcatgcaagccggcaccagaatcgtcatcgattccgtcgtggcgttgctgatcgcccttgtggcgcgcaccgattggcatgacggcgcacgccgcgtccggggcatgctgcagattcttggcgcatgcgcactgggcctgctgggtgtgctggcggattccagactctccgccatcgcggagaacggggccgagggagacggctcgttcttcgcgcggatctaccaaagcctcgatccgatatgcggattgctcacccatccgtggacgctgctcaccggttatggcgcgggcaacatcatcaatgcggtgtgggccggcgcggccaaagccggacggctgctggacggtcttggtatgaacggcggcgcggccacgggattcgcggccggcgtgaacgcggacacggtgtggacgatgtgcgcgtataccagcgtcatcgtcgaatacgggctgatcgggctggccatgctggtcggagcctcgatggtctgcatgacgcgcgggaggacggtatgccgtggcggtgcggatggcgcatcgtccgacgggctggcgcacggtgtttgtgtcaccgacgttgccgacgttgctgatgttgccgggggcaatagtggtgatggcgttgccggcgcgggtccgggcgaatccggcgtctggcacaagaccgtcatctgctggctcgtcctggtcgcatacctgtacatccaatgcgagaactatgcgttcgccgctctgcagctcctcgtgttcgccgcctcgaaggtgaggcgcgagcgctgattcctctcgggccgacgcctcgacgcggcccgagatggaccaaaatccagaataaacgacatttgccgctgttccgtttttcgcccaaggcgtatctcttcccgtatcttgaggtgcatcatgtattgtcgcggctaactaaccggcgaaacgcggcatgtttcgcattttgggcgaaaagcccaaggcccacaggaggtattgatgacgttcgttgcacggtcggtgcgctatgtgctcagaaaacgagtacgaaccatagtgctccttatagtattgaccatcataacggcgagcatgctatccacgatcgcggtttctcgggcagctcaacaggccgccggacgaatcgagaaggaagcggtcggcgggttcgtgctggccagcaacctgcagggcagcatgctcacgcctcgcggaggcggcatggtgcgtcccgccgacgtgcgcaggatcgcccaactgcccggggtcgattcgtatatggtccgtcagaacgccaccgccgatctcgtgggggcgaatgtggcgaaggtccccggcggcgatgattacgatgcgaccaaggagcagcaattcggcaacgccgccaacgtcataggcacgaatgattcgtcgaaactcaacgtgttcacgtcgcgcacgctcggcatggccgaaggacggcatctgaaggcctccgacaagtacacgtcgatgatccatgaggatctcgccaaagccaacgggctcaaagtcggagacacgctcacgctcaaggccaacgcctacgacgccgacaacgaatcacattcgacggcgaccgtcaagaccaccatcgtgggcatattcaagggcgacagcgccagaaaggtatccagccgagcggaactcaccgccaacaccatctacaccgatctggataccacacgcgatctgtaccagtacaaggacggcaaggaaatataccaggacgccaccttcgtgctgtccaagggcgttgacgtggagaagaccatggacgccgcaaagaaactcccggtggattggaacaactatcagatcacacgcaacgaccagtattcatcgagcatgctgcatgccgcccgcggcgtgtgctccatgatgcgcggcgccctgatcggcgttaccgtctcggccgtgctcgtgctcagtctcatgctgctgctgtggatgaacgaccgccgtcaggagatgggcatactggtgtcccttggcgtcggcaagccctccctggtcgcccaatacctcaccgagatggtgctgatcggtctgccgtcccttgccctcggctggctgtgcgcgcagggaatggcccaatggctcggcaccacggcgctccattccgtgaacgcctccgcggcgaaggagctgagcagcatggggcaggtcggcggcgaccttgaatccagcatgtcggtgcgcaccctggattcgctcacggtgtcggtcgacgggaccgccatgctgtacgtggcgctcggattattggcggtgatgctggtgtgcgtcgcggtggcgtgcatgccgatgctgcgcaaatcgccgcgagacctgtcggagaatcgatgatgagcatgaatgtgtggaagcgtgccacgttggcgatcgtacgcaagccggtacgcagcggcatcatcggtctgctgatgctgatggtcttcacgagcctggtggcgcaggtcggagtctcgacggccctgcgtaccatgtccgacggcatcggcgcgggcatgggcatagggtttaccgtcagcgccggcgagaatcccatcagcgccgaggaggcgagccggttctcgcgtatccccggtgtgacgaagaccgcctatgcgacgaagaccttggcgcaggtggatggcgcgcgcccggtcatgccccggcagggcccccgattggactccgatctggccatgcaggtcagcgtgctgggcaccaccgattcctcattgtcagaggaattccagagcggcctgtaccgcctggagcagggcggccatatctcgggcgacggcgacgatgtgctggtccaccgcgacttcgcgctgcagaacggcctatcgatcggctcgacattccgtctccggcaggaggggcgcaacgccacggtgcgtgtggccgggatcttctccggcaacgtgcaggcccaaagccccctgccctcggacacttccgagaacctcatctattcgggcaggcgagtgacctccgctctgaccggaaacgaccggatcggcatgatccgatgcctgtcggataatccgcaggacctgtccgcggcggtcagtcaggccaagaccatggccggtggcaagtacgacgtcaccgacgattcggcccggctctccggcgtcctgcaatccgtgcagacggtgcgtgatctggtgcgcatggtgctgctgtccgtctgcctcgcggacgtactggtgctggcgatggcgctggtcttctggattcgctcacgcatccatgagataggcacgcttctggccctcggcatcgacaagatgcggatagtcgcacaactcgccatcgaaaccggactcatggcggcggtcgccgccctgtgttcgctgggcaccggcgccatgctgtcgggatacgtgtcttcccgactgttgcgcgattcgggcgtcgcgccattggaatcgttgcacgtggaggccttgccgcctgagcagacggtgctcatcctgctgctcggatgcgcggtcatcgccgtggcccttgccgtgtcatgcgccgccgtgctgtccaaatccccgaaatccattctttcctctatgcgttaggagtcaccaatcatgtctaactgtctgcaactggaccatgtcgattacgcctacggcgcggcgaagatccttgttctctcggatgtcagcgcggatttcgaatccgggaagatgtatgcgatcaccggcccgtccggcgccggcaagagcacgctgctgtctctgctggccggcctggacgccccctcccggggagtggtccgcttcgagggggaggacatcgccgcatcgggctatgcgaagcaccgtcgggagcacgtgtccctggtgttccaggaccataacctaatcgactacctcacccccgaagagaacctgcggctggtcagcaccaaggccgatatgaagatcctcgaggaactgggtttgagccgtgaggaatccaagcgcaacatcatgcacctgtcgggcggccagcgtcaacgggtggcggtcggccgcgcgctggtcgccccgggccgcgcgatcctcgcggacgagccgacgggcagcctcgacccggagatgaccgacgaggtgattcatctgctgcagcatgccgcccatcagctcggcaaatgcgtaatcgtggtgacgcattccaagcgtgtcgccgactccgccgatgtcgtgctgcgtctcaggagcaagaaactgacccgggcgtgacccacctgggccgggcggcacccatacaccgcttcggcatttcggcaccccggcgaccgggcactccggtatcccggcccttcggcattctggcacccccgcgctccggcaccccggcgacccactcgcgttgccggggtgccgtattcgctctgcgccataatgtgcgtgataatggaatcatgccagtgatgaatgatgaagtgcccggcgaggttgaaccgcaccccgattgttggactggagtaatccagattcgatgatcggaggtgcggttcaaaaggcccttttttgtgtcggattacgaaccgcgcgtttcaccgcttgccgttgtagatctcgttgtcgatcacatcggcgaacacgcggttgacggccgggcgcactaccttcagcgacggcgtcaggcacttgttctcctgcgtgaactgcgtgcccagcacggcgaacttgcgcacggattcggcacgcgagaccgtcgcattcgccttgtccacgtactgctggatctcctcgcgcaccgcggcgttcgtggcgagccggtcgaccggcgtctccgtggacaggccgtgcgcgggcagccaaatggccagcgactccgggtcaagtgtcaccagcgcgccgatgaacgggcgctggtcgcccaccaccacgcagtgctccacgatcgggcacttggcgatctcctcctccagcggaatgggggagacgttcttgccgccggcggtaataataatgtccttgattcgaccggtgatgatgatgcggccggcgtcatcgatctcggccaagtcgccggtcctgagccagccgtcggcggtgaacgcctcggccgtcttctccggcagattgtggtagccgcggaacacgttcgggcccttgacctgcagttcgccttcgtcggaaatgcgaatcgaggagccgggcgcgggctggcctacggtgccgatcacattgtcggtcacgcgcgtggcggcgaacggggcggcggtttcggtcatgccgtaaccctgaatcatcggcagaccgatgccgttgtagaaatgcgctagatcgagcgacagcggtgcgccgccgcaggccacgtacttgatcttcgggcccagagcgccgcgcaccgtgcggtagacgagcgtttcgtacttggcgcgctcggcgatttcggcaaatgtgtgctgctcgccggcctgctccttgcggctccagacgcgcgcggcctcggcggctttgacaaacaggcggcccttccagccggcaccggccttatgtgaggcggcgttgtacaccttctcgaacacgcgcggcacgccaagcaggtaggtcggttcaaacgaacgcaggtccggcagcagggttttggtgtccggcagatagccgaccacgccgtcatcggaggcgatggaggcgtactggatgaatcgtgcgaagcagtgggccagcggcaggaagagcagcaggcgtggatggtcgtcaagcaccacttcatgaagcgcctgcgaagcggtgatggtgatggacacgaagttcttgtgggtcagttcggcacccttcgggttgccggtggagcccgaggtgtagacgatggtggccagatcgtcggcgcgcacggtggccacgcgctcgttcagttcctcgtccgaaacagccacgcccagaccttcgagcgcgcccagtgcgttgccctcgagcatgagaatctgcttcaaggcagggcagtggtccttgaccgagtcgagccggtcgaagcgctcgcgattgtcggcaaaggccagcttgaccaccgaatcgttcatgatgcgctgggcctgcggggcggagtcggtgtcatagatcggcacgcttaccgcgcccaccgcggccagtgcgaaatcgagaatgccccattctagacgggtggaggaaaagatggtcaccgcgtcgcccttggcgatgccgagcgcgatcaggcccttggcggccgagaccacgcgctcgtggaattcgccggtggtgacgttctgccagcggccggggccgattttcttggcggcgattaccgtgtccgcgccggtgcgggcaaggcgatcggtaagtagggagtagatggtctggttgtcgcggatttcgatggattcgccaggcgtggtgtagtggtcaagcataagcgggccgtgtccttacgtgcgttgcgtgatggctgttgacaaaatcgagccattctgacaagttaggttacgctggcgtaaggttgcgcgcgttgtgggcaatggagaagttgtctgtctggttttgtggattgtatacaacgccgtgtctaaccggtttgctctacggttatgacaccgtgtccatttcgggagccatcgacttcctgcaggacaagtacgcgctgagcccggccctgcagggtctggtcatcagctccatcatgatcggcggcgtgatcggcgccggcttctccggcttcctgtccgataagtacggccgccgccgaagcactggtcgccgcgcaaaaagcagcactaggccgcgtttgctgcgtctattggcgaattgatcatatgggtcgtctgcgtgcagacgacccttttgcgttccgtcggcttctgacaccgtagaaacgtgctttctcggcttcgaggggctgattttgccttatctggaagtctacttccacttcgaggggctgatgcccaagtagacacggccctaaaacggcggaatgacgttgacgtgtagccgtttatacttccgattacatggatgaggagcccctcgaagcggagatagacttccggcaaatgcgaaatcagccccttgaaacggaagtaggcctccggcaaacgcaaaaattagcctcctcgaaacggataaatgcacgtattgggtgtagtggatgcttcagcccctgatatcgaagcatattttttctggttggcgcgtctagcatgcgcactccgcaatcgataattctgtggcctctctcactttaaaagtctggcgtgtgcgagggcgttcgcttaaggtgaatgggattgcgaggaatgtggagcgcagggtcatgaccatgcgcgtgctgcagatccagctgcgctcgctgaccgccatggatatcgtggcctacggcggtgcggcggccggcattggtgtggctctatggcagtatgcgcataccaccgcagccgccgcaggagccagcaccgccggctggtcgccgatcatgctcgccgcccacctgcccggcgcattcgcctacctggcctacggcctgcaatacctgatgccgttcggtgcgggcttcccgctcaccctcgccggactgctgctgattgtgctgctgtccgccgaattctttattcccatgcgtcagcttggctcgttcttccacgtggcgatgaacggcatgacctccaccaagcgtatcttcgctctgctggacaccccggagcccgagcatggcacggcgaccctgccggccaacgattccgattccgctgacgacggtctgacggtccgcttcgaccacgtcggctattcctatgatgatgccgggcacggcgactccaagtccgcatccgcaaagaccgataagcaaggtgaaaccagccccaattccgccgtcgctcctgcgctcaccaacatcaccttcgccgcacggcccggtcagttcaccgccattgttggcatctccggttccggcaagtccacggccgcctcgctgctcgccggtacactggccggttaccgaggttcgctcacgctgaacggcgtcgaggtatccgatttgtcaggcgaaacactggccggagccgtcactgtgattggtgccagcagccatctgtttgcgggcgcattgcgcgagaatcttctgatggccttgcccgatgacgagattcctgattcgccggattccgtggactcccgtctgtggtccgcgctcgagcaggcgcgcattgccgacttcgtgcacgcacagccgaacggactgggcatgccgattgagtccgatgccgccaacctgtccggcggccaacgccagcgcatcgccatcgcccgcgcgctcctgcatgattcgccggtatttgtgttcgatgaggcgaccagcagcgttgacatggaatccgaagagctgatcctggatacaattcgcgaattggcgcaatcccgcggcaagacggttattatgatcacccatcgcatggccaacgccgaacacgctgatcaagtggtggtgctcgaacacggcaagtcggttgagaggggcacccataccgagctgatgacggcggacggcgtctacgccaagctgtttaccacgcaggcagatattgagaacttcggagaaggccatgctcggcgtgtgctgcaggttggttcccgcaagcaggagctgtccgacgacagtcggactgagggtggcgcagcgcgcgtaagcgcagaggcgggtatgacggttgaccgcctgcagtcagctttgccgacggcttccgttggcgggagtgagcaggcctcggctgagactccggctggtgttgcaaatagcgattcgtcttccaaaatgagcacattccaagtgatcaggcgactgcttaaggaagcccgacctctggcaggactgatggcagcggcctccaccgccggcaccatcggccatctttcggccactttcctgcccgtgttcggcattatcgcggcatttgcacttaccggtaatccggtgtggggcatgggtgttgcgcccgccgtcatcatgatgattatctgtgctcttctgcgtggcatcacccgatacattgaacaatatctgaaccacaatgtggcattccatctgctcgcactcttccgttccaaggcgttcgccgcgttgcgcagactggcgccggccaagctcgcgggcaaaggtaagggcaaccttatcgccatgctgaccaccgatgtggaactgcttgagatcttctttgcccacaccatcagtccggtggccatcgcggtaacctccaccatcatctacacgattgtggccgccaccctaagcccatggatggcgctggcgttgattgccgcccacctggttatcggcatccttgtgccgcgattttttgccaccggcgtacgtaaccttggccctgccatccgtggcgctgccggagaactcgacgatgtgatactcgatgacatgcgcggcctggacgaaatcatccgatttggccgcggcgaggaacgtgcgcaggccatcgaggaccgtacccatgcgttgtggaaggatcacaccaaactcagcaaggtcaacggccgtttcaccggaatcagcggactcttggtggctgtgctcacagcggcttcggtcgccgtggctattgcctgtgccggcgcgaacccgcagagcattccggctctgattgccgccttcgtgctgttcgccagctcgttcgaaccgactttggcgctcgccgccttgcccgctaacctgactcagaccttcgcgtccgctagccgactgttcggactgatggacgaggtgcccgctgtgaccgagaacggcactgttgtgccgcaggagtatatggacatgcgtcttgatgacgtcacctttgcatatgcgggggagcatgaagtcctgtccgacttctcgcttgacgtgccgcagcatggcgtgctgggtatccaggggccgtccggccgaggcaagtccaccatgctcaagctgctgctgcgctactgggatccgcagcgcggtcaggtgacgttgtccggcacgccgttgcccgaggtcgatgtgcatgctcgccgacgtattcaggccatgatgagccaggaaacccacctgtttgatggctctatccgagacaatctgctgattgctttgcctgagtccgaggttgaagctgcaaatgttgcaggcaatggggaagtgggtgccaagaccgttgattcccgacagcagcagttggcggcgcaatcggcagagggcgatgccgttcaggtggcagcagctgacggtctcgatgctcgtttgcgtcaggctctcgccaaggcctccgtgcttgatctcatcgattccctgcccgatggccttgatactcaggtaggcgagttgggcgaccgtctatccgaaggtgaacgccagcgtatcggtttggctcgtgtgttcctgcgcaatgctgatctggtgcttttcgacgagccgaccagccgtttggatgctttgaacgaggctattattctacgttccattcacgctatggccgtgggtgagcagcatgcagacaaggagcgcggcgcggctgtggtgctggtctcccaccgcgaatccgccatgcgcattgctgatgcggtactcaatctgtaactgcctgtaactacgcgggaatcgcatcgcattgcgttacgttaccgcgttgcattgcggttcctcgcgggtggcggcgatgccatctccggtcgtcattgcgttgctgcgtttgtgttgcgatatgtgatgcggcaacgcagcaatgcggcaatgcaatgtgatgtggcaacgtggcaacgtagcgatgcaataacgcggtaacatggcaacatggcaatgcagtaacgcaacgcagcattcacgccttgatcaaagcgccgatgacgctgtcgaacgcagtgagactgaggggagccaaagcccaaaaccggcaaacacagcaccggccatgagccgatacaataaaggatttgattaatatgactactcatagagcatttaggtggccgtccctgctgacggaatccggccgcggcatcgcgttcggcggcgactacaacccggaccagtggcccgaggagacgctggacgaggatatccgtctcatgggtgaggccggcgtgaacgtcgtgtcgctggcaattttcagctgggacaagatcgagccggtcgagggcgcgttcacgttcgagtggctcgaccatgtgatcgacaggctcggcagagccggcatcgccgtggacttggcctccgccacagccgccgcgccgctgtggctgtacgaatcccatccagaggtgctgccggtaggccggtatggtcataccgtcaacgcgggctcacgccagtcgtggcagcccacaagcccggtgttcaaggaatacgcgctgcgcctgtgccgcaaacttgccgaacactacaaggacaacccgtatgtgaccgcctggcacatgggcaacgaatacggctggaacaaccgctacgactactccgacaacgccttggccgcgttccgcacgtggtgcgaggccaagtacggtaccatcgacgcgttgaacgaggcgtggggcacggccttctggtcgcagcacgtgaacagtttcgacgaggtgctgctgccacgtcacatgggcggcgacgccatggttaacccgtcgcagcagttggattacgagcggttcggcaacgacatgctgctcgacttctacaaagccgaacgcgacgccatcgagcagatctgccccgacaagccgttcaccacgaacttcatggtctccaccgaccagtgcgtcatgaactacgccaaatgggcggatgaggtggacttcgtgtccaacgatcactacttccatgagggcgaatcccacctggacgaactcgcctgctcggacgcgctcatggactccctcgcgctgggcaagccgtggtacgtgatggagcactccacttcagccgtgcagtggaagccgctgaacacacgcaaacgggccggcgaactcatgcgcgactccctggcccacgtggccatgggcgccgacgccatctgctttttccaatggcggcaatccaagtcgggcgccgaggcgttccactccgccatgctgccccacacgggcgccgattccaaggtcttccgcggcgtatgcgagctcggtaaggcgctgaagaccctctccgacgccgggctgcagggcactgagctcgagcgtgccggcacggcgatcctgttcagcgcggaatccgaatgggccacacgctccgaaaccctgcccagcatgaaactcaaccactggcacgacgtgcgcgactggtaccgcggcttcctggatgccgggctgcgcgcggacgtggtgccgctcgcctacgactggaccggctacaaaaccatcgtgctgcccaccgtgctcagcctgtccgacgaagacgttctccgtatcgccgacttcgcgaaggccggcggaaccgtcatcgtcggctatgccgccggcctgatcgacgagcacttccacatcggcctcggcggctaccccggcgccggcaacgggctcctacgcgacatgctcggcatccgctccgaagaattcaacatcctcggtgaagaagccgaaggcgagcccagcgaaatcagcctgtccaatggtctgacgacccgcctgtggcagaacgacgtgacttccgtagccgcggacaccgcagtgcttgcctcttacgcaggtgagtccgccgccgactgggagctggagcgcacccccgccatcaccagccgcccctatggcaacggtaccgccatctacgtgggctgcgacctcaaccgtcacgacattgcccagttgctcaaagcacttggctcccgatggcaggagttgtcggcgcagccgactgagagtggtcaaactccaacctatcccaccacagatccccgcatcctgcacaccatccgccgatccgcagacggctccacccgcttcgatttctacctcaaccgctcaaaccagcccgtcgccatcaacggtgtggaaggtgatcccatcatcgcacaccgttgcgagactgacgccgttggatatacgctgaaccgcaacgccattcttatcgctaaaacgtcctgctagaccgcgctagaatggcaatgttgtccggatagaggagtgcggcatgagcgacgagaaaacagccaagcgtcgagtgacgctacgcgatgtcgctcaggccgccggtgtatcgctcaaaactgcgtcgaacgtgatcaatggctccgggcgtatgacagatgagacccgtgccaaggtcgagtcggtcattaaggacctcgactaccgagtcaacgtggccgcccgcaacctcaaccgcgatcacaccggcttcatcaccctcgccgtgccttcgctgattccgccatatctggccgagctcgccaaccgcaccatcgaggccgcccgtcagcgcgactattccgtatacgtcaccacgtatgcggaaggctccgcgaaaggcgcgcgcgatctgctgaagaagttcaactccacggtgtccgatggcatgatcctttccatgagcgaggtggaaaacatttcgcccgatgatctgaaggttgattttccgctggtcatcgttggcgcgcgtaccacgtggggcattgtggatcacgtgaccccagacgatgtatccgcagccgccatggccgcaggctacctgtatgaccgcggttccaccagacttgcagtgatcggtgcccgtgacgtttacgacgaagatgcattgctgaatgccgtagaaggcaacgcgcagctgcgtctgcgcggcatcatcgaagagacccgtaggcgtgggctctccttggatccgcagctgattggcaacaccgatcaggattggaccatcggagccggtgcccgtgtgacccagcggctcattgattccggcgtgccattcgacggtgtgattgccttgaacgatcagttggccatcggcgcattgaccgctctgcgcaccgctggttatgaggtgcccgtgcaggtgcaggtcatcggcttcgataacaacgaggaagccccctacctgcagattccgctgaccaccatggattcccgccttgactggacggctcccacggcagtggatcgcatcctcggacgcatcgacggcagcatcaccaagtccgaactgctcaccaccgaatcccaggtcatcgcccgcgcctccacacgctgaacgacattgctgtaatgctggtgttgctgtactgggccgtacgaggcgttgatacaccggttgaccaacacggcataaagcgctaaggtgacgattgcgtggtacacagctgtaccgcgtggcgcataaggaaaggaagcgccaagcatcactgggcgttcgttctgagcgttcaccattcaaaggagaaaaagcatgcgccgaaataccgcgcttactcgcattatggcatccggcgtggccgccataatgctctgcgcaggaggcacgttcactgtaaacgccaccgaagaagaaccagttaaagccgacgtctcggtcaaggccatccaaggcttaagcgatgatttcatcggcggtatggacgtctcatccatgctctcgctggaagaaagcggcgtcacgttcaaaaacgccaatggcgaggtcgaggatttgttcacgttgctcaaggaatccggcgtgaactatgtgcgtctgcgtgtgtggaacgatccgttcaccgcagacggccaaggatatggcggcggcaacgtcaacgccgatcgcgcactgaccatggccaagcgagccacggcagcagggctgaaagtgctggtcgacttccattactccgatttctgggccgaccccagcaagcagcaggtgcccaaggcgtggaaatcctttgaaggcgacgcggacaaaaccgccgacaccgtatacgactacaccaagcagactctgaccacgttcaaacaagccggcgtggacgtcggcatggtgcaggtcggcaacgaaaccactgcgaaaatcgccggcatctccggctgggacggcatgtccaaagtattctccgcaggttccaaagccatacgcgaagtgctccccgaagccaaggtcgtcattcatttcaccaacccggagaaagccggcacctacgccacttacgccaaacagttgagcaaccacaatgtggacaaggtctcactcgtcaaaaagaccgaaactccggtgaagccatccacggagaacctggacaaggccgtggccgaagccgggaaaatcaatcgcgatgagtacaccaacgagtcgctcgccaaactcgatcagacgctttccgccgaccagttcacgctcgattacgatttctccgctcccgctgatgcggcgaaggttaccgtaacgctcaagtcgaatccgaatgtcaccgaaacctatacggttgcggttaccgctcgggccgaaggtggttccggcaatggctcggacggtgcgggtaatggcggggctactatcaatcccgatacgggcgagggtgataagaccaacggtgcgaatggcgacaagatcactggtgtgctgagcaataccggtagcgcggtgactgccgtgggtcttgcggttgtcgttctcggcgtggccggcggggtctcgcttgctttgcgtcgtaagcgctcctgatagagactgatgcggcattatgatgcggttgccggcagccggcaaccggctgtcagatgccatctgtcggctgtcgtttatcggttgtcggctgtcagatgcgtctgtctcggcgcagcgatgcgattctgtcccggttcgtgcatcaatcgtttgatgtgggtaccaggacagaaatcactgtcctggtttgcgaaaacgggtgtttttcgcgtaccgggacaattcccgttgccccggtttgcacgtcaatcgttctacgtgagaaccgggacagtatgttgatttcgggattggctgtattccgccgattctgtttgtcggggtatgtggactttggggattgtcttgtcctggttctcgaaaatggcccgaaattgcgtaccgggacaacgatttctgccccggtgcaaacgtcaatcgattgacgcctgtaccggggcaaattcgcgcccgggaacaatagggcgagggccggtcgcaggagtagagcgtgatgttgtcatgattgcgcccggctctcccacacggaaggccgggcgcaatcatgccgtttggttgcagcacccgcacatcgcctgcataaccgtgtacagtggcgtgtagttgcagtacatgaaggagcatcacaagccatgaccaacggacacatcaatcccgccaacgtgccggacatcgccttgaaagacggccattccattccgcaggtcggccttggcgtgctacgtatcgatgacgagggcgtggcccctgtcgtcgaatctgcgctggaagccggataccgccacatcgatggcgccgccggatacaacaacgaggccggcgtgggtcgtgcgctcgccgcttccggatacaacaccggcgccaagcgcgagaccctgtgggtcaccaccaagctgcgcgactccgagcagggctacgactccgcgctcaaggcattcgacaactccctgaaactcctccagctcgattacgtggacatgtacatgatccattggcccacgccgttcgactggcgcagcaccgacacctggaaggcgttcgtcaagctgcgcgacgaaggcatggcacgcacgctcggcgtatgcaacttcatgcccgccgatctgaagcgtctgcacggggagaccggcgcatggccggccgtcaatcagattgagctgcaccccacgtggcagcagcgcgaagtggtggcgttctgcaagaagcacggcatcgccgtggaggcctactcgccgatggcgcgtggcgccgacctcaacgccggcgacggcaccatcgagaagatcgccgccgcccatgaggtcagcccggcccaggtgattctgcgctggcacatcgaaaacggcacgatcatcatccccaagtccgtgcatgccgaccgtcagagggagaatctcgacctgttcggcttcgccctgaccgccgatgaacacgctgccatcgacgccctcgacggccccacccgcgccggccacgaccccctcaccttcacctatgcgtgattgatggcacgtcgtaacgcccacttccgccgtcgtttcaacgcctctggaccgctggagcgcgtgctgattctcatcgttctcgccgtagcaatcggcgtgaccatcggcctgttactgccgcaggtcagctccgacgtggccaaaatcaccggtggctacactgccaccggttcagccgccgacactttgaacgcgctcgccgtagacgacaaccaaagctcctccggctacgaccgcgattccttcggtttccgcaccaccgacgtcgacggcaatggctgcgacgtacgcgacgacgtgctcgcccgcgatctcacggacatcacctacaaatacgccggttcctgtgtggtcgagtccggcacactggccgatccgtacaccgcccagaccatccatttcgtacgtggccgcgccaccagcgccaaagtgcagatcgaccatgtggtggcccttgaaaacgcttggcaatccggtgcgcacgactggtccactgccaaacgccatgaattcggcaatgacccctataacctgctggccgtcgacggtccggccaatcaggagaagggttcggcttccgccgcctactggctacccaccaacgccgactaccgttgcgactacgtggcccgccagattggcgtcaaagacaagtaccagctcaccgtcacctcccaagaaaaggacgccatgctcgccgtcctccatacctgcccgggccaggccgtgcccgcagacgaataggggctaccgctcaggattgttgagcataggtgcctgcccctcgtcataagcgcgcaggagccgtcggagcaaaaatgtggtgaagtatggtgcggtgaacacgtgttcgctgctaccgatattgccggcggatagtttcacgccgaactgaatttccggataagaatccgaagcgattagcgtccgcatggatttggcggtgccttttttcgatttcacctccaccggcaccagccattcgcgcgtgcggacgaagaaatcctgttccagtgtggaatcctcttttttgtagtagtacaggtcatagccggatttccgtagcgcttcagagacgatgctctcgtacatagcacccttatagacaccaagattacgattggcccgcagatcatcactggcctcgtcgtcaagcatcgctacgaacagaccggtatcgccgaaatatatcttgaacttgttttcgtcataattgcctttcaacggcagttcaggataggacatacatcggcagatattcaccattcccgaggtctcaagccattccacgcatcctcgatagtctttgaaacgcgctccgctggcaaccttgctgatttggaacttcttgttttccttggcgagttgcacgggaatatggttgaacacgttgagaattcgtgtctgatcgagtccttgcgtgtatttgcggatatcctcctggtagtccaaaataagctggcgctgcaattgcagtgttccctcgaacgtgccagtgcgtatatgggaggcgacaaccgcaggcatgccgccaagcacgcagtaatccataaatgccgtggagaagacgttcatttccacttcagagaatggcgtagcatcacacaggtgggtgaacatgctttcgatgacggcctcatcgtatccgcgagcccacagaaattcttcgaagtccaacgatcgcatttcgtagtcggtcttatatcccacgctattgctttcgatttgcttatagctgatgcccaacattgaaccgctgcaaatcacatcatatttgccgtcgattttaaagaacttcagtgcagtggcgatatcaggatgggcctggatttcgtcgaaaaagatgagcgtatcgcccggaatgaactttttggctgggtcgatcagggaaatattgcggacgatggtattcgcgccataaccgtccgcagtgattgcacgatatttcggttcctcaacgaagttgatttccactaccgaacggtagttgtgtgcggcaaagtaatcgatagtctctgtcttgcctacttgacgagggcccttgatgattagcggggagcgattcgggtcggatttccatgcattgagataggcatcggctttgcgtttgagatacatgaggagcccctttccgaattactgctatatcaatgattttacactttcatgagcgagttttctaccgtctgtcacatttcatgagcgagttttcggctgtttttcacatttcatgagcgagatggcggggaatgccagctgccagtccgccggtcatccatcaatcgtccgcagattgtccgtctgttgactcgggaaacatgcctgcgctataactgtgcgcggtatgaagggaacaggtacaaacaatatggcagtaacacacaccgtggcagataccactgcggcaaccactatgacgaacgctgtggcagacatcgaacaggaaacaccggaaatcgggaaggaacgccagcttgccggagtcggaaccggggtcggagcagggacgaacaacaagaaaaagccgcatgaccatgcgctggccagcatccttggccccgcgttcgtggcggccgtggcctacgtcgatcctggtaatgtggcggccaacatcacctccggcgcacgatacggctacctgttggtgtgggtgctggtgctcgccaacgccatgagcgtgctcatccagtatcagtccgccaaactcggcatcgtgaccaacaaatccctgccggaactgctgggcgagcgtatgagcgatgccggccgcttcatgttcttcatgcaggccgaggtcatcgccatcgccaccgatctggccgaggtgatcggcggcgccatcgccctgaacctgctgttcggatttccactgttcatcggcggtttggcgattggcacaatctccacggtgatgctgtggttccaaggcggcaagacacagaccacattcgagcgcatcatcatcgtgatgctgctgattatcacattcggcttcatcgcgggtctgttcgtagccccgccgaaccccggcgaagtggtcaaaggcatgattccacgcttccaaggcgccgactcggtgttgatggccgcctcgattctgggcgccaccgtgatgccgcacgccatctacctgcactccacgctggtgaacgaccattacgcaggcggcgaaaagccgtcgatcaaaacgcagctgagaggctcgaaaatcgatgtggcctgggcgctgttgctggccggcaccgtgaatctggcgatgctggtgctcgccgccaactcgctgcatggcatgtctggcacggactccatcgacggcgcacagcgggcgatcacgcaggtgctcggcccggtgatcggcacgatcttctccatcggcctgctggcttcgtcgctgagctccacatcggtcggcacgtacgccggctcggagatcatgcacggtctgctgcacgtcaacgccccgatgtgggcctgccgcgtggtcacgctggtgccggcactgattgtgctgtggttcgccaaggacccgactcaggcgctggtcatcggccaggtggtgctttccatcggcatcccgttcgccgtgattccgctgatgcgatacacgcataacaaggaactcatgggcaagtgggctgatggaaccgtcaagcacgtgatcttcatgatcgtcgtggcgctgattgtggcgttgaacgtgctgctgattgtcctgacgctaatgggcagggcgtaatagactccagctgaaatcctgcgatagcacaacataataagaagccccggtgttggaaaccggggtttcttattatgttaagaatggttgaatctgccgtcagttcgcagtcatacgccgcgcacgccgttcgcgcagcgaacgcagggaaataatgtctcgcgtacgaccggcaccgtcgcccttgacgccgaagaacaccatcaacaccattgccagacagatcattgcggagatgcgcagcgtccattgaatgccgaaaatcgaagcggcgacggcggaggcgccgccctgcttatgcaaagcggcaaacgtttccatcagaatcaccaacacgggtgcgcccacagcgcccgcaatctgacgcgcggtattcgtcaccgatgatccggcggacacttcgctcggcccgttcaggcaattcagggaccacgtggtaatcggcatcagcaggaaacccatgccgatctgacggatgaactggcagattgacacccaccagatccacgtatccatcgccaccagcgacatgcccaaggtgccaagggtcaacacaatcgaaccgaacaaagccacgggtcgtgcgccgaatcgatccatcgcacggccgccgaagaactgggagacgcactggccgatagcgcccggcaacatgatcagaccactcatcgtggcagaatacccacggtcggtctggatgtagagcggcatgatgaccagaatcgaactgaaggcgaaaaatgccagcgacgcggtaatggtgccgacggtgaacgaacggttcttcagcacttccaagtccagcagcggcggctgggggagtgccgacttgtccttggctacggcctcacgatagcgcttgccggcgcgcaggttacgcagcacgaaccatacgatgccgatcagacctacaaccataggtccccacgttaccggcgccgtaaatccataggtctccgaattggtgaagccgaacatcagcccgccaaagccaatcaccgacaggctcaccgagaaaaagtccgcgcgggcagacgggtcatgcgagccgaaattatgtagtccgaacatggccgccacgagcgagattacgccgatcacggtcatagtcagaaagatggaacgccagccgttcgcatcggtttgccagccgcccagcgtgggtccaatggccggcgccacgctcatggccatgcccaccgtgcccatggcgaacccgcggcgagacaggggataaatggagaatacggtgatctgcagcaccggccacatcacacccgtgcccgcagcctcaagcacgcgcccgagcagcacccagatgaagctcggcccgacccaagccatcagcgatccgaccgtgaacaccgccattgagcagatcacgatttggcgggtggagaagcgccgggtcagaaacgcggtcaacggcaccatcacgcccatgaccagctggaatacggaggtgagccactgcccggtggtcacggagatatgaaactcggaaacgataatcggcagcgccgagctcagctgcagctgcgtgaagttacccacgaaggtaataaaggtcaggattgcgatggagataaatgccgcgcggctcagtttgccatccacatacgattcttcgcgactgagcacccgctgcaattcgccgcgacgattcttgattccctgagctccgttcacgcactcccccacttctgttgcccggcctgttgccttggcggtgtcggtggcgtatctgttcagtgatatatgcgcctcgcatatcaatgcgtattcgatgtattcggcgaccgtcgtcttcgcgtgcttggccgagcagcctctcaaagcaccccaatacgctatacccaggggtggtccagtcggttcggaatatgtgcagaagcgggggacgaacacgctttgtgcacaagaccggggcataataggcggttggttattgcaagaggttgcaagtcaataagaccagtttggaagttagtatgagcgttcatagggcaagtcacgcaacaagtattccacgcagaaggcaccgcatctggccgtgagtggtgttgattctggcgctacttgtggtgctgctaggcgtgagcggattcttcggtttgaagctgtattccgaagccaagcaggtaaaggcgcatgaggaacaggcgatgcagctgctgggcggtgtaaccgacctcagtacctcgacaacctcgatacggtgagccagcagatcagccaggcaaagaccgagaccgcggctgcgaacgagattgcgcacggcacgctgtggaacatcgcctcgaaggcgccggtgtacggcggtgacatcaccatagtgcagggtatgacttcggtgggggattcgctggtcagtgattcggtgccgcagttcatggacgtgctttccacgctgaagagcgcacagctcagctcaggcgacggtcagctgaatctgcagccgattctggaagcccagaagaatattgccaccgcgaaccagtcactgcagcagcaggtgcagaagtatcagcagctgccgaaggcccatatcggcatggtgaagaacgcctatgccgccggcaatacgcagctgaccaagatggcggacaaggtcaatcagctatccggcacgttccagattctgccgaacttcctcggttccgatcagccgcgcacgtatgcgttgatggctatgaccacttcggaggaacgttcgtccggtggtctgatcggttccgtaggtgtggtgactactgacaacggcaaaatcaatattggcgatttccgttcgaatggtgaatatattccatatggtgctggtgatcctacggaagacgagcagcgcatcttccggcagtggggaccattgaacatgtcgttcgatatacgagatttggccgtataccctgatacttcacgcagtgccgaaggtatgcgcgcgatttggcagcgcacgccgtgggggagcaatactcagctggacggcgtgctcatggttgatcctgtatttttgcaggaacttacgaaaatcagtggtaatgtcactatttcctgatggaacggtgcttacgggagataacactgctgagtttttgttgaacaaggtgtatgtcgattacccagtctccatgcaggacgccctatttgctcaagtcgcagaacaaacagtcggtagtatgttcagcaatgttgatttgacgttgataatggttatgccggtttctaatcggtgataatggtggatgacggcttgggcggtgaccccacatttgactgacgccatcggttccggtggctgtccttattttgatttgtcccgcccatggccgccgacccgtgggccatggatgcatgacctcataggagcgtggccgctcccgtcggatcccgcaagaaccatggtagcgtgccccgtcaacgtcctgtctgcgccgcaagcccccgggaggcatccgaacacatggaaaggaacgacaacgatgacgccgccgaacgaagtggtgtgggccgggatcgacacccacacggacacgcacaccatcgcattgctcgacgagcggggcaggccgctgggcgccgagacgttcacggcggacccggacggatacgacaggctgatcggcatgctgcccgggccgggcagggtcgcggccgtgggcgtggagggcacgaactcgttcggagcggccctggcccgtcgtctcactgccgccggatacgaggtgcgcgaggtgctgcgccccaggcgaagcgtgcgccgcagggacggcaagtccgatcccctcgacgcggtcgccgctgcccgtagcgtcatggccggcgacggcacgagcctgccgaaaagctcggacggctgggtcgaggcactgcgccacctcaacgcgcagcgatcccaactggtgtcggcgatgaccgcgatctccaattcgacgaacgggctgctcgtcaccgccccggaacccatcagggaacgttaccgggggttgaggagcgagacccgcatgaacaggctcgccgaatgcagaccggccggcggcctggtcgagcggagcgtgctggccgcgctgaaatccgccgccaaggcatggaaggcgctcaaacggcaggccggtctcctggaggaacgcatgcgcctgatcctcgaggaacacgccaggccgctgctcgacatgtactgcgcgggcgccgtcatcgccgcgaccctggccatcgtcgccggggacaaccccgaacgcatccgaagcgaggccgcgttcgccaaactctgcggcgtctgccccatccccgcgtccagcggcaggaccaaccgacacaggctcaacaaaggcggcaaccggcagggcaatatggcattgcaccgcatcgccatcgtccgcctgcgataccacaagccgacccgcgactacatggccaaaaagacccgcgagggcaaaggcaagctcgagatcatccgctgcgtcaaacggttcatcgcccgcgaggcataccgggcgctcatcagcatacgcaacggcgaggtcggacgcgggaccccggccgaacgcggcgccaagctgcgcgaactacgcgtcagccggaacatcacccagcaacagatcggcgaggcgctctgcgtgccctcgagccgcatcagcgagatcgaacgcggcgcacgcgaccttcccgaactcgagcaacgggccatccagtggatacactcgacaaccaacccaaaacaacacacccaaacgcttgacaatgtataggagcatctaaactcaccaaggtcgcccagctcatgggcagcatggccgaaggccgtcacttctccatgtacgcattcgacgaaactgctgaaaagaccattagtgatgcaggctttactgcacagactccgagcagtgaagagcatccgcagatgggagtgtatgtgactgagcagaatccgtcaaagatgggatggtatattcatcgtacttcgaaggtgactcgttccacctgtggtaatgatggttcccagacctatcatgtggaatataagatgacaaatacacttgagaacagccagattggtgctctaacgagctatattcttggatccggcggacaaggtgtggaaaaaactttgatttatgcgcccaccgggggctctatctcaaatcttaagaccagtggtggttcagtgacggggagtcgtcaagaaacactgaatggtaaaaccgtgtatgcgagcatcgccacgatagcgcccggcgaatccgtcacctattccttcgacgtggccacatccaccaaggctgtctccggcctcaccatcgaccaaactcctatgggctggaccgattccggcgtcaccaccgacaccgccgtctgctccatcaacaagcagtaaaagttccctctgacgaggacgtcagccacgggctctgagggagagacaaaagaagggcgtcagcaagaagctgacgccctctcaacatttcaacattcccaaagaaaactcagtacgatccagtccccttaaacactgccaccacagtcttcaacagaatcacgatgtctcccgtaatagaccagtcctgaatatacgacacatccgcatactctgactgttcctgagtcaaatcgctgcgtccggaaatctgccacggtccagtaataccaggcttaaccagcagtctcgtggaatacagcatgtcatatcgcgcgacttcttcaggcagcggcgggcgaggcccaaccaagctcatatcgcccttgaacacgttaaagaactgcgggaactcatccagtgatgttttacgaataaagtgaccgatcttagtcacgcgtggatcgtccttgagcttgaagataaaacgatcctcaatgccgcgttccttagccagtttcgccttgatctcgtcggcatcagtgcgcatggaacggaacttgtacatggtaaacggcttgccgtaaatgccgatgcgcgtctgcgaatagaacacagggccgccgtcttcccgcttgaccttgtatgccacccatagcatgatgggcgagctcaagataatggcgataccggaaagcacgatatcgcacacacgcttgaggatgcgggtaacggttgagtactgcgtcagtcgtgcagtgactactggcatcgtcggatcgttgcggaaatgcaggtcagcgccgctcaaatcagccacagaggtagtgagggccaattcaatgcccatggattccacggccagggacaatgtacgcatggtctcagaatcacgggtaagtacatcagctaccaatacggtacgtgccttcatacgcttcgcggtttgcggcaaatgcgagttgagtggcaacaccttcagtcgtgcctcagcatcgttggcaggagtgaagggcaccgacaccaaatgctgcgccgaatccgggtcatcctcgttcttgactgaagccactgggcacaccgcaattggcgcgtagccgaggccacggcactggcgcaattgttcgaccgtccggtggataccttccggagacccaataaccacagtcgggtagttgaattcgccattcatgcggttgcggtgcagcgcgcggcgcataatccaacgctcgataataaccaataccagtgaaaccagcggaatgaacacattcaacgaccggggaagattgaggtggaacaggtaccccaacgtgcacagcataatgaaatcgatgaacgcagcgttcaacagcttggcgtacagggcatagccctcacccatggtgtgccgttcataggagcgtgcggaatacagactgatgagccacgatacgcaggtcaacagcaggaagctaaaaacgccgtattcgccggggccaatgctctgcacataggtataagcgaaaggtcggagcaggaacacgatgtacgtggccacaatggtcatcagcagatcaagcacgaccaaggtcgtgttatagagatatcgccacttcggcacagaatggcccatcaatggacgtatgttcgtggtgtcgttatgtgtggagctgccgtccggtgtagaggagaagtaggtgccgtcaaagaatgtcggcgcaatgtcacattcggcaacgggggagaacgaagccaaggcccggctcccgctcgcccgtactttgggcattgccatggtcgcggtgcttgttgcctgcgactctgctgctgggcctctgtccttcggcatgatactgaattcttcctccatcgttccccaaaaaccgcaagaaacattcattctctcgcccacccta

SEQ ID NO: 3148 - DNA, 9066 bp, Unknown
  R53_2m  MAG No. k141_52
cggcgccctgatcatgggcgtgctcaaccagggcctgtccatcatgggcgtggacgccgcctgggtcaagaccatcaagggcctcgtcgtcatcgccgccgtcgcctacgacctgctctccaagaaaaagaaaggctgagctaaacctggcctccgggcccgcccggtggccacggggatggacctgagttccattcctcctccgaaagggacgctgttgcacgcagcgtcccttttccgtttgtcgcgatggatggatcccggtgtacgttcttcgcgaaatcagccctgacttggggtgtagacaatatgattcggcgatgtgcctcagcggatatgtacggccaatgaaaaacgggataccgatgtcgatatcccgctttcagcgaataggtaaggccagagcttacttcttcttggctttcttgacgcgcttgggagcgggagccgctttcttgggctcgaagaacggccacttgtgcaaagcccaggcatgcagcgcgggaatcttggcaacggcgaagccgatgaccagaccgattaccatggcccaggtctccagatcatggcctgcgaccagcaagccgatgaacactatggcaacgatgaagctcaccatctgcgaggcctttgactgcttggcggtcaccagatcggccttcatgggaacgagccccagaaacaggccgcaaggcgcgcatatgacgcccagcaccacgctgatcacggttgacacggttgttacttccataatgttcctttgctgaagtgggatgattcgcttgattcgggcgaacgataacgatggttactggcgattagtggttggtgatgcatcggaatccgtggttgcgacgtcggtttcgacatcgtcatcggtgtcgtcctcggatccctcggcatctgcggtgtcggtatcggtaccgtcaggcgtatccgcggcgtcatcgttctccgcatcctccttgctgggttgacgccaccacaatatcaatgcgttggcggcgcagtagacggcggcaatgccgatgcataccaaaaagatgatgtttgaggtgctgatcatcgtgccatcggccattgcttctttggcggattgccatatccaaatcacgcatgcgacggcggtcagggcgtacagcatcatacgggagcggtcgttcatagaagaatctccagacttgttcaaacgacttgattatagccgtatttgtggattgcgtgggaaacgaaaaatgccgccatgtgtgcttcagcgaggagcgcggtataacagcggctcttcgcgatgcttgccatggcggcattcatcaggaatcgttattcagttgttatctcatggattgtgctggcagcgtatcagccgcgcgccttggcgtatgcctcgtacacggcttcggtgggctcgccggtctccacgccctcgatggtgagttgccaggtcagcggttcggcctcgccggacagcacccaggcggcctgacgggcggcgccgatggccacatattcgtcggtggccggacggttcacgtccatgccgaggattgagggggccagcgtgcggatggccacggacttcgcgccaccgccaatgagcaggatgcggttgatctcggcacccagcgaacgaatcagctcgaggcagtcgcgctgggaacacagcaggccttcgacgaacgcacgagccagattctccttggtggtgttgtgcagggtcaggccagtcagcgaggcggtggcgtccggacggttcggcgtacgctcgccgtcgaagtacggcaccagggtgatgccgccggcacccggctcggccttaaaggccagttcggccagctcgtcgtagtccacgccaagggcggcgcgaccggcgtccagaatgcgagaaccgttgatggtgcaggcaagcggcagataatgaccggtgcagtcggcaaagccagaaatcgctccggtcaggtcgtacactgggttttcagcgatggccgcggccacgccggaggtgccgagcgatacggacacatcgcccacggccatgccgaggcccagcgaggccatggcattgtctccgccgccggggccgatgatgcagccgccttcaacgtccttgccggcaatggcggggtcggccttgacggcggctgcctcacgcgggcccagcacggtgggcagcacaatggcgtcggcgtgggccttggcggcttcctcgccctcggcgggggtcagcaccatggcgatgagatcgcggcggtactcgtcatgcgcggcatcgtagtaaatggtgccggaagcgtcggaacggtcggtgaacagggcttcgagatgagcgtcctcgccctcggccaccgggccatagccggcgatacgccagctcagccaatcgtgcggcagacagacggcggcaatcttcttggcgttctcaggctcgttctcggccacccacgccaccttggtcagcgtgtaggaagcgacgggggaggatccgacggccttgacccagcgctgcttgccgcgggcggtcacgtcgtccggttcgtcgccctcggccggagttgcaccgagcttgtcgatcagggcggcggcctgcggggcggaactggtgtcattccagagcatcgcatcgcgaatcacgttgccctgcttgtcgagaatgaccatgccatgctgctggccgccaaccgcgagggccgcgacatcgtcaagcccgccggcctgctcggcggccttggtgaaggcctcccaccagaattccgggttgaccgaggtgccatccgggtgcttggcctgcccgaaccgaacctgttcgccggtggcggcgtccgtaatgcggacctttgttgattgagttgacgtatctacgccggcaaccagtactttcgtcatgcattcctcctcgatgagggtcgcgcttgcaagtttcggcgcgccacaaccaataagttagacgattaaactatactgtattgcagtgtatgattgcaaacggaaacacgcgagggtgcgtatctggttcaatcgtttgacgcacaatatcattgtgcgatagacggatggggcgcctgtgcggcgttcgagactaggggtgcaaggaggtaggagcctatggcaagtctacgcaggatcaatcaggaggatctgcgcaaccataatttgtcggtggttctcgacactttgttgcgcgcggagaaacccatgagcagggccgacttggccaaggaaacgggcctgaccaaggccacgctttcgctgttggcctcgatgctgatcgatagtggcgtggtgcaggaaggcgagccggtcgtctccaccacatatgggcggcccagcacgccgctggagattcatggcgggtccatcgccggcatcggcctgcagatcaacaccgatggctacggttgcctggcgctcgatctgaacggcgatactctcggtcaggagtgggtgagtgaggatatgaccggcactgacccgtacgagatcttcgccaagctcgatgcgatgaccttcccgttggaaagccgactcaaacgacgtggctgcaaagtggtgggagctgggcttgcgctgccgggcatcgtcaccgacgacatgtggctgttggtggcccgcaatctgggttgggaaaacgtcaacctcacccggttcaacgtggcacgccggctggatgtggtggccggtaacgaagcgaagatggccgccatcgctcagattccggggtatgccaccgaacgtgcgtccttcctgaatgtggtggatcgcacggattcctttatttacctgtctaccgatatcggcatcggcggcgcggtggtgcgtgacggcgaagtggtgatgggctcgcacggattcgccggcgagatcggccatctgtccgtggcgatggatgggccgttgtgcagctgcgggcgccacgggtgccttgaggcgtttgcgggccgtcgcgccttggtcgaggctgccggcattgccgaggatggggatgccaccagcagcgaggccatcgatacattcctccagcgttggcgtgcgggggatccagacgtggccaaagtggtcgatcaggccgctgatgcgctggtttccgccatcgtttccgccgtgaatctggtggatgtcgatacggtgctgttgggcggactgtggacgcacttcggcgacgagctggccaccgtgcttgaaggccggctgcgttcggaaattctgggatacccgaatgtgaagatccgcgtgttcgtgccgccggtggcgctgcatccctcgctatatggcgcggccgaaatgggcttgcgacggttcatcgagaacccgttggggtacatgggggagaagtagcgccgggagatgccgcttgttgtgctggcgggtgcatggcatgggtgcatggcgcgtgtgccggcgttggtgggttcatgctacactttgcaagttggctgttttacgcagcgaacgtggggccgtagctcagtcggttagagcatgcgactcataatcgcccggtccagggttcaagcccctgcggccccactcttttgcgtcgcctcctgcggcggcacagcgcgtcttcacgtccagataggcgcgtacaatcccttaggttccggttcacgtcctgccataggggcatgacgacccgggtcccccgaatccataggagacgtaaaatgcagcagggtatccatcctgattaccaccccgttgaggtgacgtgctcgtgcggcaacaccttcgtgacccgcaccgctggcaaggaagatcacatgttcgttgacgtgtgctctcagtgccacccgttctacaccggcaagcagaagattcttgacaccggtggccgcgttgctcgcttcgagaagcgctacggcaagaagagcaagtagcatacttcacgccagtccgattcgattcggcatgctccggcatacccgatcgaggactggcgtttttgtattctttgacatttttttgacctgcgcaaccgaatagacaccaccgtacgaaagaaagcgtgttatggcagacgaacagttcccggcggcggcaaccgcgcttgaggagtaccagtccatcgaagaacagatggcgagccccgaagtcgtgtccaacccggacaagctgcgcaagctgggtcgtcgtcacgccgaactgggtgccatcgtgggcgcctacaaaacctggttgcaggtgaaggacgatctggcggccgctcaggagatggccggcgaggacgccgacttcgccgaggaagccaagcgtcttgaagccgaactgcccgacgccgaggagaagttgcgcaccgcgctgatcccgcgtgacccggatgatgcacgcgacaccatcatggaaatcaaggctggcaccggcggcgaagaagccgcactgttcgccggcgacctgctgcgcatgtacacccgttacgccgagaagcgtggctggagcgtgaacgtacagtccgagaacaccaccgagctcggcggcgtcaaggacgtacagattgccatccgcgccaagggcacgcccgctcccgaagacggcgtgtgggcttcgatgaagtacgagggcggcgtacaccgtgtgcagcgcatccccgtcaccgaatcgcagggccgtatccagacttccgccgccggcgtcattgtgttccccgaagccgacgaggatgacgacgagatcgagatcgatccgaaagacctgaaaatcgacatcttcatgagctccggccccggcggccagtccgtgaacaccacgtattccgccgtgcgcatgacccacctgcccaccggcatcacagtgaacatgcaggatgagaagtcgcagatccagaaccgcgccgccgcgctgcgtgtgctgaagtctcgcctgctggccatgaaacatgagcaagaggccgccgaagccgccgacatgcgtcactcgcaggtgcgttcgcttgaccgctccgaacgtattcgcacgtacaacttcccggaaaaccgtatcgtcgatcatcgcacgaattacaaggcctacaaccttgacgccgtgctcgatggcgacctgcaggccgtcatcgattccgacatccaagccgacgaagccgaccgtctggccaaccagcagtgatagccgacctgattcgtcaagccgccgcgcagttgcgcgaagccggcatcgagacgcccgaacatgatgccaaactgttgctggccgaggccgtggacgccgagctacgcgatatcgacaaggccatgctgatgggggagggcctcgattcgctggcccccgccggcgggggctgtcgcgcagcgactgggggtggtcaggccgaccccgtcaccaatatccttgccgccttccacgccatgctttcccgacgcgccaaacgcgagccgctccaatacatcaccggccacacgcctttccgctacctcgacctgcaggtgggccccggcgtctttatcccgcgcccggaaaccgaaaccgtagtccaggccggtcttgactggctgacccggcacagcatgatccacccgcgcatggtcgacctgtgcgccggttccggtgccatcggcctgtcgatagtcagcgaagtgcccggcagccaagtatgggccgtcgaattatccccgcgtaccgccgaatggacccggcgcaatctggcggtaaccgcgaaacgatacccctccatcgcctccaattaccaactggaagtcgccgacgccacgtcactggccacgctggcgcaactcgacggcaccatcgacatcgtcatcaccaacccgccctacgtgccacaaaccgacatccccgaacaaccagaagtacgcgactgggacccggaactggcgctatacggcggttcggcagacggcacgctcatccctgaacgcattattgagcgcgcctggcgcctgctcaagcccggcggcgtattggttatggagcatgatctcacccaaggcgagcgattagtggcctatgccaaggccacaggtttcgccaccgcctccaccggcaaagattggaccggccgagaccgctatctcttcgccgagaagtagccacaggcgcggggccgccgctgctactgcgcgtaatactgcagggcggaggcgtccgcgtccgtgatttcgcgaatcggacgggccggattgcccacggccacggtgtgcggcggaatatcgcgcgtcaccaccgagccggcaccgatcacgcaaccctcgccaatcgtcaccgggcaacaatccagcacagtgaagttgaagttggcgaacacgcgctcgctggcgcgcggcatacgcagttcgacgggaggcatggtggtggattcagcattgattccgctcattgaacactcctgtaatttcgcgaaagagcatggatgaactcattgtatctacggtctgtgcgtatggggcgaatcggaaaacagcagtacggcaaacgagcgatgatgaactatgcaagtcggggcgcaatggtgcaatggtagattgtgaatacacaggcgaacggaggtgtcgtgagcgtggagggcggaacaacgctgaaagtcacggatgaatcgctggcacaagcggcgcgtgtcatccgggatggtggattggtcgtcattccaacggatacggtatatggagtggcgtgcaatccgcgtaataaggccgccatcgaccgtatctaccggctcaagcgtcgcccgcgctataaggcgttgcaggtactgctcgcatccaccgaccagcttgatgaactcggtctcgacctgccgtctccactgaatcgtttgtcggcggcgttcctgcccggcgcgttctcgccgattgccgtagcccggcccgactgcacgttggagactttggccgacaccgccgatggtcgccccggcacgcagggcatccgcatccccaattcggcgctgtgcctcgcgattctcaaggccactggtccgctggccgcgtccagcgccaaccgttccggcgacgaaagcgcacagactgtccaggaggcggttgacgcgttcggcaacgaagtcgacctgtatctggacggcggtcccacccaaggccatgtctccagcaccgtcgtcaaagccgatccgtacgcgcgcgacggcatcgagatcctgcgtgaaggcgtcatcgcccaaaacgtgattcgcaaggccctccacctcaacggcgggggactcggcgcatgagaatctacctactgattgccgccatcgccggtggcgtcacctggctggtgactccgctgattcgccacgtcgccatcgaaatcggtgcggttggcgaggtgcgtgcccgagacgtgcacaccattcccacgccgcgcatgggcggccttggcatgctgatcggttttgccgtggctaccgtattcgccagtcggctgccttttctctcgggattgttcaacggcaattaccagatgtgggtgattcttgccggcggcatcatgatcagtctgctgggcatggccgacgacctgtgggatctcgattggatgctgaaactcgccggccagctgctgatttccgtattcgtggcttgggacggattgcagatcatctcactgcctttgggtggttcgctgattaccgcctcgccgagtctgtccatggcgatcaccgcattcctgatcgtcgcctcgatcaacgcggtcaatttcgttgatggcctcgatggtctggcggccggtatcgtggcgattggtggcatagcgttcgccgcctattcgtatatcatcgcccggtcttccccgagttatgcttcgttggccacgctgatcgacgtgatgatggtgggtatctgcgtgggcttcctgctgcataattggcatcccgccaaactgttcatgggcgattccggttcgatgctgctcggctatctcatcacctgcgcttcgattgtgatgaccggacgtcttgacccggcctcgattcatgccagcatctatctgccggtgttcatgccgattctgctgccggttctggtgttgttcctgcctgtgctcgacatgtgtctggcgattgtgcggcgtttggccaaaggccagtcgcccatgcatccggaccgtatgcacctgcaccatcgc

SEQ ID NO: 3149 - DNA, 4327 bp, Unknown
  R53_2m  MAG No. k141_58
ccaaggataatcacgaggattactcctcgtcgagctgggccatcacctcgtcggaagcggtccagttggagtagatgttctgcacatcgtcgaggtcatcgaggttgtcgatgagcttggacaccttgcgggcatcgtcgaggctcaactcgacctcgttcttcggctgcatgacctggtcggcggaatcgtagtcgaagccggcgtcctgcagagccttgcgcacggtgaacaggtcggacggaccggtcacaacggtgaacacctcaccgtcatcggtaacgtcctcggcaccggcttcggcggcggtttcgaacagcttgtcgaagtccacgccctcggacggcaccacgatctggcccttgcgctcgaagttgaaggacacggagccggaggtggccagggagccgttgcccttggtcagggtggaacggacttcggcggccgcacggttgcggttgtcggtaaggcattcgatgatgaggccaacgccggcaggagcgtagccctcgtagacgatgtcttcgtagttggcggcgccgtcttcagcaccggcaccacgcttgacggcacgagcgatgttgtcggccggcatggaggccttcttggccttgtagatggcatcgtacagggacgggttgccgtccgggtcgccaccgccgaggcgggcggcgatttcgatgttcttgatgagcttggcgaagagcttgccgcgcttggcgtcgatggcggccttcttgtgcttggtggtcgcccacttggaatgacctgacataatgctcctagcaattattgaaacggatgatgtcaaacgaaacgattgtaggccgttaatcagacatacccgtgatgtttccgatgattgtcttgttatgcgtaccgataagaccggtcacgcggggtgccgcacctgtgttaggcaagcggcagatgatactgcggagccagctgttcgaatgcctgggcataggcttctcgctggtcggacagcagaataggcatggtgcgtgtctgggcgacgatgggcatgaagttcgcgtcaccattccagcgaggcactacatgctgatggaggtgagcggcgactcctgcgcctgctacttcgccctgattaatgccgatattgtaaccgtgcggacgggagacggtttccatcaccttcatggcgagggtggtggccttctcgaattcgaacagttcggcatcgtcgagttcggtgatgaatccgacgtgacggtacgggcagatcatgagatgcccgacattgtatgggtagaggttcatgatggcgaacacgtgcgtgccacgccaggcgatgaggccgtcttcgtcggatttcttgggtccggcgcagaacgggcattccttcgtcttgggcttggttgggcgatcctcgctgttgcgcagcacataggtcatgcgctgcggagtccacagtcgttcgaccgtgtcctcctgaggcggaaagtccgccggattatcgacacgcacgtcagtcattttcgcaccctttcttggctcccctctctgaggggagctgtccgtgaaacggactgaggggagtgcgagccatgcaggactcccctcagtcgcctacggagccagctcccctcagagaggggagccagtaccattcacatcactcagccacagcggcgttgaagtcgtcggcggagttcacctggacgcgcttcttgatgacggtgaggatctgctcgcgggccttgtccaccggaacgccgttgagctggctgccgtcacggaagcggaagctgaccgcgttgttgttcatgtcttcctcaccgacgatgaggatgaacggcaccttggacttggaggcgttgcgaatcttcttgccgaagcgatcgtcggagtagtcgatctcgcaacggaccatctcgtcctcaagggacttgacgaaaccggccagatgcggggcgaactcgtcggcaaccggcacgccgagcacctgcacgggggccagccacgccgggaaggcgcctgcgtagtgctcgagcaacacggcgaagaagcgttcgatggagccgaacagggcgcggtgaatcatcaccggacgctggtgggtaccgtccttcgcgatgtactcgagctggaaacgctcgggcaggttgaagtcgagctggatggtcgagacctgccaggtgcggccgatggcgtcgcgggcctgcacggagatcttcgggccgtagaaggcggcgccgcacggatcgtcgacgagctcgaggttggattccttggcgacctcggcgagcgtgttggtggcctcctcccagatctcgtcggagccgacgtacttgttcgggtccttggtggacagctcgaggtagaagtcggtcaggccaaagtccttgagcaggttcagcacgaaggtcagcaggctggtgagctcgtctttcatctgctcgcgggtgcagtagatgtgggagtcgtcctgggtgaggccgcgcacgcgggtcaggccgtggatctcgccggacttctcgtagcggtacacggtgccgaactcgaagaggcgcagcggcagctcgcggtaggagcgctgacgggacttgaaaatcaggttgtgcatcgggcagttcatcggcttcaggtagtagtcggcgcccggcttggtgatgttgccgtccgcgtccttctcctcgtcgaggtgcatgggcgggtacatgccgtccttgtaccagtgcaggtggccggaggtctcgtacaggccgcccttggtgatgtgcggggtctgcacgaagctgtagtggtgcttgcggtgcatctcacgggagtagtcctccatcgcgttgatcacggcggcgcccttcgggtggaacacggccaggccggggccaatttcatccgggaaggagaacaggtccatctcggcgccgagcttgcggtgatcgcgcttggcggcctcctcgagacgggtctggtaggccttgaggtcttccttggtggcccacgcggtgccgtagatgcgctgcatggtcgggttcttctcggaaccacgccagtaggcggcggcggaacgctcgatcttgaaggccttgatgtagcgggtgttcggcaggtgcggaccgcggcacaggtccttccaaaccacattgccatcacggtctacgttgtcgtagaagctgagctccttttcggagatctcggtggcggcggccgggtcgaggtgtgcttccttgtcttcgatcagttcgatcttaaagggctggtcggcctcttccttcagagcctcttcctcagtcacggaacggcggcggaaggactgggaggacttgatgatgcgctgcatgcgcttctcgatgtccttgaggtcgtccggggtgaagggctggtcgacctggaagtcgtagtagaagccgtccttgatgacggggccgacgccgagcttggcgttcgggtagacttcctgcacggcctgggccatgacgtgggtggccgagtgacgcatgattgcgaggccgtcttcggagtcgagggcgatggggtcgacggtatcgccatcgttcagcggcgtgtacaggtcacggttctcgccgttgatcttgaccgcgatgatgttcttgtcttccgcgaacagttctacgccggtggtggttgcttccacctccttcgcttcgccgttgacggttatggagatggtagcttgcgccatgatttgtcctttgctatcggggcccacggtactaatgtgcaggcctggactggttaatcaacgtaggacacgataggttgggcgtgcgacaaataccaccagcatctgaaccaatacgaaaaaaacctcgccgaagcgaggtttcgttgtggagcggacaacgggactcgaacccgcggtctcaaccttggcaaggttgcgctttaccaactaagctatgtccgcaaaggaatccgccgtgagaagcggaatccagtgggcgatgtaggaatcgaacctacgaccccttcggtgtgaacgaagtgagctagccgctgcgccaatcgcccgaatactcggttcttcagttatatccagtcgaattgcttcgactttcgtgggcgatacaagattcgaacttgtgaccccttccgtgtcagggaagtgcgctaccactgcgccaaccgcccgggtcatatttcatcccattgaattgcttcgctggtctgagaggtgggtacgagagtcgaactcgtctatacggctttgcaggccgctgcctaaccgcttggctaacccaccgtaaggtctgtcaactcacggacctagagcggacaacgggactcgaacccgcggtctcaaccttggcaaggttgcgctttaccaactaagcta

SEQ ID NO: 3150 - DNA, 32313 bp, Unknown
  R53_2m  MAG No. k141_70
agatttgcggcggccatggcccaggagagacgcccggtcccattccgaacccggaagctaaggcctggcacggcgatggtactgcacccgacagggtgtgggagagtagcacgccgccgcaccacacgtacaggaagccccgatacccctcaaaggtaccggggcttcccgcatatcaggacacttgcgcgtggggggggggtatctcgcgtccttgggccccggcaggagtatcccgtcggggcccagtgcgttttgggcggcaacccgctgaatacccggtaagatgtctgaggtatcaacaaacaggtcaggaggtgacgcgcatggtggcgccaagccgtgatgaccgtagcgtagatgcattggtgaaatccaaggcagtacttgatgtattggcggaactgggaccaagcaccgcaaaaaccataagcgaacgtactggtgaacccgtaagctcaacgtatcgtttgctggataatctcgtcgcagtcggttgggtggaacggggcatcaatcgtggcgagtatcggcttggcatcgattgcgtacgtatcggcggccaaatcgaaagcagactggacattcagcagatcgctcgccgtaccttccgcgcccatcacggccagttcggcatctggggtctgttcgttcggaggcgattgcgcacggtgtgcatcgagacacgcacccgtgagacattgcaaagctatgcacagctggtgggcaatagcttgcctctgagcatgagcgctccctctcatgtactgacggcctggcttcccccggctcgctacgagcagctgttggaacactatgcctataccaacgagctcggcggcacattctccacgatgcgtgccacagcaatgggacaggcttgtcatatacgcgaatgcggcttcacctatgacgtcggccagaccatggccggctccgtgactatcagcgtaccggtattcaatcacgccggagagattcaagcggcaatcgccctgagtggcctttcccgctccttggaacctgagctggcctgtctggtagatgggcaaccggcaacggcatcggttcaagacatggtgcgattggtgcggactgccggccgtgaggtgtcgcgaggccttggatacagtggtgatcatcttggcctgaacagttgaatatgatgagtcagggataagtcaggggaaggaacgtcgacgatggcggaagacaaacgtgaaccgacccgcgctttagacaaggcgagtcgtgtgatggacgcattggcggcggagaatggcctgtcgccggcagatatcgccgacgcctgtgatatcccgcgatcctccgtataccgcgtgctggatggactggtcgatgtggggtgggccgtaacggatacggatggtaactactcattatcactggactggctgcgattggctgatgccgctcgcacgtctcgtaccgaatggcagcctgcgattgcggtcatgcatgccatcaccgcgcaaaccggcatgacctcattcctcagtgtggtctccggcactgaattggtatgcgtggaatgtgcgcaaggtcatgccatcgattcgctgatcctgcgcccgggccgcgtgctgcctctgcatgctggcgcggccggtcgcgtggccttggcgtatttcgaggatgccgatgtcgaacgctatcttgcaggagtgccgtttccggcatataacgagaacacgctggtcagtgtggaacagttgcgcgaggatattcgcttgactcgcgaacgtggatatgcactgtcggatgaggatgtgacgttgggtgtcggtgccgtcggtgtaccgattgtggacaacgagtccggtcgcgtgatcgccagcctgtccgccggtggattcgtggacgaagtgttagccactcaagaatccttggccgcgttactgcgcgatggcgtacgcgaaattcaggcagcctgattcggcccgctaggctgtcgggctggacggttatgtccggtcagctatggcctttgccggctacggttctgctggttatgcttctgcccgactacgctgcggtccgttacgcttcggccacacgacccaacgcgatggcggtgatcagcacgtacgcctcgcgcgggtcggtggcatcccagccggtggattcggcggcgcgcttcaaacggtagcggatcgtattgggatgtacgttgagctccttggccgtggtctcgagcgaaccgccgaacttcaggaatgtggagacggtgagcagcgtcggatcatccgggcctgctgctgtcaggcttccgtagaccacgcggaccagttcgtcacgggcgtccgcgtcgccgatcaacgcacgttcgggcagggcgtcgtcggtgcgtaacgggcgcggcaatggctgcacggtggcggccagggccggcgcggcctgaagacagtagagcgtggcctgaatcgaacgcatcgcgccatcggcaccggtgcgctgtggacccaaggcgattggccgatcggcggcgaacgacggggcgatggtattgcagatgatttccggcgtggccgcaccgaccggacgaatcaacgccactacggcggtgctgttgccgatcgggcgcttggcggtcagacacacaccgccgaaatcggccacgattttctcgatttccttggccgtacgtgcggcggaccgggcagggtatccggcgatggtgtaacaatcgaagtcatgctcgaaaccgaggatggtgaacagggactccactcgttcgtcggccagatgattgaacaggcactcgaacagcacggtgcgtacgcggttggtcgcggtgatgccgggtgcggccgaatcggatgaatcgggcgcacccggcataccggatgcaccggacgaatcggcaacgtcggcagcaagaagttcgagaaaatctgacatagtcactagtgtagcgtcgctgattggcgttgcctttcagccaaagactctcgccaatacgtcagcaccacgaatccgaatacaaacgcaaccggcaacatgtgccgctcgaaattattggccggcgcggtaatcatcacgcccatcagcagtagcagcggaatatgggtcatgagggtgagccaacgtcggcgaatcacctcggccgcgccgatcagcaatgtcatcaccacgtagaaattgccgtgcgtaggccagccgagcacgggaatactgccccatacgcgagtgaagccggcgatgtgctcacgccagtcatggttgtaatccttgatccatgtggagtttttctgcacgtaatcgctggccacgtaataatccatcgatacgtacggctgatcgttcacattgaagtatccgaagcatttggccagcaacgcatccagcgcgatgattggattgtccttgacgatttcgaaccatgccttgttgaaattggtcatatcctcgggcgtcaccgtgcgccacttgtagctgaccttcttggcctgaataccggaggatttcaccgggtcggcatcctgctgggagtaagcgtcggccatctgatcgagattgaagacgggcgcgaggttctttttggcttcgtctgaaataccgtccggattgcgctgagccacgcgggcgatcatttgcagctgtacgccgcggctttcgattggatcgccgccgatgatcgcaccagaggagatggcgaaggagatgccgccgtgaatcagtacggtggggatgagcagcgccacgacgtaagtcgcccagcgtttgcggtcggcgatcagagccagcacgatttgcagagcgatgatgtaccacgcatatttcgcggaaatcagcatcaccgacgtggccaggatgaaggcgatgaagctgtggcacggcaagtggacgggcgtggcgatggcaggggtctgaggatgtttgcgggtgccggcggggtgccaggtctggacgagttcataccagacgctgaaccaccagacgaacgagaacgcgaacagcggcgatttggtgatggagatagtggaaaacacggccagcgggcagaccatgaagaacagcagaatcaggaatctggccaatcctccggcctgtgggggaacggcggaatccgttgccgtttttcctatccaaggccggttcaggaatcgattggcggcggcagcgcagcagaacacggcgaacagcgtctgcagggcagccaacgtcacgatgccggcatcgtttgagccggtcagatgcctcgcaaacgtgactatcgcgccatagaacacagtgagtaccacattgtgctggtcggtcagatacgtgggatcggacggccacatgtagtgcgcggtggggtagatgtccatcggcacgaaggagaagaagccgatatagggctgtttcaggccggtccactggttccaggcccagctgaattcgcggatctgtgagcggaggtccgcgccgaatgcggccagcagagtggtcggcacccagagccagccgacaaaaaacaccagcataagcttccagaaccggttcgtgccgcgtgtgatccagcggtccagaacagtgacggtggacatgacgatagcgcgaacggtacgacgggtcttggctggttggctggcctgctgatcggcggcgggccgtgatgtttcgctattccgctgatgttgacgtagtcgctcgccgatagccctcggcagtatgcgctggcctgctgcgaatcgcaccatcagcgtgatgattccgagatatatcaggaacgacacgacgaatattgcggtattggcccagttccaatgggcgagggtgccgttctcctcgtcccggtacagcgggccgaccgccgagcacagtgcaagccacaggcaggccagcacggccagtgtccagcgcgcggcagcgcccacgcgcgcaagatgcgggtgggactggcggctggatacggcggcaagcttcgcggtggctggtgacgtcatgacaatatatggtagccgcacaggtcaacggttgatattcgatgtctgccgggcatcgccattgttcgcaagccaatacgacggccgggtgcatgcgtgggctcggcgaatgcggaatttccgaagttgtgaacgctaacacgggctgtccggcccaaaatggttgattttgtgcgcttttccgtggaatatcgcgggcaaaaaacggcgcaaccgaggtaacgtagtgtccatgatgattgcattgaaagctgcaacgccgcagctacccagaactacagccgtcgcggatcatgtggtcgccgtggacgaaaccgattcgaccaacgcgctggccgcgcagatgatcggcgacgggtcgttgacgctgcccgaccaccaggatggcgaactggcgatggccgtggtggccgccgaccggcagaccgccggccgtggccgcaatggtcacaagtggatcagtcagcccggccgttgctcgacgatgtcctatgccgtgcgcattccgcgcgcgatcgccaccgacgaatccgtcaatggctggctgcagatgatcgccggactggtcacgctggaagccctgaacggcatgatcgaggaatacggtgccgcgccgaaccagccggactgcttgctggaactcaaatggccgaacgacgtgttctgccacgggctcaagctgggcgggctgctctcggaactggtgattccgccgtcgtccggtactgatgctgatgccgatgacgacgtcgtcatcgtgttcggcgtaggcctgaatctggcgctgggtgcctgttggctgcccacgccgcagtcgacttcgctgcagctgcatgtcacgggcttgccgtcgtttggcgagatgcgcgatgcggtggccgaacgtcaggtcgagggcttccgtgaacgactggcgaagttcatcgccgacccgaagggccaggccgagtcgttgcgcgaggaaatgaaggcggtgtgctgggcgcgcggccgtcaggtcgaggcgcatttcacggacggcaccacgctgaccggcgaagccatcggcctcaacgaagacgcctcactgatcctgagaacacaagacggcacggaccatacggtccgcaccgccgatgtgggagtgctgtaatagccggccagtagctggctagtagctcaggtcagcgaccgagcttggacaggccggcggcggccagagaggccaccacggccttgatggcgtcgccgacgacgaagcccatggaggccagggccacggcggcgagcggcgcaccggtcaacgcggactggatgatgaagccgaaggcgtacaccaccacgacgccgccgaccagcgcggccagcaggtaacggcccgcggtgcgcgcggcggccgcgaaggacgaagtgtcggacttgccgcgcagcagggcgatgaccaccacacccggcaggaagccgaagaggaagccggcgctcgggccgaccagggccagcgtggaggtgccgccggcgaacaccggcaggccgaccgcaccggccgccagataggtggcgacggcggcaccggcctgacgccacggcagcatgagaccggcgagcatcaccacgaacgtctgcagcgtgatcggcaccggcgtgcccggaatcggaatctcgccggcggccgcggacagccacatcagcacggcgaacagcgccggcttccaggatgcggcgacgatacgacgggcgagcggcgtggtggccgctgcggatgcggtggtgtgtgaagtctgcatatcaataacccctatgttgtgtgatatcgccgtgaacggcgggcggtatgcgatggatgaggggaggttccggcgggccgtgcggtatccccgacagcccgaaccgtccatatggtggacggtcccaaatgaatccggccctgtgcgggcgaatcgtgcggcgatggaccgatgccggtccggtcgccttccgttcgcccgcagatgagccttcccccgaacttacggttgccatcgtagaggtgttcgatttcgtgcggtttcgtaccaacttacaaaattgtcgatttcgatttgtcataagttgacgaacgcaaccgtaacgtcaacttcttgaaccggcgcgcaaggatgtgcaatcggcggatttgcaacgtttttgatagccggcgccaacggttacgttgccggaacctacgcgcgcgtttgttcgtagcctacaaaagggcgtgaaagcttttgtgcgaacgcggcttgccctctcctctatatggagagcacaatttgacactatggctcatactgtcaaaaaactgctgattgcgaaccgaggtgagatcgctctgcgcgtggtgcgcacggccaaggagatgggtatctccaccgtggccgtctactccgaacaagaccgcaatagccgctatgtggacatggccgacgaggcatacctgctctccggcgacacctacaaggacacgtacctcaacgaggatctgctgatcgacatcctgcgcaaaaccggtgcggacgccgtgcaccccggctacggattcctttccgaagtgccgagcttcgcgcagaaggtcgaggatgccggtgccatctgggtgggtccgcaccacaccgcgctggtggatttgggcgacaagatcaccgcccgccgagtggccttgcgcgccaaagtgccgccggtgcctggcctgtccgaaccggtgaccgacgtgcgaacgctgctcgacttcgcacacacccacggctacccgatcatgatgaagcgcactgatggcggtggcggccacggcatcaccgtggtgcatgacgacgaggagctgcgccgcttctacatgaaccacgacgcgctgcaaggcggcgatctgaaggaatacttcatcgagaagttcgtggacaaggcacgccacgtcgagacccagtccgggcgcgactcgcacggcaacttcaccgtgtactccacccgtgactgctcgctgcagcgccgcaaccagaaactcgtggaagaggcgcccgcgcccttcctgtccgaggaaatcgtcagcacgctggaggaatactcccgccgcctgttcaccacggtcggctacgtgggcctgggcacctgcgaattcatggtgaccccgaacggcaaagtgtacttcctggaagtcaacccgcgtctgcaggtggagcacaccgtctccgaagaggtcagcggcctcgacctggtgcgcgaacagctcaatatcgccgccggtggcgagctcacccgcgcccccgaaccgcgcggccacagcttcgaactgcgcatcaccagcgaagacccggccaccaacctgacccccggctccggcaccttggagaagatccagtggccggccggccccggcgtgcgcatcgataccggtgtggaacagggcgacaccatctccccgaagttcgattcgatgatgggcaaggtcatcgtcactgcccagaaccgtctcgatgccgtggcccgtgtgcgccgcgtgctcgacgagctcgtgatcgaaggcgtgcccacgccgattccgctgttcaaggagatcttccgcaacgacgacttcaccgccgagcatggccatccgttcgccgtgtccaccaagtggctggagcgcacgtacctgaaccgcacaccggcttccgccgcctccggccagccggcctccttggccaccgccccgggtgccgctgccccggccgcgcccgacaagtccaagtcggagacgttcgtcatcgagatgaacaaccgccgcgtcaagctcaccgtgccactcgacatcgtggagaacatcaccggctcggctcgcgcccgcggtgccaagcgccccacccagccgttgcgcggcgcaggcttgcacaacgtggcctccggtgccgccacggccaacgacggtgccaaatccggcgtcatcgcctccccgatgcaggccgtggtcacgcgcatcaacgtgtccgaaggccagcaagtggccaagggcgaccttctggtggtgctcgaatccatgaagatggagaactacgtgtacgcgccggccgccggcgaagtgaagaagattttcgttggcccggccgatggcgtggaggctggcgacacgctggtcacgctggacgtgaacgccggcaaggccaaggccgccgacgccaagaaggagggcggcaatgactgacatcatggattcgccggccgtgaaggccgcggctgcggcctcggccgccaacgccgcccagccctcggcccaccagccgctgcgcaccgccgtggtcaaggccgccgaactggcccgcgccgccgaagagcgcgcccgcgacaagcagcacgccaaaggcaagaaaaccgcgcgcgaacgcctcgacctgctcttcgacaccggcacgttcgaggagatcggccgcttccagggcggcaacatcgccggcggcaacgccggtgcagctgtcatcaccggcttcggccaggtctacggccgcaaagtggccgtctacgcccaggacttctccgtcaagggcggcaccctcggcaccgccgaaggcgagaagatctgccgactgatggacatggctatcgacctcaaagtgccgatcgtggccatcgtggactccggcggcgcccgcatacaggagggcgtggccgctctgacccagtacggccgcatcttccgcaagacttgcgaggccagcggcttcgtgccccagctgagcctgattctcggcccctgcgccggcggtgccgtctactgcccggctctgacggacctcatcatcatgacccgtgagaactcgaacatgttcgtcaccgggccggacgtggtcaaggcctcgaccggcgagaccatctccatggccgaccttggtggcggcgaagtgcataaccgggtgtccggcgtggcccactacctcggcgaggacgaatccgacgccatcgactatgcgcgcaccgtgctcgcctacctgccgtccaacagcgaaagcaagccgccggtctacgcctacgccgtcacccgcgccgaacgcgagaccgccaagcgactcgccaccatcgtgcccgccaacgaacgtcagccctacgacatgctcgaagtgattcgttgcatcgtcgattacggcgaattcgtgcaggtgcaggaactgttcggcgcctccgcgctcgtcggcttcgcctgcatcgacggcaagccggtcggcatcgtggcgaaccagccgaacgtgctcgccggcatcctggacgtcgactcgtccgagaaggtcgcccgattcgtacgcctgtgcgacgcgttcaacctgcccgtggtcaccctcgtggatgtgcccggctacaagcccggctccgaccaggaacacgccggcatcatccgccgcggcgccaaggtgatctacgcctacgccaacgcgcaagtgccgatggtgaccgtggtgttgcgcaaggcgttcggcggcgcgtacatcgtgatgggatccaaggccatcggcgcggacctgaacttcgcatggccatcctcccagatcgcggtgctcggcgcggccggcgcggtgaacatcatccaccgccacgacctggccaaggccaaagcctccgggcaggacgtcgatgcgctgcgggccaagtacatcaaggagtacgagaccagcaccgtcaacgcgaacctgtcgctggaaatcgggcagatcgacggcatgatcgaccccgaacagacccgtgaggtgatcgtcgaatcgctggccacgctcgccaccaagcggcgcgtcaagcgcaccaccaaacaccacggcaaccagcccctctgatttctgaagacatcaaccaaacacaagtaaggaaagcaatgaccaccttcttcctcaatcgcctggccaccgagccccatgcgctcgccttcgccggccagtccaccccgtggccggtagccctggcagaccagaccaccgatcccagccttgacgaggccctgcgcggccacatcgccgcagccaaccgactgctcaccccggtcgccgccgacctgctgaccaccaccggacgtccggtcgacctgttcggcttcactccgaacccggcccgcctcggcgccgcagccgacgccaccgcgtccgtggaaggcgtggcactgacccagctcggcgccctgctcgacctcgaacaccttggctacagcgtggcccaggccaagccgctcgccgtgctcggccactcccagggcgtgctcgccgtgcacatggcccgcgccatcgaggccgccggctccatcgaggccgccggcaagaccctcgacgagattctggccgtcgccgccctgatcggtgcagccggcactcgccgcgtgcgcgaactgggcctgaaccccaagtatggcgaagccagtccgatgctctccgtcaagggcgccacccgcgaacaggttgaggctctggtcaagcgcgtgaacaacgcccgaggcccgatctccatcgccgtcaccaactccgacaaccaccacgtgctttccggctacccggaggacctgtctgccttcgccctcgaagccgagcgcgaacaccagcatcaggccaagctgcgcgagcagaagctccacggcggcaccgtgttcaacccgaccctcgaatacctcgaagtcaccctgcccttccactttccgctcatggccgacgccgtcgagcagaccgtggcctgggccggcgcctgcggcttcgaccagaagcgcacccgtgcgcttgccgaggaagtgctgctcaaccatgtggactggaacgcccgcgtcaaggcgctgttcgacgccgccgacccggccaagctgtggattgtggacctcggccccggcaacacgctcggcaagctgatcggcaatgtggtgcagggcaccggcatcggcgtggtcgaagccaccacgctgtccgaacgctccacgctctccacgctggaaggcgagcctgagcgcacccagaactggaaggcgttcgccccgcgcgtcatcaacaccccggccggcgccaagctggtcaccaagttctccaagctcaccggcaagccgccggtactgctgcccggcatgacccccaccaccgtggaaccggaaatcgtggccgccgcggccaacgccggctactgggccgagctcgccggcggcggccaggtgaccgccgaagtgttcgaccgccacatcgccgccctcgaagacgagctggaggaaggccgcacggtcgaattcaacgcgatgttcatggaccgttacctgtggaacctgcagttcggctcctcccgcatcgtgcccaagaagcgtgcttccggcgcgccgatcgacggcgtggtcgtctccgccggcatccccgagctggacgaagccgtggccctgatcgagtcgctgcaggcggacggtctgccgtacgtgagtttcaagcccggcaccgtggaccagattcgccaggtcgtgcgcatcgccaaggccgtgtcccccaccaccatcatggttcaggtcgagggcggtgaagccggcggccaccacagctgggaagcgctggacgacctgcttgccgccacctacgccgaagtgcgcgcctgcgacaacctcgtgctggtcgccggcggcggcatcggcacccccgaacgcgcggccgactacatttccggccagtgggcccacgcctacggcctgcccgacatgccggtcgacggcgtgcttatcggtaccgccgcgatgaccgccaaggaggctcacaccagccccgaagtcaagcagctgctcgtcaagacgcccggtattccggccgacgccaagtccgacgacgtgttcgccccgcaggccgcccactgggtgccgtccggcaagtccgtcggtggcatgtcctccggcctgagccacctgcacgccgacatttacgagctcgagaacgactccgccgaatgcggccgtctgctcgtgcgcgtcatgaagcaccccgaagagctcgactcccgccgcaaggaaatcatcgaagccctgaacaagaccgccaagccttacttcggcgacctggcctccatgacctaccttgagtgggcgcagcgcttcgccgaactcgccttcccgtgggtcgacccgacttacgccgaccgcttccagcacctgctgcagcgcatcgaagcccgtgtgaacgacacggactccggcgaattcacctccaagttgttcgccgctgatggcgtttctgctgaagaggcagctgccgctggcctgctgacccacgacgacattctcgccgacccggcccccgcgctcgaaaagctcgcactggcctacccgcagaccgccgaactcaaggtggtcccgaccgacgtggcttggttcccggtgctcgtgcgcgaataccccaagcccatgccgttcgtacccgtcatcgacaacgacctgctgcgttggtggggtcaggaccagctctggcagtccgaagaccagcgctactccgccgattccgtgcgtgccatccccggcccgatctccgttgccggcatcactaccatcgacgagccgatcgccgacatcctcggccgcttcgaaaccgccgccatcaagcgcgtgcaggacgaacagcaagccgccgatgccgctgagaacgacgatttcgccgcacttggcgaggccaccagcgccgaagacttcatccgcaagtccccgaacatctcctgggtcggccacatcaccgacaacccggcctacggcaccgccctgggcgaccagtactacgagatccgcgcgtttgacgccacggccggcaagtacgatctggacatccacctcgacacctactgggacaacgacccggacggcggcacctccaagcacgccgtgcgcgatatcgtcatcccgctcatcgtggaaggcaccgagcctggccgtgtgccggtcgtggaccgcgaacgcctgattccggacgtctacgcgatgctcgccgccacagcaggcatcggcaacaccgccatcaccggcgacaagctcaccgagatgccgaagcttgacgacaagacctctgacgagcgtccgttcggtaccgcaaccgcaacctacaccctatccgccaacctcggcttcgaccacgaagcggccactggcgccgctctgccgaccaccctgcagcccagccgcatcgcccccgatgcgctggtcggccctgcctggccggcaatctacacggcgctcggctccgtgtacgtcaagggctacccggtgattgaaggcctgctcaacgccgtccacctcgaccacctcatcgaacttgaggtgaacgaggaggacctgctcaagcacaccggcgaaaccatcaccctgaagtcttgggccgaggattacttcgagtccgcctccggccgcgtggtcaccatccacgtgacccacaccgccgccgacggcacgccgcttgcccgcgaaatcgagcgtttcgcgatccgcggccgcgtctactccgatgctttgcctgcagacgcccccgagtatggtggtgccctcctgaataaggaagcggatggctccgtcgccggacagtccactggactgtccgcctcctcgcgcggcctgcaagtagtgcaggccactccgcgccgtctgctgcgccgcgtgaaggtcgtcgccccacacgacatgaccgccttcgcccgcacttccggcgacttcaacccgatccacacctccactcgtggcgctcgcatctccggcctggccgccccgctcgtgcacggcatgtggctgtccgccaccgcccagcacgccgtgcaggcgaccgacgagaagggtgcccactacgagattgccggctggacctacaacatgtacggcatggtccagcttgacgacaccgtcgaaatctccgtcgagcgcgtcggcaaagtgcgccacggcggcatgaccctcgaagtcacctgccgtatcgacggccagctcgtctcccgcggcaccgcactggtccgcgcaccgcgcgccgctttcgtctaccccggccagggcatccagaagcagggcatggttctggacgagcgcgccaagtccgccgccgcccgcgacgtgtgggagcgcgccgacaagctcacccgctccaagctcggcttctcgatcctgggcctcgtgcgtgacaacccgaaggaactcaccgccaacggcgtgacctaccgtcaccccgaaggcctgctcaacctgacgcagttcacgcaggtggcgctcgcgacggttgcttttgcccagaccgcccgtctgcgcgaagccggcgccgacatctggcccgcctacttcgccggccactcgctcggcgaatacaacgcgttgtccgcgttcgccgacgtgattccgctggaaaccgtgctggagctcgtgttccaccgtggttccaccatgcaccacctcatcgagcgtgacgcacagggtcgctccaactaccgcatgggtgccctgcgcccgaaccagttcggtgtggacgacgcgcacgtcaaggaatatgtggaatccgtggccaaggcgtccggcgaattcctggagatcgtgaactacaacctcgccggccagcagtacgccatcgccggtacgatcgccggactcaaggccctgaaggccgattccgcccgccgcgtggccgcattcggtggcaagcccgcgttcatgctggtgcccggcatcgatgtgccgttccactccacgctactgcgcaagggcgtgccggaattccgcgacaagctcgacgcgctgcttcctgcttacatcgactaccgtggccgtctggtggaccgctacatcccgaacctggtggccaccccgttcgagatgaccaaggaattcgccgccaagatccttgaagccgtgccgtccgaacgcatcaaggccgcgctcgacgacccggccgtgtgggattcctacgccgccgacgaccagaagctcggccgtctgctcttgaccgaactgctctcctggcagttcgcctccccggtgcgttggattgaaacccaggcgctgctcttcggtcagcgcgaacagggcggcctcggcgtggaagaatacgtcgaagtcggcctcggcaacgccccgaccctggccaacctcggtaccaagaccctgcgtctgcccgagttcgccggcaacgatacggtcgtctacaacgtcggccgcgatgaaggccgcgtctacatgaccgacaccgattcgctggttcccgacgacgagccggaagaggctgcggcctcggccccggtcgaaaccgctcctgccggtggttccgccgtcgccaagctcggatcgggtgctgctccggcaaatgccgcgactgaggctgctcagacaacggatggctctgtcgccggacagtccactggactgtccgactcctcgcgcggcctgcaatcagggcaggccgcggctggcacaccgtccggtgccgccgtcgccgacctccccttcaaggcttccgatgccatcggcgtactcatggcctactccgccaaggtgcgcctcgaccagatcggcagcaacgacaccaccgacaccctgaccaacggcgtttcttctcgccgcaaccagctgctcatggacatcagctccgagctgggagtcgccagcgtggacggtgccgccgaggcgacgctcgacaagctcgcccaaatcgtcaacaaggccgccccgaactacaagccgttcggtgccgtgctctccgaggcgctgcgcgatcgtctgcgctcgctgttcggtgccgccggcgtcaagcagcagtacatccgcgaccgtgtgaccaacgtgtggcagctcggcgaaggctgggtggccagcgtgcttgccgccctgctgctcgatacccgcgagggctccagctcccgtggcggtgacctggccaagctgccgaccgttgccgtgcagaacaagccggaagccgacaagctgatcgatgcggccgttgaggtcgtcgcccagcttaagggcgttgccgtggctctgccgtccgccggtggtgccgctggcggtgctgtggtcgattccgccgcgctcgacgccttcgccgagaaggtcaccggttccaacggcgtgcttgccgccaccgcccgcttcgtgctgaacgagctcggcgtggccgctccggctccggaagaatccgaggacgagaacgccgccgtcgtggccgcggtcgaagccgaacttggctccgactggcccaagcaggtcgctccgcgcttcgacgccaacaaggccatcctcttcgatgatcggtgggcctccgcccgtgaagacctcgcccgcgcctactacggcaacgatcccgccgccctgaacggcagcttcatcggccttggcaagaccatcgccgccgaagcccagtggttcgccaacaagtcggagagcgaaaaactcaaggccgccttccagaaggccggctccgaggccctcgaacaggttgcgtccaacaagaacgcctcccgttactcgaacgacatcgccatcgtcaccggcgtgagcccgaactcgatcgctgctcaggtggtcgaaggcctgctcgcgggcggcgccaccgtggtggccacttcgcatagcttcaagccgtccatcaaggcttgggccaagcaggcctaccgcgagcacgccactggcaacgccaagctgtggctggttccggccaatctctccagctaccgcgatgtcgacgcgctggtcgactgggtggggcacgagcagaagaagacctccggtgctaccaccacgattctgaagcccgcgtgggaaccgaccctgttcttcccgttcgcagctccgccggtccatggcacgctcgccgactccggcgacctgttcgaatcgcaggcccgactgatgctgtggggcgtggaacgcgccatcgccggcttcagccacatcggtgccgacaccaacgtgcagcacaagctccacgtggtgctgcccggctccccgaaccgcggcgtattcggcggcgacggtgcctacggcgaagtcaagagcgcctttgacgccatcgtcaaccgtgcccgcgctgaaaaggtgtggtcgagccgcgtcaccttcgctcacccgaagatcggctgggtgcgtggcaccggcctgatgggcggtaacgacccgctggtcgccgtcgttgagcgtcacggcatccacacctactccaccgcacagattgcggccaagctgctcgacctgtgcactgccgaatcgcgcgagcaggccctcaaggccccgctcgatgtggacctgaccggtggcctcggctccgagcccatcgacatcaaggccctgcgtgccgaagccatggccgacgtcgagaaggaagctgctgcggcctcgtctcaggaaacggatggctccgtcgccggacagtccactggactgtccgactcctcgcgtgggcagcaaatcaaggcgctgcccaccccgatcgtcaccaagcaggcttcggtcgacctcaacgactggaccaacgtcaccgccaagccgaaagacgaaatcgtcatcgtttccgtcggtgagctgggcccgtggggctccggtcgtacgcgcacccaggccgagctcggcatccactcggacggcactgtagacctgagcgccggcgcagtgctcgaacttgcgtggaacatgggtctgttgacttgggccgacagcccgaagcccggctggtacgacaccgacggcaacctcgtgcccgaagaggacatcgccgagcgctaccacgacgaggtcgtggcccgctccggcatccgcccgttcgaggaaggcatgggcaacgactacaaggacggtgctgacgaagaagaagccgaggtcttcctcgaccacgacgtcaccttctctgtgcccacccgcgaagtcgccgccgaatacgtcaagttggacgaggctcacaccaccatcgccccggatgaggaatccggcgaatggaacgtgacccgccacgccggctcgatgatccgcgtgccgcgccgcgccaccatgacccgcacagtcggcggccagttcccgaagggcttcgacccgacccgttggggcattcccgcctcgatggtcggcgacgtcgacaagatcgccctgtggaacatcgtcaccactgtggacgcctacctgggcgccggcttcaccccggccgaaatcctcgagtccatccacccctcgctggtggcttcgacccagggcaccggctttggcggcatgatgtcgatgcgcaagctgtacctcgaccgcttcctcaaccacgagatcccgaccgacatcctgcaggaagccctgccgaacgtggtcgcggctcacgtgatgcagtcctacatcggcggttacggcaacatgatccagcccgtctccgcctgcgccaccgcggccgtctcccttgaagagggcgtcgacaagatcgccctcggcaaggccgatttcgtggtcaccggtgcgatcgacgacatcggtgtggaatccgtgatcggcttcggcaacatgaacgccaccgccaattcggaggaaatgtacggcaagggcatcgacgcgcgcttcttcagccgcgcgaacgatcgtcgccgtggcggcttcctggaatcccagggcggcggcacgatccttgtgacccgcggtgacatcgccgaaaagctcggcctgccggtcgcggccgtggtcggcttcatccactcctacgcggatggtgcccacacctcgatcccggctccgggcctcggtgccctggctgccggcctcggtggcaaggactccaagctcgtgcacgacctggctaagctcggcgtctcagccgacgacatcgccgtggtctccaagcacgacacgtccaccaacgccaacgacccgaacgaatccgagctgcacaacacgctggcccacgccatcggccgcaccgacggcaacccgctgttcgtgatctcgcagaagacgcttaccggtcacgccaagggtggtgcctgcatcttccaggtcaacggtctgacgcagctgttcaagtccggcgtgattccggcgaacgcagcgctcgattgcgtggatccgaagctccagcgcgacgaccacatggtctgggttaggaagcccctgcgcatcggcggtggcgaggacgagttcggtcgcgagaccgctggtcgcccggtcaaggccggtctggccacctcgctcggcttcggacatgtttccggcttcgtggccctggttcatccgggtgccttcgaagcggccgtggccaaggccgatggcgaggccgcgctggaagcctggcgtgagcgtgccaacgcccgcctggccgccggccagcgtcacctcgaggaaggcatgatgggtcgcgccgcgctctacgagccgatcgacaaccgtcgcttccgcgaggatcaccgtggctacgaccaccacgaggtcgaaaaggcgatgctcctcaacccggacgcccgcctcggtgccgacggctactacgaggcctgattcctctggctcccctcggttgaggggagccagtagcgcaccggatctcggctcccctcttcgaggggagctcccgcgaagcgggtgagggggtttcctggagctttctcgctggcacaaactcagtgagagaaatatgcagaacatacgaaagcccctccctcggagtgagctttctgcgttcaaagaggtacatttgcctgattgcggaatactatctgctttcaaaggggtatcgaaactctgacatcgcgagtatgagcgttgatattccaacgaccatactcgcagttttgcagtctaggtactcctttgaaagcagatagcattccgcaagaccccgaatgtacctctttgaacgcagatagatgtctggggcgctgatcacgcccctcgactgagatatgggttatgttttagcgggtgctgcgcagctcgtggacggtgatagtcccgctgagctccgtgacggtcagctcggtggtgaaatccggggcgttgacagtgtcgcaatcgaagagaatcgcgcctgcgtcttcgccgttgttgacgaacacttcggccacaccgtgatcgtagaagacctcgacccgttcgatctgcttggtggcggacacatagtcgaatctgtcagtcggtaggccggtggaggtcaggtgcacggcagcgccgtcgctgaccaatcgcagcgagacctcggccgtggctccatccggctgagtgcgtgtgcccgaaaccagtgtcgcagagaacgcggagccgagttcggggcggatatccgcgtaataagcgtgattgggcacttggaacgtattgctattgcctgctggcgttgcagtaagaacatcgcccaccaacaggtcgtagacctcttggatcgggcgagagataagccgaccatcgaccacgtgcagttcgcgtggcaggctcatcacgccattggcatagtcaggccgttcgatgcgtacgccgaaccagtcgcacaaccagccgatggcaatacgacggtccacgtcggtgccgttcaccgacgtatgacgatcgaggaaggattgcaccgcgtaatagcatgagccgaaatcgcaccaaccggtgtgctgtacgtccagacgcggagcgtcgagcgaatccgcgataacgcctgtgtaccagcgaattggctggaaacgaccggtcgaatcatgcagtttcatcatcgatccgaccgccaccgccgagccgtccagcgagaaggcatccgggcactcgtaggtataggtttcggcgagtcccgtctcgaacagcagtggaccggcatactcccatgcggccttgcctaaattggtgtcggtggcacggaacaatgccaatgcaggcgtgcgggttgggtcaggctcttgctccccggcggcggcgaacgcaccatcgccgtaccagtattcgccttccggccgcggcgtggagccggagtctcctgcggctggtgcctcgccggatggtagatttgtggccaccacaatagtgggagtgcccgcaagcgcggtaccatcgaacaacgtgttatcagctttcgggtcgcggaaatcaaggccgaaatcttcgttcgggcggcgaatcaccgtggtctccgggctgaaggacaggccgtcggtgctgatggctgtggtctgcgtttccaccacagagccggggtcgccgcggcactcccagtgacgggtcaggaagatgcgaatggcgctcgcctcatcgccgggcacgatatgcccggtctcgtccacggttacggccgaaccggagaatgccccgccgctcagcgagccgtcacggctcagatcttcttgcgggagcagcgtgatcggcagatctgtccagtgcaccaaatcgcggctgaccgcgtggccccaatgcatactgtcccactgccagccgtacgggttgaactgatagaacatgtggtagcgcccttggaaacggcacagtccattcgggtcgttcatccagtgctgggccggttcgaaatgtgcgctcggccggtgcgcggtggcgcgcgtatccggggtgatgatgcggatgcctcgatccagcagattcgcgcctccagtcaggtacgcaaagcccagcgtcaggccttcgcaacgtagtgcgtattgctcgccgggcttgattggcagggtgagtcgcatgcgacggtcggcggcagtcaggtgggcttcgatcggtggtgtgttcggatttgccggggtcaagcgcagggttgccggggcagcattggcacctccggaatattcggcaaacgcctcgaacgcggtgtagccatcggcattgatgatggtcataagaggactccttgagttttcgataccgggaattgctggatataaaggcgccggatgggcaaaaagggaaatcccacccagcacgtattgattcgccttcggccctgcaattgtgggttcgctttcagcgaggctcagtgttgccttcgcttggctttcgcctcgctcaggctgacgctacaaacagtccacaggactgtttgcttaacgcgtcagccctttactcccgaagaggcgattgagctgacgaattgcttttgaaagatcacgaacacgatgatgatcggcacggtgatcagtgaactgtatgccatgatctgaccccacgacgtggtcatctgctggaagtactgcacgccgatcatcacgggcctcaggctctcggactgcactaccatcagcggccagacgtactggttccacatgggcaggaagctcaaaatcaccacggtggcggtggccgggcccgacagcggcatcacgatacgcgagtagatgcggaaccagccggcaccgtccacgcgggcggcctcgtcgagatccttaggaatcgtctcgaaatactgcatgtacaggtacacggagaaggcgttggcgatgaacggcacgatctgcacgggcagcgtgtcgatccatccgcgcgtgaagtacaggccgaactggtccaccaccgggcgcggcagctggttgacccaccacagcagcggaatcgcgtaggtctcgaacggcaccatcaatgtggccagaatgaacgtgaagatgatcttcttgccgcgcacctgcagacgttggatggcgaaggcggccatcgagttgacgattacgccaagcaccacggtcaccagcgtgatgatcaccgagttcatgaggaaggtggaggccggcacgcgggtgaatacctgcgcgtagttgtcgagcgaaatgtgccccaccggcaggaacgccttgaacgagccgaggtccgccataatctcatcgtccggtttgaacgagctgacaaccatgaagatcagtgggaaagcgaacaggcaggcgaacaggatgcgtacgatccacccgcccacggacagccggttgtgcttgtaggcgactttcttggcttctttcgacgtgcgcttgtcgtgcgcggtttggtcggcctgcggggatgcggccatagttgttgcgttgctcatcgtcagtccctttccttacttctctcgagtcagataacgctggatgccggtgatcaccatgatgatgcagaagaacacgagtgtgatcgcggaggcgtagcccatctcctgctgctggaagccggagcgcacagcctcgaacaccacggtggtggtggcgtcgcgcgggccgccttgcgtcatcacgttgatctgagtgaacaggctcatcgcggcgatggtgatggtgatgaggatcatgttgcgcgtggagcgcaggcacggccaggtcacgttcttgaactgctcccaggcgttgcagccgtccagttcggcggcctcgtacagttcgccggggatggtctgcaggccggacagccagatcagcatgtgctggcccaccgcttgccagatggacatgacgatgatcgcgcccattgcggtgcgcgggtcgttcagccagtcgactgcctgccagtgcccgaaggtgagtttggccatgacctggttgagcatgccgtcgttctggtagatgaacatccacagcagggagacgaccaccatcgaggtgacgacgggcaggaagtagaccgtgcggaagaacacggaggagcgcacctgcttgttgatcagcacggcgagcagcaggccgagcccggcttggacgggcaccacgacgaccgcgaacacggccacgttacgcagcgcgtaccagaacgtcgggtcggagaacagtcgggtgaaattgtcgatgccgatgaaccgggtagggttcgggctgattgtgcgcgcgttggtgaatgccagtccgaaggccagaatcaccggaatgccgatgaacagcagcagtaggatggatgcgggcagaagcatcgcccagccgacggcgttctcgtggcgctgttcggcggtggacttccggcgcgtggcgacggtgccggttttgccggcgctggttccgggggtgccggttttgtcggcaccgactccggtaccggacgtaccgcgagtggttgcggttgatgttgcagtggtcatggttggtccttctcagttcttccggtagccgtcggcgccttggatgttgccgtcgatatggttgactgctttgtcgagccaggtgtccacgtcggcaccgttcatgatgtcgccgatggtcttgcggaactcggtggagatgaaattgtatgccggggtttcggggcgcattttgacgtacttcttcgaaatctcggtgaagatctgcatgtcgccgccgtcggagaactcgggcacgagcttctgtgcgccttcggtggtcgggatgttcataccggccttggctatgttggcgatgtacttgtcttgcagggagaatcggatgtagtcctgcgcggcttcaggtgcggggcaggattgggtcatgccgaccgtccacgagccgccgccggtcaccgagccgtggccgaagtcggtcatcggcataaccacgatgtcgtcgtaatccttggcgtacttctggaaagtgctcatcgaccaaatgccgccgtacagcagtccggacttattgttcacgaagtcgagcgcggtgtcggagccgcccttggacgagatgtagcccttggccacgaggtcgcgcatccagtgggcgaattccttgccttccttgccgttgagcacgccgtccgacgactggtagtccgtgcggttcaccaggtcgccgccgaaggactgcaaaatcggtgcgtaagcgtaggcataccattcgcttttgttatcggccgtgccgatttcaaacgggtaggtccattcgccgcttgccttgagcttggccaatgcgtcatccatttcggccttggtccacggctcgtcgaccgtagccacgcggacgccgagcttgtccagcaccgacttgcgggcgaacagggcgatggtggcatcgaaatagccgacggtgtacaggtcgtcgttccacgtgcccttggccgattccatcaggtcgtcggcgcgggacaacaggtccttgtcggtgagcggggcgaggatgccggcccacgcccagtacggggtgttcggctggtccacgtcgatcagacagggcaggttgttggcggatgaggcggagatgatcgagtcgttgtacgagctttgcgggaaggactgtagtttgacggtggccttcttgtctgggctggcgttgtagtcatcgatgatctgctgcacgccggcaagctcggcttcgctgcctgccgtgtgcgtccagatggtgatttcattggcgttggctttcgccgccgcgcgttccgcctcaccgcagccgcccacggtcacaaggcttgcgatggcaagcgttgcggccagagctttgacggctgagcgtcggatggtatggggcatgatgctcctccttatctcttgtttctttcttccttgaataatggggtcgaaccggttcgacatacagtcgaaaccggatcaagtaggatagatgcgtgatttttgggcaggctatcgctgggggtggggccggacccaggattgcttgatgcgcagctggcattcaatctggggtgactgctcgctcagtggcggcggctgaaccttctcgaccgggtatccggcacgaggaaagggatcgggtgcctcgccttcgatgagcgaggccagcttacctactgcccagtagcccatctcgtaatgcggcagttccacagtggaaagcggcggatccagcgcttcggccacaacctggtggttgtcgacgccaaccaccgcgatatctttgccgataatcagcccgcgacgggtggcctcggtgtagatggcccaagcgcgggtgtcgttgaagcagaagaagccgtcgacatccgggtgtttgtcgaagaacgcgggcatgcgggcggcggcgtcgctgccggtgtccatgttgatcatgagttctgggtcgaacgagatgccgtgctcggagagggcgtcgatgtagccggacactcgcccgggctgagcgaccatattgtgcatggtgcccacgtaggcgatgcgggtgcagccggcgtcgatgagatggcttgtggccttgaatccaatgctgtgctcgtcgggcacgatgctgggcgctacttcggcggcatcggtcgaatcggcgagcaccactttgcagccctgcaacgattgaggcagcatcgtcttctgattaaacatgcgtgcgtagatgaagccgtccacgccgaactgccgcagcgtgagaatttcgcgatcggagcttttggctccgctgttgatgcccacggtgagcagcagatatccgagtgtgcgggcggcgtcttgcgcgccctcaatcatgcggccggcaaacggcgtggtggccacttcgtcgctgaggaatccgatggtgcggctactgctggtgcgtagcccgctggccagacggttggtcaggtaaccgagttcggcggcgatggcgcggactcgctcggcgacatcggggctgacgcggccgatatcgcggttgttgagcaccagagagacggtggagatggaaacgccggcgcgattggcgatttgcttcattgtgaccacggttctacctccttgctggcttcattggctggttgtggttggttgttgtgaagttgtccttcattggatcgttatgttaaccacgttaaaaagtcaaacgtttgacgtcaatcgatttacgtatcggagtgtcggttggaatatcaccattttacgctgtgccaaccgttggtcaaaagtttgacttggtgttgactttcagagttcagcttgcggggtggccgagggttttcgtttgtggatgccgcgttccgtgtgaacctcgttattctggatgtgttgtaaacgtgttgaatggctgataatgggtgctatgggcacatttggtttgggtcatgacgtggttgacgtcgccgcattcgccgagcagctgtctgaatccggctcgcgcatgcgctcgctgttttccgttcgtgaggtacgtcaggcggcggatcgtgcacggctgaagaacgatgacgaggccgtccatctggccgccaaatgggcgggcaaggaggcgttcctcaaagcgtggtgcgattatcttggcaatgtcccctatccgttcacgcttgataatttcccgtggcctgaaatcgagatcttggatgattcccgtggtgtgccgcatgtgtctctgggtaagggggcggcgtcagtcttccaaactgattacgcgaattcggctgccggcgctcgctattcctctgcttgttcccctgcttccgataacgggccttatgcagtgatgcaggagcggcggaatgcgcgttcggcgcagcgctcggctctcggtgcggggttgatgccgcatatccatatttctctgagccacgatggtccgattgcttccgcggtggtgacgatttctgtggaatagcgccggtggctcggcgagtcttgggttgtgattatcgaaccggtttgatgtattgtaatacaatacgtcaaacgattgatgcgggcaacggatagagacaaaggagtttccggtggctcaaagcaaccagtcggcacaggcaggatccggactggtgcaagcgcggcgatatgttcggcatgaccatgtacaccgacctgttcgccggcgacctcaagaaacttgccgacaagattccgtacttgaaggagcagaagctcacttacctgcacttgatgccgttgattgacatgccgcacccgaacaacgacggtggctatgcggtccaggacttcgacaccgtggacccgaagctcggcaccaacgaagacctcgccgcctacttcggcacgcccgaggcccccgagtgccacatgctatacaacgtctccatcatggtcaacctgtggagcgcgctcgccagccgcgacgtgcgtctgctcaagaaccagatcgacaagctcgactcgctgcccgaaaactgctggttcgtgattctggacgcgatggacgccgacctccaaccatacgagtctcagctcacccatttgtgatttcgacggtttctagctcccctctctgaggggagctgtcgccgtaggcgactgaggggagtcctcggcaaagccgcaatccatcaactagattggctggtcctgctgcaaccacacgcgtttgccatcctcgaagaaatatgtataataactcaagtcgccaaaagcgacgcttaacgcggatgtagctcaatggtagagcctcagtcttccaaactgattacgcgggttcgattcccgtcatccgctccactgaaagaggccgcaaacccttggaattgcttggggttgcggccttcggtgttttcggtgcggaaaacatgccgatgcaagttttccgcccaagtccaccaatttccgcccgaaatgtttgacctaatgtttgacctcgaccgcacgaaaaggaagaggcctgaagcccatgacacagcagaagaacacccgccgacccaacggaagcggaagcgaatggcgcgacgacaacggagtctggcacgcgaagaagagcgccggcgtcaatccacgaaccggacgacgccgctggatcgaggcgcaggcgcagaccaagaccgccgcccgacaaaaactccagaccaagctcgacaaacttcaacgagaaggcgacctgcccctcgcagacgtcccaaccctcgacgtgtggatagaccgatggctcaacaccatcgcgcccaacgtcaaaccccgcaccctcgaaacctaccgatccgactgcaacaccatccgcagcgtcatcggcggaatgcgactcgacagaataacccccgccaccatcgacggaatgtgcgccaaactcgccaaggaacaccgaagcaaaaccgtccacaaccactatctcagactcaggcaggtgctcgacgcagcggtccgcgaacgcctcatcccatcgaacccggcgctcgccgcaacgccgccgcgctacgagtcgcaggccacccagatcctcgaacccggacagccggcccgggcggcgcaggccgcactcgaccccaagcgtcgcaaatacagccacctggcagataccgacgacgaccgcgaaatgtggagcctcatgtggaacatcatgttcgagaccggcatgagagaggccgaaagattcgccatcctgcccgaagagctcgccaccgtcgacggtgtgcacggaatccagatcatgtgggagctccaacgcttcagatccgatgcagaagtgcccaactggctccgctcccgccattacgagggatgcttctggctcgtcgaaccgaaaagcaagcagggcaaccggtttgtgcccgtcagcaaccagacgtggctcggactctgggcgctcgtcggacgcaggcaatgccagcccggccagctcatattcacgcgcgagggacacccgctcaccaacaccgtggaacgccggcgctggaaacgctctctcgaagacgcgggactgccctacgtcaccatccgaagcgcccgccacttcttctccacgcacctcgccgaagccggagccccggaagacgcgagaaaagcgatgatgggccacgcaaaaatcagcacgacggccggatacacccactggtccgccgcaagccttgcggcacttgccgacaaggctcgtcaggcggtgggggaatcggcctgattgcgattcttgcgcggccttcccccgcccgcaccacgaccgggacgagcggcgttccacgcatcgattgtctccggaagccagccgcgagtcgtgccgatcagcgcgtccggctccggcagatgataccccctcgcggccggattgctcgtgccgatgcgctcgccgacctccttgaggctgagatatcttgcggtgctcatttccggcctcccgacagatagccgaacaccccggcggccatgccgaaggttccggccgcgatggcctgaccgccgatggcgagaatgaggcacatcgcgccacatatcagcgagacgagcctgtatgcgtttgttgtgttcatgatgttccatggattagtctggggatagggagccgcagctccggatactaggactattcggaatctgcggctcttgtactaccggcgaggccttcgccgtatatgcggcggcttgggcttcggtacgggtgacggctcatcgcctttggatttcaccgccgcgatgactgcggcgattccgacaagcagggagccgatggcttctatcgctttccagacctcatccatgtctcacctccttccactgttccgtttttgtttacataataattatagctcaactaagtaagttatgcaagtcagaacggcaaagatctggatgtgcctattcgaatgttctccattactcgcacatggtgtaacaagtgcatgtaaaaccggtagaaaatcaggataatgataagacgacaaggaagcgtctggccgttgtttttgcgtcggacgccagccggaaaaagtggagatgaattttagaataaataaccagtagaattgttaactatgagtcaatttcgcgtgggagcctatatagatggctttaatctgtattacggaatgcgttcgcatatggggcgttcgacgcctgaatggcgatggcttgacatacgtggaatgctacagccgtatgcgcagtattgggatcccaacgcctctctgacggtggtctattgcaccgctcgtgtgaacgcctcttcctcgcagtcggcggcgattgaccagaatttctatctgaaagcattgcgtgcgtctggttcggtagatgaaatcgttttggggcattacgtagttcgcagcaattatgccttcatggttgataagttatcacgcagccgagtgcctcaactgctgagcgtaacggcgcagcagttcagcaggataatgccacgcggtccacagaattggcccatctcactccggaatggccatgtcggagtggatatacaacgaattgaggagaagggctccgatgtaaatgtggcttcaagactgttgcgcgacatgtacgagaacacaatcgatgcagctttcgttctgactaacgactccgatctgtcggaacccatacgcattgcgcgagaacgtatacctgttggagtgttgaatccccataaagggccgatcgcgggcagtctgaaaccattccgtaatgcgcagaacagaattggcagctggaacaaagctctctctccagccgattttaaagctcaccaactgcccgatgaagtcaacggaatggtcgacggaaaatacgtgtttgcgcgtaagccagcagaatggtgacatgctggaatacttgacgacatacgcctaccaaggtatatttaccactgtacccaccccgattgccactggcgacggggttttttcatgccgggttataggccaaaatgtgtgtccggcggtctagtcgttcgactgccattcgacccgtgtgtggaactcgttccagtcgatgccggtgccgtatcttgcggggatgccgaacgtctc

SEQ ID NO: 3151 - DNA, 59203 bp, Unknown
  R53_2m  MAG No. k141_120
atcgttcatatcaatcctcaagaagagtgccaagagcgcgcagtccatcgtcatcggacgacatcagctcgaacagatattcgccgaagccaagccccctgttgtatgcagaatcgaggacatccttagttttggacttcttcactcgtttgaacgtcgctactccgtccttactaggaacgccaaggtagattttctctggcttgagatactgaatcaggaacggggagtgacttgtcaacagcaacgaggtactgccgatgttctcgttaagaacctcaagaagctcacgcatcatgcgtgggtggatgctggtctcgatttcctcgataccgatgcagccagcagagttcgcgccggcgatgatggtattggcaacaagccatatgatgcgctttgtgcctgtggacatatgtgagatgtcgacaggttggttaagattagcgcttttaaccataagacgatacaaatcatctcgaatgtggaacggtatgttctcttccgggatgtcatctttcttcaacgcttggctcagacgctcgtggtcttcgggccgtagttcgtaggaattcaccgagatgtgctcgaactcggggaacagcgtatatatagcggattggaaaatatcataatgctcgggatcgctttgtttgagcctatacagcgctcttggcaaatccacatcattgaacatggcggttgaatcatccatcgtttcgccgaactccaacggcgtcgagtggaatcgattctccgtctcaagcgaatcgcaaattgcataggtgatatcgaagatggatcggatggcaggattgatttctatgtcttccacggcagtgaggacatcaatggcgagttgcgagtcatccaaagagatggagcggaacgaccgggtatcgtgtcccttcttgtattgtcctcgatttcgtcgtaggtagttagtccatgttccagagcgctttgcattgatttccaaagtctcgccggtgattttgcacccggagccgtcatctttgggccaagagaacgaaaagccatagcgcacaaaacgatattccccaagcgaggggtcgtcgaattcaatggaaaaacggaagtcatcgttggacagggaaggcgatagcggaatgcagttcgttgaccgcatcaagttgtttctgcgcttgttgccagactcaataaactggaaagcaaaacgaatcgcatccagaagattcgacttaccataattattcggtgagacgagagcggtaattccacctaactctatggtcgtgtacgcgaggttacggaaacctcctacgctgacgctcagcagttccatcagccctccttgcattcagacattctgacatccaatactacccggaaggccggaggcgaagccttctaaggcgattagacaggctctctacgtctatgtcctagtccgtcagtttgtggctgaggaagggtggtaggcctcgtagcaggtagatgcattggctggtgtcgaggcggccgagttcgtcgggggtgaggagttggcgggcgttcttgcggatgctgcggctccaggagccgttcatgcctttggtttcgctggtttcgatgacgtcgatggtttggtcgccgagccggtcgctgatggttttggtggtggaggcttcgttgccgccgaggaagagccagctgtcgcagttgccggcgatggtttcccagtcgtctttgtataggcttttgccttgggagacggtttgcaggatgatcgagcagctgatgccgcgcgagcggatggtggcgacgagtctcacgaagttcgggattttgccgatgttggcgaactcgtcgagcaggcagtgcacatcgcggccgagccggccaccatccgcgtggtcggctttcctgaccagagtctcgaagaggcattggtagaacacgctggccaggaagccgaacgtcgcgttggtgtcgggcagttccagatagaccacgcgcttgccttcatccacagcctccaagtggatgtcgtcgccggagaggatgcggcgcacctcgcgcacttgcaggggcgcgaggtggacgccggtggtgatgatgatgcttttcttggtttctccggcgcctttgaggaacgtgttgtattgggcgcaggcgaacgccaggccttcgagcatgtcgcgagtctgctcgtcgtagtcgtcctcgtgggcgcgcatggcggcgatttcgacgcgggtttcggcgaagagggcatcgacgatgaactcgcgttcctcgtcctgttcgctggctcccatctggtcgagcatgtcggtgacgtggttgagcgtgggttcgtcctcggtgtagtggacccatgcgatcagggcggacagcagcgccttttcggcgtcttcccagaagccgtcgccgtttttgcggtcgccggtggcgttggtcacgaggttgtcggtcaggcgcagaatcgccgactggggttcggccgggtcgatgtagcgcatggggttgaaccggtcggaacgtgcgaggtccacgaggtcgagcgcgtgcaccgtgtagccgcgcgccttcatcggagattcggtgtctcgtttgagttcgcccttggggtcggtgacggcccagttcatgtccgcgcccaggagattgggtttgacgtagtagcgggtcttgccggagccggacgagccgagcagcagcacgttgaggttgcgcagggtacgccgcgtgtcggtggagagccgttcggtgcgcgtgaaccgcagattgtgggccgggtcggggtcgatgaacggtttgatgtcgcgcgggccggcccagtgggccgagccgtgttcctcgccgttgcgcagggtgaggcgtgccgcgcgcctatacgcccatgcgaggccggccacggcgacgagcgtcagaccgcacagcatgtcggtgggatgcgtggagatgtgcgatgggtccagtaggtctagccggaatcggtcggccatgtcgagcccgctgacgccggcttccatgtcggcgcgtatccggtagccgatcttgtcgccggtccagaacaggacgagcaggccgagcaaggcggggagaatggtcttggcgtggttcatggctgggttccttggatggtggcgcgggcacgccggtcggctgtcagtgtttgcgtgggcaaatccccggccgattggccggagggcatatcggcatgatcgaggcgttggctggcacgctggcgtatgtggtcgagcgtctgcgctcgtgtcatcggagtggatacggacgacggcatgatggcgctggccgatggccgggcgtcgagcggagtgatgtgggtgatgcttccgttccaggcgatcaggcagtcggcttgtgcgcacatggccgccagcacccgcccgactggttcggtgacggagaacgcggtaatgccggccggcggcgagatgcggctggtcagggcgagttttgcgggcatgatgggggtcatgcgcctgcctccgtgtcgaggctggtggacagggcgatttcgtcggccagcacgaacgctccgttggaatcggaggcgagggtgccgtgcgccatcgtgcgcatgccttgtcgggcgggatggctcctcagccacacgatgcttggcccgtcggctttgacgcgcacgccgatgggccccatgtcttccacgggatcggtcagcacgctcaaccacactgcggcgtggccttcgtcgccaggttcggcgcgcatgtcctcgctcagggtgccgcgcagccagacctgcacggcggggatctctttttcaacgcgcatggccgcctctggtcttcgtcgcggcctccgttcccttcatatcgtttcgttggctggcgcgtcggcgtatgccttccagagcctcgcccttgtccttgcccttggcgggctgccgggcttggtcggccgtgacgatgggcccgggcagcgcgtagcctcggtcgatcggcacgatgccttcctctccggccagatcgatcgcgggcacggcacccacggtcagtcggatctgctcggtggcgtcgccatgttcgtgccggtcggcgatgatgcgttgcaccgtgtcctccaggccggcggccagatcggtggagccgtagggcatgatgcaaccgtagtcgggcgcgccccagttcgtgccggtgtcctcgatcgcgtagcgttcgatgtgctcgccttcctccaacaggttctccagacggaaatccggcgcaggcgcgggcgggtcgagcgcgtcgagcagttcacgcagctcgccacggtcataccggttggcatcgggcacgccgttggccaggaggaacccgtgctcgcccagggtcacgtcgtcgcacagggcgctgtcgcggccgagccaggccatatccatgtacatgccccaccgcccctgcatcacgcgggccaggtcggggtcgcgttccacgcaatgccaggcgtacagctcgtccagatcatcgatgttcgccgggtcgatgccggcgggcggatcgtattcgcaccagtcgatgtcgtcgcattgggcgatgaggttcgccaacgacaatggcgtggactgcacgagtgtgtcggcggccatgcgcacccgttcgatcatgcccggcgactcgcgttcgaacacttgggccgcgcgggccagcatgttcaggtcatccaggttctcgtactcgtcgggccggtagtccagggcttcgagcagaccgtcgtactcgtagtcgtggatggcgtattcctcgtacacgcgccccgtggcccgcgcctcgggggcctccggccccaggcccacggtgtcgcgcaggaacctgttcagctcccgttggggcatgggcaggctggcccagcctcctttgagctcgccctcgacgtacttgcccagattgcccacccacacgcggatgcccagatcgtcttccgtttccatcgtcaccggctcctcgtctgccggggcatgggcgcggcgtcggcctgcatggaaccggttcgcgccgatgctcgttggcggatgccgtcgagcgtggatgcgcgcccccgggcacgctccgtcggcccgtcggaatcaaccgccgggccgacggtctcattctgccggggcgcgtgctcgggttttgcctcgaccgtcttgttctcggcccgttcgcgttcgtatgccaggcgctgcgccttgacggcccggcatagctgccacgggtcgtcgatgcgcatggtctcgcgttgctcgcccgcgcccctccagagctcgactgcttcgccgggtttgaatcccacggtcacgggacggccgttgagcttcgcctcgcgcatgcgcggagaggcgaaccggtcgagctgccagccggtcaggtccacgccgttgacccgggtgccctgcgggatgctcacgcgcatcatgtcgaacacacgcccgtcccgtgcggtcatcgcatacgcatgtacgtagctgttggggaagttcacgcgcggccagatcactggtttcgacggtggcggagcctgcgccggcccgccctggccgttctggggagccgcaggcgcggaaaccggcggcacggcttgcgcggcgttgggagcgggagccggctcattcgagaccggtgtgattgaggcgtctgccggggcgcgggttcgtgttcggcttcgacgctttccgcccaggcgaatccggcttgctcgtcgatgcgtttggcgaccatgccggccgcccggtccagctcctccggagtgaagccgatggaggcctcgggccacatgtcgttgtgctggcgcaccacgtcctcgaccagcagtcgcgcgtcacgttgcaggctgccgtcgcggggccggccggcggcggtgtattcctcgccgcgacgttgcagctccacgcagatccgctggtcctggtcgatgaggttggtcaccagccagcgcacgttgtcggacagttccgccatgaggttcctttcggttcgggggatgggctatcggttgcgtgcccgccggtgggagggcgaggtgcgcggcgcggccgcgccggcccgccgctcggcgcgcgcacggatgtcattgagtgtctgccgtttggtcttgacgggcccattgcgccccgatcgttccggcgcgtcgaagcgattccagtccaggccgcgtgtgcgcgccgacaatcgttcgatcaggtccgcgacccggggcgcgtcctcgcgccggtattcgaatcgaaccacgccgccgccgacctgctggctcgcatggggtatgccgagccggtcgaggttcatggcgatgatctgcccctcgccgtcccagggcacggtctggaaatcgagacggccgttggattccgcgcccttctcgaacggcgcggcaagcgccgcgccgggctccggctgcgcctccggcagcgtccgcgaagcctttggctcgatggtctcgatgcgggcgacgggtgtgtctgttcaatagaagttaggccgatgcagcgtaactatttagtccgaaaaagcggtaggaattagtccgtttcaccgaaatggcgagatgaagggcaccggcccgccataacccggctattttcccgagttgaaacacatccggccgacagggccactcgggaaaggaaaggaatgacgaaaccggtgtcgatacaacaacgtatcaggattctcgacgcccagggcgtgtcatggcgcgaaatcgccagacggcttggcgtgtcgagggataccgtcaggaaatacgcgaccatggaggactgctcgccgaaacccgcggccgggaagggacggcgttccctgatcgacgcgtattccggcacggtggattcgtggctgttcgcggacaggctcatgccccgcaagcagcgccataccgccagacgcgtgtacgccaggctcgtcgaggaggagggcttcgagggctcgtactcgtcggtgcagcgctacgtgaagaggtggcgcgaggagcatcggtccgacggcgacggctatctcgagctcgactggagcgccggcgtcatgcaggtcgatttcggcgaggccgtcgccacgatcggcgggggcgacgtcaaggtgcactgcctggtcgccacgttcccgcactcgaacatgcggtacgtggccgcgatgccgggcgagaacgcggaatgcgtgtgcgaggggctggcccggatcttcgaccacatcggcatggttccccgcgtgctggtgctcgacaacgccaccggtgcgggccaccgcgtcgcgtggaacaaggtgacagtggtgcgcgtgttcgccatgttctgcgaccactaccggctcgagacgaggttctgcaacccgtattccggcaacgagaagggatccgtcgagaacgcggtcggcttcctgcgccgcaacctcatggtccccaagcccaacgcggagagtcacaggcagctgacgaggcatctgctgtcgaggtgcgacgcgatcgcggacgtggaccactaccgttccggcaggccgatacgcgagctgttcgacgaggaccgcggggagatgcagccgctgccgcgcgcacgtttcgacgcggtcgaatgggtcgagcgcaaggccgacaaggagggcaacatccagatcggctcggtccgttacctcgcgggcccgtcatggcgcggctggacgctgcttgcgggcctgcgcgcgttcgaggtggagatccgcaccgccgacggcaggcacgtgaacactcttccccgctcctacggcgatggcgggcggacggtcaggaaccccgccacgctgctgcccgcgctggccaggaaacccaacgcgtggggcgagtcgcccctgcgcggcgagcttccggacgggctcgtgctgcgtctcgacgcgttggaccccggatcaagacgacgcgagctgacgctcctgcacagggccggcgtggcgagcggcttcgggaacgcggtcctcgccatggccgcgatcgtggagggcggcagggcgcccgacgaggccagcctgctcgcactggccagacggatcgcgcagggcgacccgcccgacccggacgacggggccggcaggctcgccgtatacgacgcgttcaacaaccccgacgggaaggggacggagtcatgacgaggccgtcgcggaccatggccgacaccagacgcagacgcgcgtccacgggcaggatgatggacgagatcatggaactcgccaggagcctgcccctgaccaggcaggtgctcgcggacagcctggagaccgcgaccccggcccagatggagttcatgctctcgtggatgaacgaggagctggcgtcgagggaacggtcgaaacgcgcgcgtctgctcaaacaggccggactgccgggcgtcaaggaactcgacggctacgactggacgccggtccgcttccccgtcgactacgggcgcgaggcgttggaatcgttggacttcgtcgccaacagcgaggacgtggtgctgttcggcccgcccgggacaggcaagacgcatctcgcggtcgcgctggcccgtaaggcgtgcgtcgagggccagccgacgaggttcttcaccgcggccggactggtcatgcggctgctgcgcgcgtcggccgagggcaggctcgaccgggagctcgcattgatatccaaggcgcggctcctcgtgatcgacgagcttggctacgtgccggtcgacgaggagggctccaggctcctgttccaggtcgtgaccaacgcgtacgagcgacagagcgtgatctacaccacgaacatcgagttcagtggctggggacgcgtgttcggcgacccgaacatggccaccgcgatagtggacaggacggtgcatcacggcaggatgatcaggttcgagggcgagtcgtacaggcgcacccacgccctgatgggatagaaaccaaacaataatggcggcgggtctttccgctcaactggactgaaacccgccgctttttcgaggtggtgacgttttcttggactccctgaccgggaggagaacctcctcatggcgaagtacagcagggagcagcgcgacagagccgtggacctgtacatcaaatacgaacgctgcgccgccgacgtgatccgcgagctcggctatcccagcaagggcgtgttgctgtcgtggtacgcggaccggctcgaggaggagcgcaccggcgttccctccgggcgcggggaacgctacaggcggtacacggacgggcagaaacgggccgcggtggaccattacctcgaatacggcagacggctcagccgcaccatgcggatgctcggctatccgaaaagcaaggaactgctcatggcgtggatcgacgagctcgcgcccggccaacgcaagttgaggcacggtccggtccccgaggagctgaaacgcgaggcggtggtcgcggtcgcgtccggacggctgaaatcgcgtgaggcggcagccgaactgggcgtgcaggacgcgactgtgcgagaatggaaacggcagatgctcgcgaaatccgaggaggcgactgtgtccggatccgggaaaagaaggaccgtcgtggaatccaaggagccgtccgtcaagccgaccgtggctccgaacgcgtcggacgcggccggtccggcggatgcgttggcgtcgatggagaggaaagtggcggagctccaggcccgtctggacgagttggacgccgatgtcgaacggcaacgacgggagaagagggaactcgacatcgagatcgcgatccggaagggcgcgttggagctgttgggaaaagagccgggcgcagacccggaaaacctgaccaaccgagagaagacactcctcgtcaagaccgttagcgagacgctgggcgtgacggccaggagcctcttgcccgtggtcggcatcgcgcgcagcacgtaccattaccagctcaagtccatgaaacgtcctgacaaagacgcgccgctgctggagctcgtgcgcgaggcgttcgagaacagcgaacgccgctacgggtacaagcggatccacctggagctgaaaggcatgggcgtcagggtatcggccaaacggatcatgcggctgatgacctcacatggcctggtgcccctgttcaagagcgcgaagcggtacagctcgtacaagggcgagctcaccaaggcgccgaagaacctggtgaaccgcgatttccacgccgagcggccgaacatgctgtgggtcacggacctcacggaattctcgatccccgcggggaaggcctacctgtcgcccgtgatcgactgctacgacggcatgccggtcgcctggacgatcggcacgagcccgaacgccgagctggccaacggcatgctcaccgacgcctgctccacgctcaaggacggagagaagccgatcatccacagtgattaagccgggtttgttgttaagccggggaacggttcggggtcttggtggctggccgtgtcccatgtggtttcccggcttaacgttccgggttatgttcgtcttgtcccatttgattcgaacgaaggagtttgccatgggtgagacgacggttggccatgtcgcgggcgaggtggtccgcgcgctttacggggccggttatatggaatccaccataggccagtaccgcaagtccatcagggcgttggaacggtacgccggaggcccggatgcggtgtacacgcgtgggttgggcgcggggttcgccgcgtcgaccttcagtgagcggacgggcggtttcagcaggcagcggtggttcgattacggcaggctggcgcgtttgtgcgactcgtatctgcggtccggttcggtggacctgggcaagtggcgcaggagcaggcttgcggagccggtggttccgggtttggccgtggtcatggagcgttgggaggcgtatctcgccggttcgggactggcttcggcgacggtggggcattaccgtcggatggcgggcttgttcctcacgtggctggaatctcatggggtcgtgtcgttggacggttcggatggctcgcatgtgctggggttcctggccgggctgcgttcacgctggtcggagtcgtcgatgcggcacgccgcgtcggacctgcgcccgttgttcagatggctcgggcgggatgacctggcggacgcgatcggcctggccggcatacgcaggacccacgcgatcgcgggaacgttgcccgacgacgagcaccgccgcttgctggaggcgtgcgcctcgcggtcggtgccgtcgagggacgcggcgatcaccctgctgtcgctgacgtgcgggctgagggcatgcgatgtgatcggtctgaggatcgccgacgtggattgggattccatgagcataggtctggtgcagcgaaagacgggcaatccgttgaccgtgccgatgacgggaccgctggccgcgaggctggcgtcctggctgttggacgaaaggcccgccaccgacgacgaccgtgtgttcgtgcggtacaaggcgccccatgtcgcgcttcggggtcattcatcggtgtacgaggcgatcagccgtgtcatgcggcacgccgggctcggacgccggggcggttccaggctgttgcggcgcaacgcggcgacgaggatgctggaggcggccacgccgttgccgacgatcagcgcggtgcttggccacgccgaccccgattccacacgcgtctacatggccacgcaccgcgggggaatgctcgcgtgcgtgctgcccgtgccggaaggcggatcgtcatgagacccacggaacacggattcgtcggcccgctcgccggcgaattggaggagtacatccgtttcaaggcgtccatgggcaggcatggcgccacccgcgtccaggtcctgcgctcgttcgaccggcattgcctcgaacacggggccgtgcgtctggagcggggcgtcgtggagcgatggatcgcccataggatcgacgcgaatcccgggggttgccgctcgtggttctcgtacatcagggacttcggcaggtggatgcgactggcccacgatcccgacgcgtacgtgctctccgaccagtggaaggccggatccccgcgtccgacgccgtacctgctgacggaccgcgaggccgccctgttcctgcgggccgcgggaacgttggagtctccgtcgccgtgggcgtggcagtctcgcgcgttcttcatgctcatggcctgctgcgggctgcgcacccgagaggtcaggagactcgccgtcgggcacgtcgaccacaaggcccgttccatcgacgtggtcgattccaaggccggtcgcagccgcaggctgcccgtgggcgacgaggtcgccgccgaactgctggaatgcgaccaacggtcccgcgaacgcttcggagacgaccgtcccgcgttcttcgtcgcctccaccggcaatccggtctccccgggcatgcccggcgtggtgttccgccgcgtctggacgcgggccgggctcgagtggccacaagccggcaaacggcccaggccctatgatttccggcaccggttcgcgttcgcgaacatcgagcggtggactcgcgacggcgtggacgtgatggcgatgctgccctatctggcggcctacatgggacacgccggcatcgacagcaccctctactacgtgcacgccagccccgatttcatggacggatacgcggacctcgtcgccgacgccgaacgcgtggtcccggaaacggaggaaccatgagcaaggcaaggaaaacggccgccagctccggtgaaccggacttctggcgagtcgcgcgcgactggctgcaccactggctgcccaaggtgcggggcagctcgccgaagaccgtcgaggcgtaccgcatcggcctggaatcctacgtccgatggctcgaaaccacggaaggcacgcagcgcagccacatcggtttcgggcatttcgaccgggcgcgcctgggccggtgggtcgaatggatgcggaccgagcgcgggtactcggaccgcaccatcatgctgaggatgacgacgatgcgcgtgttcctcgaccacgcgggcctcgaacacccggcattgaccgcgctgggcaacgacgcggccggcatacgtgtcaaaccacccgcgcgcaaacccgtcgaccacctcggggaggagcacaccaaagcgttgctgaccgcatggggcaccggcgacgccaaatcgcgcaggaaccgcatgctcctgatcctcatgtacgacaccgccgccaggatcggcgaactcgccgcactgaccatcgcggacgtgggtatggataagccggccagggtcacgctcaccggcaaacgcggcaagagccgggtcgtgcccctgggagaaaggacacgaacccacctggccgcctacctcgaggaattccatcccggaccgtccatgcgcgacggcgacaggccgttgttccactcgacgaggaacggcgccatccagccgctctccgtggaccggatcgacgagatcctcaaaaccgcggcggccagagcacgccgcgggacgtgcccgtccatgcccgaacgcgtccactgccacctgatccgccggacccgcgccatggacctctaccaacagggcgtgccgctaccgctcatcatgcaactgctcggccacgaaagcatgagcacaaccagcgcgttctacgcgttcgcgaccctcgacatgatgcgcaaagccgtcgatgcggccaaccccggccccgacccctccaaggagacatggctcagcgaacaacgactccgacaactacacaccctcaaataacccggaacgttaagccgggaaaccacatgggacacggccagccaccaagaccccgaaccgttccccggcttaacaacaaacccggcttaatcggaattaaaccgatgtcggtttaacagtgaccgcggctgccactaccggtggccggaatggatccgcatctgcatggacaacaacctgacgcgttcgatgagcgcgaaaggctgttctccggacaacgcggccgcggaggggttcttcggccgtctcaagcaggagttcttccacaagcgcagcttcgcgggcgtctcgatggacgggttcatcaacatgctcaacgactacatggtctggtaccgggacaggcggatcaagacggagttcggcatgagcatcatggatcgtcgacgcgagctcggtcttgtggcatgattggtggtgatggaatcaacgacgagtccaacaaaacggcaccagccccttcggactggattgacacgccattctggactacttcaatttgacaaaacacacccgccggcaagcgtggagagaaacaccgtcagccgcgtgtaatccggcatgttctcggccagcacgcgcagttgcttgggagtgaccggcggtatgtcctcccttacggaatccggttccggcggtatcggaaagatgaacggattgtccttaagcaatggcggggacccatccatgctcatggttgtggccgagcggaacacggccttgagccgcatgcaggcccgtcggaacgaccactgcccctcgggatgcgggccgtcataccagtttttgatatgtctgggcttgatttccgtcaggcgcagtccttcgaacgcgggcatgaaatgggcgatgtccaggtacaggttgcgtctggttccgccggctatccgttcgccgttgggcagcgtgtattcgacggcccattgctcgacatactccttgaacatcatctggttggctcgttcccgcctcatgcggtcacggggatgaacccacgtttggatgcctttggtatgtagatcgaccagatgatgctcgttctccaaccacacatgagcctcgtgctcctgatgtggcttgaattgcttctgcaccttcttgccatgatccacggggttcggataacgaacctgccatgcgctgaggctaccggaatcgtcgtatcggggaatgacggtaccccattggctacgcggcttggacatgactttccccactggaatgttggtttttggcatgattgctctcccttgaacaaaaagtgcacccaaatatgcacttaagggagattgaagaaaacctgcatatgcagctcaacacaaggcggcaagtctgcgcgatttcggtacgcggctagagcgtccttggttacttcggctacgataaagccaagcctaggaaccttgaaataccgcccaagctagggtgtttgcgacggtgcaaccctatgctatagtggcatccagaattgaagttgaatcatgcaccacttccggagaggaggtagggcgcatgagcggtgatgttgttgccccctctctgggggtacttcattgaagacctcggtcatagcgaccgaggtcttttcgtattcgcgggaccaggcctgaaagcattcggcccacttccctgaaggaaacgggccgaatgcttggactcgggtttcaacccggaaggcttcagtccagcgatttcaccacaacgacctcggtgggcacgttgcccgcggtggccttggagtaggggcacagctcctgcgtacgctcgacgagcttggcggcagcctcatcgtcaagatcgggcagaactacctcaatcttgcccttcaggccgaaggactcgccttcaggaccgagcgagatgctggcgcgcacctgactcttggccagcttggtggccgccacgcgctgctccttggcggcaagcgccaacgctccttggaagcaggcgccccagccgatggcgaacagctgctcggggttcgtgccctgacccttgccgcccatggcgaccggcgtgtccaggtcgaactccagttccggctcatggctcacggcgtggccgttgcggccgcccgtaacctgcgccgtagcggtgtagacgatttgcgatggttcgttaccttgatatgtgctcatgctttcatctcagcacgtgttcacgcccgccacaaggactgtcccaccgtagacgatgtgacatcatccacactgtgacttcgcgcacagagtcccgacaccgtcctcacctcgtttatcggcaccatgcgtgtataaccacatatggcattatcggcgaatatcggccggcagaccagttgcacaaggagaacatcatccacatggcagacaccgccaacaccaacgcctggttgccggcgctcaaagcggcgtttccgctgaccataccgatttgcctgggattcctgtttctcggcgcctcatacggcattctcatgggcaccaagggcttctcgtttgtatggccgatgtgcatgagcgcgttcatcttcgccggttcgatggaattcgtcacggtgaatctgctgctctccgcgttcaacccactcgccggctttctgctggccctgatggtcaacgcccgtcacctgttttatggactatccatgctcggcaaattcaaggggctcggctggaagcgtccgtacctgattttcggcatgtgcgacgagacctttgccatcaactccaccgcgaaaatccccgccggtatcgaccgaagctggttctacttctgggtcacgctgtgcaaccagctgtattgggtgaccggcgccacactgggcgggctgattggcgcgcatctgccgttcaataccgacggtcttgatttcgtactgaccgcgctgtttctggtgatcttcctcgatcagtggctcgccggcaagcatcgcgagcgactgtccgccgtcatcggtgtgctgacgtcgctggcctgcctgctgatattcggggccaatgatttcatgattccctcaatgatcgccatgctgatactgttcgtcgcgttgcgcccgcatctggatgtgttgcggccggccgccgacgccccggaagccacggcagaccgtgccatgagccacgcagcggaccagcagaaggaaggacagacgcgatgacgatgaccatctggcaaggcgcgctcaccatcgtaacggtggtgctggggacgatgtgcacccgttttctgccgttcctggtatttcccgaatccaagcagccgccgcgcgtcatcgaatatttcagccgagtcctgccctatgcgatgaccggtctgctggtggtatacgcactgcgcaacaccccgattctgaccggttcacacggccttccggaactcatcgcctgcaccgtcatcgtgctgctgcacgtctggaaacgcagtatgctgctttcaatcgccggcggcacgatcgtatacatgctactggtgcagctggtgttctgaggttgggctcggcttctccttcgttgatctctccctccggtcgccttcggcgaccacctccctctgtgagggaggtgctgaacgcagcgaagcggaggtagagacccgcggtcgtaagactgcgaaacacacagcatcggccacaggccgattcctacagctgcttcgccacccaatcgacgatgtacggagcgacttcctcaatctggtcgatggcgacctcgaactcgtgcttgccgccgtaccacggatccaccaaatcaatctgatcctcgcggccgggcttcggcttgggcagattcgggtcgaagctgcggtacatgtgcacttcggcgcgcttgccggccggcagcatgcgcagcagggcgcgcatgtgggaggcggtcatcggcaggaacaggtcggtacggtcgatttcctcacgtgagatgcggtgtgcgaagtggtcacgcggaatctcatcaccatagccacgttcgcgtagcacgcgcacggcacgcgggtcgatcgggtggctccactcctcgtcggacacaccactggattccacgttcacctggtcgccaagaccgcgctcattaaagaagtgacgcagaatgatctcgcccataggcgaacggcagatattgccggtgcagacggtcattacggtgtagggctgggtattgctcatagctttgaatcaatcctcaatcgggcttcaccgggccgcacacggcccgaatgtgtttttggggtcgaatgaatatgaatccggctcatgccgccataaaggacacaagccggattcgcatgctcacttggttttagccaagatacggaaacgataggaatcgatgccggactcctccttggcgggcgtatgccactcgcccacttcggcttcccgccacatcccggcctcgaccagcgacgccatatcgggcgcgtagctgtcggcatccacagtgacggccagatcagtcacataggctttgtccgcgaacggcaacgcctcggcgaacagctgggcgccgccgaggatccaaatctccgaacggtccagaccgtcgtccggaatcgcctcctgacgggccatatcgagcgcgtcgtcaagactggtgaccacagtggctcccggcgcacggtacatcggatcgtgggaaacgacgatgttgtcgcggttgggcagcggccggtacttgaccccaagcgattcccaagtcttacgacccataatcaccgggtgggagacggtcagctccttgaaatgcttcatatcctcggcacagtgccaaggcatgccgccattgaggccgatggcgccggcgcgaccttccttgtcgcgggcttcggcccagataagattcaccgagaaggtcttgggataatcgtcaccccagtcttcttcagtggcagacagcccggcagatccgggctcgggttcgtgatagccgctacggctactgtcatgctccatttcgcttactcctcctggattgcggaactgggccttagtgtagtggacagcgaagactcggggcccgtcgcctccacagtcttcgctgtccacgaacaacgctcagaccgcaacaggtgccttaatagtggggtgatgctggtagccgacgaccttgaagtcctcatactggtagtcgaacagggaatcggccttacgaatctcgatggtcgggtacgggtagggcttgcggcccagctgctcaaggaactggtcgacgtggttgtcgtagacgtggcagtcgccgccggtccagacgaattcgcccggcttgagcccggtctgctgcgccatcatcatggtgagcagcgagtaggaagcgatgttgaacggcacgccgaggaacatgtcgcaggaacgctggtacagctggcagcttagcttgccgtcggccacgtagaactggaagagcgcgtggcagggcggcaacgccatcttctccacctcggccggattccacgcggagacgatcatgcggcgcgaatccggatgatgcttgatgaggtcgagcacattggagatctggtcgatggtgcgattcgggtcctcgggggtcggtgcgggccaggaacgccactgcacgccatagaccgggcctaggtcgccgttctcgtccgcccactcatcccaaatatgcacgttgtgctccagcagccagttgatgttggaggaacccttcaaaaaccacagcagctcgtaggccaggcccttgaagaacacggtcttggtggtcagcagcgggaagtacttcgacaggtcgaagcgcatctgctggccaaacagggaaatcgtgccggtgccggtgcgatcggacttcagcgtgccttcggtcaggatcttgcgcaccaggtcctcatagggcatcggaatgtccgtttcgggacgtgcggggatacgggagcgaatatctgcgagttgttcttcggtcaaagccatgtgcaccagtgtagcttaggggcataatagagaagtccgatgatgcgggagagcggccaggtgccgcgctcccccgctggcatggcgatgggccagatcgccggcggctgaaaataaaggagcagctatgggtaagcgactgtgggttgaacgcaacaaggacggttcgtgggatgcgttcagcgacgatggcgcgcacattaagttcggcaaggatcgtggccagttcacgccgggcgatctgatgaaggtcgcgctggccggttgcgccgcgctgtccagccagttcgccatcgaacatacgctgggtgagggcaagggtgccaagatcgtggtggatggcacgtacgaccccgagaacgacgcctacaccggtttcgaggagcaggtggtgattgatgcttctgacgccagcctgtccgaggaggatgccaacaagctcaaggaacgcgtcacccgccatatcgacaagggctgcacggtcaagcacacctacgtacaggagaccccggtgcgcatgaacgtcaccgtcaagcactgacgtactaataaaccgacgtactaataaattgagctccctctgatgagggagctcattgtatacccggactttactgcctgtcgggatcgatggtcttttcgatctgctgggcgacttcaggctcggctgcggacaccggaatctcctcgacgccggcaatctcctccagcgacttggcaggcacttcggcgggcgagctcggcacggtgtcgagacgcgattccgcagcctcaacatacttgcgtggcaccacgtacaccgggccggccgcatgctgcagcagtccctggctggtggagcccagcagcagaccggtgaagccgccgcgaccacgggagccgacaacaacaacatcgtgatcgtagctggccttggtcagtgcgctgacggccgggccggaaacgatctgcttgttgattttcagatcaggatgcgattcctgcaacggcttgatacgcacctcaagatcgtccttgtaggactccatgatggcatcctcgccatccacgcccttcaggttcggcacagcggaaatcacgtccagttccgcaccccagcacgtggcgaagtcggcggcaatgtccagcgccttcagaccccacttggattcgtcggagcctacggccaccttggtaatcgtgttgttcaggtgcatcaggttgccgtcatcatcggtgtacggcaccactacaatcgggcagtaggcgtatgccggcagcgacgaggacgtggtgcccagcagacgctcggccagaccgcccttgccacggttaccaatgacgatcagattgtagttacgcgacaattcgacgaacaccgatgccggatctccggtaacaatcagtgtggcggcttcgacgccctgctcgtctgcgatggccttggccttggccagaatctcctgagcatcggaatgcgcggcgttatcgtcccccatcgccgtgtaagttgcatcgaacgaaacggcggcatagctcggcagggaatatgcgcagacaatctgcagcgtcagccccgcgtgctttgcataattcgcggcccaccatgttgccttgtaactggcatgcgacccgtcaacgccgacgagaatggccttgtcgttaatcatgacgacctccttgaagttattgtggcacgaataccgcgtacctccaacaataccccgcgacactcggtttggccggtatcctccgctcaaaaagaaatccgcgtatacgaaaaaaggcacatcccaaaggacgtgccttaatacgaattcgcttaccgcataattcttgttacatcacgcggcgaatggaatatccagctccaccgaatacggaaacgtcgcttactgccgttccctgcaccgggttcatagcattcatcacctgtccgttaccgatgtaaatggccgcatgagtaccattcgcaagaatgtcacccggcttggcatccgccaagcttgcgaccggagtacccacagtggcttgagcaccagaggttcgcggcagggaaatgccaaactgggagaagacgtactgtacaaaaccggagcaatcccatcctgccggagtgttgccgccggcaacatacggatagccttggaacttcagtgagaagctggcaagctcagcgccagtgccagtcattttacccaagtcaacctgtggaatcgacgcacgctgttcagagcggctggctgcagcagcagcagcggactgggctgccgcagcttcatcagcggctttctgagccgccgccgcagcagcagcctccttctcggcctgagactcggtctgtggcacatcaagagtctcgatgccaccccatttagagttctcgtcaaccgaagtggaggtggattcggcgaacaaattcttcttcaccgaactcgccttcgggaaagaacgtgaggacaccatagcactcgtctgcgcggaatcggcagaggcaaacggggctacgcatgcaaacatggcacccgtggcgataaccgccactgatgtggaaataatattcttaacgttcgtcatcagcgccttaccttagcacacatgggtcgatttcataacaggaatgtcttttcgaagatgatgtcgcgggtgtatcactcggcaggagaacgcaacgggcctcggataccgattggcatccgaggcctgcaatatatcaatcaataagactgcatcacgggatacgcaccacgatggtgagtttttcggtcatggcgctagcgagagccacgctgtagccgttccagccaccatggaccgcctgaccgttgccgacatacagcgccacatgatcgtagtgcgcgccgccattccatccaccggtgttggcataaatcagaatatcgcccggctgcagggacccgtctgtaactacgtggccaccgggaacattgacgtactcttcaggccaaccgtggaagttaatgccacgggccgccaacgcttgactgaccaatgcggtgcagtccatgctctgtccgatcaaagaatacgcacggtcgatagaggcaccagcaccagcggaaaccgaaccactggcatcggaataagtaacagaagagcgagactcattacggctcgcggcgttggcctgcttctgggtcgcctgagcctcggcctccgtctgcttcttggcctcctcttcggcagccttcttggccgctgcggcatccttttccgcctgagattccgtctgcggcacatcgaggttctcaatgccgccccaatcagcattgtcctcaacgttcgtggcagtggcttcagtcgtcagatctttgtgcacctgggtgtacgaggggaaggacttggtggaagtcacagtaacaccctcagctgcagtcgctgtaggaacaaacataaacgagcaagcacaggagacaatcgcggcaacaatggaagaagctacagttttggtcttcatagaaccatcaccttacacggtgcgcattaactcgtacaggatggaagaaataaaacaccccggagctattgggatatatcggcgtgtcggcacaggtcagttcggactaatacgcggtcgcaacacttgaaatgtcatttcgcgcgaacgattgccgatagggcgacgtcacatccgaacagtaatcaccgaatgtaagccaatgaaatgaatcagtagtggacgtactggaacttaccggcttcggcggcgctgaacgtacgggtcgaaatcacacccaatcccttggcattggattcggagatctcaatggagccgtcggcattgatcttttccagaacggcaacatggccgtatgtgccatcggcattggcctggccaggagcgaacaccacagcatcaccgacatggcgaggagtgttgtccacccaatagcccagagcggaagctgacgccgcccactcgccaccattgccgaagttgccgctggaaggcagtcccagttcggcacgacgctggtacgcgtaccacgtgcactgaccccacggatagttgttggagttggtgccaacggcatggttcgggttgaagccagccggcacagcatcgccatcggcatccatgagggccgacaccacaggattgttcgcattattgcgattcatcagcttggcgtccaaggtgctgtctgaattgctcagcccccaaccgccttcattggtggactgtgcggtaacggaggatgaactcagatcagtacgtgcttcggaacgagaagccgcagtcacatcgctgatgcgcttaatctgcgtggtcgtcgtggccggatcagccacgaacgagttcgtggcgtctttattgttggaaaatgcgagagcacctgcggccgtgccgaccagagcggccagtgaggccgaggcaagaatatggctacggcgttcagcggcacgagcggcctcacgaatggaacgacgagtctggggagcgatttcattgatcttctcggcaatggccggatcaagccccaaaacaacggcgtcgctgccagcggattgcaccgcgcgcacggcacgaacggaatgagaacccttgccggaggcaaacaatgccttcgctaagctgaacttctggcgcgagaccgcggtcgctttatgcgaagcatgcttcatactacgttaactccttggatgggttcggcggggtcctttcaacgaccccgtatgaccggcacaattgagtactgtacaacgaacagaggtcaatcctcaatgcgatcccccaccatccgggcatgtcaaacgatttacgtaaccgtgcggcagggtgaaaaactgccttgtttccgcccgttcacgaacctcactatccggttatcggaagaatcactaactcatgtcattccgacacaccgtagccatgatgtgctgcgtacattctgcactgcattccgcattgccgctactaccgcccggcaccccggaattccgcagtagccccgcagcaatcccgcacaccgagcattatccgcgatattccccaacactggtctacccttgaaaccatgactatcacactgagtattcccgagtcgctgaagcccgaagatggtcgcttcggctccggtcccagcaaaatccgccccgaacagatcgccgcgctcgatgccggcgccaccaccctgcttggcacatcacatcgccaggcaccagtcaagcaactggtcgcttcgattcgtgaaggtctgcgcgagttcttccacctgcctgaagggtatgaggtggcgcttggcaacggtggcgccagcgcgttctgggagattgcctgcgcttcgctgatcacccgtcgcgccgcattcggcacgtatggctcgttcagtgccaagttcgccgcgtccgccgcgaacgcacccttccttgaagacccggtgctgttccccggcgagccgggcacttaccgtctgcctgagctcaccaagggcgtggacacatattgctgggctcacaacgagacctccactggtgtggccgccccgattcgccgcgtggccggaagtcgtgaagccggtgccttgaccgtcatcgacggcaccagcgcagccggcgctttgcccgtggacatcagccagaccgacgtctactacttctcaccgcagaaggccttcggtgccgatggcggtctgtgggtcgccatcctctcccccgaagccatcgatcgtgcggcatgcgtcgaatcaagcgctcatctggaaggcgcacatcgctgggtgccgccgttcctctcgctgaccacggcactgaacaactcccgcaaggatcagaccctgaatacgcccgccgtggccaccctgatcatgatggaaaaccagattcgctggctcaacagcaacggcggcctcgcctgggccaccacgcgttgcgccaagtccgcatccatcctgtactcgtgggccgagcgctccgaatacgccgctccgttcgtcgtcgatgcggacgcccgctcgaacgccgtggtcaccattgatctggacgagcgcgtccaggcctcccagatactgtccatcctgcgagagaacggcatcgtggacgccgccggctaccgcaagctgggccgcaaccagctgcgcgttggcgtgttcccctcggtggaaccggctgatgtcatggccttcaccaagtgcgtcgactatgtggtcgagcacctgtgatggcggtctatgcctcgcatggccgaccatatatgccatgcacattgatcggtctcaactgataccgattgaataaatcgtagggagaggtgtttgacgcccctccctactcttactacagtgcatgagtatgaagttcgcgcctctcattgaccctgccgtccgcaaacccgcgcccaagcccgtacgggtggacctacgtaaggtgtttgccatcggtaccggtctatggattgtggcgttgattgtcgtgctgattctgctggccgtgggctacagcgtaatgccgttggtgattatgtgcgtggccggtgtcattattggcttgctactgctgatttgggaatacttcgaccgctgggactaccgccgcctcggacagtaataaagttcactgcgccaacggcaacgtcaggctgaacgtactgccttgcccgggcgcgctccatacggtcacatcgccatgatgggttagcgccacatgcttgacgatggccaagccaaggcccacgccatccgccgtgcgattgctctgttccgcaccccggtagaaccgctcgaagatgcgcgcctggtccttcttcgcgatgcccgcgccctggtcgatcacgcgaatcaccgcacggtcgccatccttgtctttggatgcggacacgctgaccacgccattttccttggaatagccgatggcgttttcgatgagcttggtcacggcgctgtcgatctgatccgcctcaccattgatgactagatcatcgtcgcccttgatgttcagctgcacgccagccgcggccgcctgcggctccagtcgcgccaccgtggcctcgagctgttccataacgttcagtcggttggcggaagacggcgtaatcggctcctgtgcgcgtatgagcagcagcaaatcggacaccatatggttgagcttgctgcagctggaacgcacctggcgagcatcggcagccacctgctgttcgtccagattgccggactccagcgaatcggcgagtttggccagagcttcagtggggcccaacaattgctcggatacattggtaataaacgagtcacgcacttgagcgaaacgaatcacgtcactgacatcggtaatcaacacgatgacgaactgctcgttgatacgccctacagtcaccttcagccagttggggcggtggacggactgcgtggcgacgtgatcgcccttgttctggtctgcgacgtaccgctccggagtatcggtggtcaagtcgaactggcgcttgccaccagacttgcgcgcctcgtgaatggcatccagcacctgctgctgggcgatggcgtcatctgacaccacacccaggcggtaggcggcgggattgcagcggaccacctcgtcgtgctcgtcgaccaccacggacgcacccggcagcatggacagcagcgtggcggtgtcgtcggacagatcgtcattgtcgtcatcatcggccagcggcgattccacggacactcgatgtgtcgcaaatcccacgatgagcgtgatgattcccaccacaaataaaacagccgcgacaataagagcaatcgcggcgacgagcggcatctgtgtcatgcccccattctttcacaccacacgccgggattgcggtttgccggcgcgccggtaacatgaatttcaggtgaacaacccaatgaacagtagaacaacttgaggttgccattacctacgttgaagtggggaacaagtactggaataatacactggtacaggttgcaataagcaagcatgaaaggctagagaaatgcgcgttattttcaacgaggagctgaagcaggttgctgacgacctcgaccgtatggcgcagaacgtgcgcaaggcgatcaaaggcgctggggaagccctgctgaatcaggacgttgaagccgcacagactgtgattgacggcgacatcgagatcgatgccctggagtcctctgtgatcgaccagtgcgtcaagctgctcgccaagcagaacccggtggccaccgatctgcgtgtggtcgtttccaccatgcgtctggcttccacgttcgagcgtatgggcgatcttgcccgccacgtggccgaggccgctcgccgcacctacccggccgccgcgattcccgaatccgctcagccggtgttcgccgagatgatcgacttcctggacaacaccgctgaccagctggtggccatgctctccgatcgcgatgccaagaccgccgaggccatcatcctggccgacgacaagctggacaacctgcaccaccagaccttcgatctggcgctgtccgatgacatcacccgtcagcagaccgtggatatcgtgctgctgggccgcttcctggagcgtctcggcgatcacgccgtgtccgccgcccgccgtgtggtgtacatcgtctccggcttcgaccccaccaaggagccgacccgcgacgagggcaccgacatcgactgattggggcttgtcctcacattgggcgaataactgaacacttgtcctcctatggtttgaggaggatgcccgaaagcggcgatccggctacggctggacgccgtttttttgttgcttctgggcggtacaccggcgtatccatggggcggcaaaacacccatagggcggtaacttgcccatggggcggtttgaaggatatgtgaaaccgcggaattaagccattctggcataccgccccatgagggttttaccgccccatggggtaatcaccgccccatggggatttggcaggcatagcaaaggggagccacacattatgtgcgactccccttacagcttgtaccgtgttagcggcttaggctcacttctggccttgagcggcgacagcggcggcaccggcagcagcagcctccgggtccaggtactcgccacgcggcttgatcggcttgaagttctcgtccagctcataaagcagcgggatggcggtcgggatgttgaccttggcgatctcttcctcagacaggttgtccagcatcttgacgatggcgcggagggagttgccgtgggcagcaatcagcacggtcttgccggccttgagctccggctcgatagcggactcgaagtacggcttcacacgctcaacaacgttggccaggcactcggcttccggaaccggatcgccggcgtagcgcgggtcgttgttctgggcgtactggtcgttcgggtcgatctcgggcggcggggtggcgtaagaacggcgccacagcatgaacttctcgtcgccgtactcttcgcggatctcggtcttgttcttgccctgcagagcgccgtagtgacgctcgttgagacgccagtcacgctgaaccggaatccacagacgatctgcggcatccagagcgatgttggcggtgttgatggcgcgacgcagcagggaggtgaacacgatgtccggaaggacgttcttctccttgagcagctcgccgccacgcttggcttcggcttcaccctgctcggtcagcggtacgtcgacccagccggtgaactggttggttttattccatgcgctctgtccatgacggagcagtactagtttataagtcatacggttcagtctacagccgcgtgcgcccaaacacgagtattcgtcttattatttcgctctcatagcgccacggcaaccgccagcaccaccgcaaacagcaaggtctggaagctggcggcgggcagagccgggcggaattgacgtttattcacgctggagaccatgcgcacaggtattccggtgcccgagagcaacagcaccgcaccccacggccaccataatgtaccgcacatcagcagggcgatgatccatgcgatgacgcagcacacaatcagcaacgtacgcgcgccggactcccccagccgtacggccagcgtgtgtttgccatgctcacgatcctcgtcgatgtcacggatattgttcaccatcatgatcaggcaggagaacaggccagccgccacagcacccaatagtccgccgacgtccaccgtgccgcacagcgcgtattcggtgcccaataccgcagccaagccgaagaacaggaacacgccgacttctcccagcccgacgtatccatacggatgcttgccaccggtgtagaaccagccggccagcaaggaggccgcgcccacggccagcaaccaccatgcttgggcgagcacgaccgccacaacaccgcatatgcaggcgatggcagcgcaaatcatcgccgcgaacagtacatgcttggccggtaccagtccggatgcggtcagtcgctggggtttgcctgatttcgattcgtccgtgtcacgcccggcgtcagtgccgcggatgccgtcggaatagtcgttcgcatagttgacggcgatttgcaggaacagcgcgactagcaggcacaggatggtcaccggccagaatcggtccatcagcagggtctgctgttcacgggccgtggcgcaggaggccggttctggatatattgcgatgcaggtgcccgaccgctcgatatgcacgtacgccatcaccgccccaaccatcaccgacgcgatggaagtggccaaggtcttgggacgcgcgccccgaacccacaagccgatagacataagcaatccctttcatatataactctggctcccctctctgaggggagccagagtatgcctaatcagccaacgagcggcttgaccagcgggaaggtgatggtctcgcgaatcgtggcaccggtcaaggcgataagcagtcgatcaatgcccatacccataccgccggccggaggcatgcccacgccgagagcctcgaggaagtcctcatcgatgtcgcaggcctcttcgtcgccggcgagtgcgtccttggcctgggccacgaaacgctcacgctgcacgatcgggtcgttgagctcggagtagccggtagccagctcgaagccgcgcacgtagagatcccacttctccaccacgccgggcttggtgcggtggcccttgaccagcggggaggtttcgaccgggaagtcacgcacgaaggtgggctcgtaaagcttgtcctcgtagaagtgctcccacaggtgttcgacgagcttgccgtggttctccacgtcgtcgcgctccacgccgagcttgtcggcgatggcgcccaaatgctcaacggaggtgccgggatgctcagggccgccgttcggcacgatttcctcgcccaatgcctcggacagcgaatcgtacatgctgatggtcttccattcgccgccgaagtcgtattcggtgccgtcgagcagggtgaccttgtgcgagccgtagacgtccatggcggtcttctgcacgagctccttgaccagctggccgatggaatcataggtgccataggcctggtaggcctcgaccatggtgaattcgggggcgtgcgtggcgtcgacgccctcattgcggaagtcgcggttgatttcgaacacgcgatcgatgccgccgaccaggcagcgcttgaggaacagttccggggcgatgcgaaggtacaggtcaaggtcgaaggcgttcatgtgcgtggtgaacgggcgggcggccgcgccaccgtgcagggtctgcagcatcggggtttcgacctcgaggaagtcgtggtcgtcaaaggtgcggcgcagggaggccacggccttggagcggttgcgcaccatgttgcggatgttctcgtccgcgatcatgccgatgtacggcttgcgggtgcgggtgtcttcgttcaggtccttgtgcagggccggcagcggctgcagggccttggaggcgatagcccactcagtggcgaatacggacagctcgccggtcttggaggcgatgacgcggcccttgaggtacaggtgatcgccaaggtcgacgagctgcttgaactgcttgagcgagtcggcgccaatctccttcttggagatcatgccctgaatcttggtaccgtcaccggcggacagctgcacgaagcacaggccgcccgcgttgcgcaggaacagcacgcggccagcaatgccgaccatgtcttcggtctcttcgccagcctcgagcttgccgtcatacttggcgcggaccgcctcgatggtgtcggtgacgtccaagtgcaccgggtagggggcgatgccggcctcaagcatcatcgcgcgcttggccacgcgcatctgcacctgctcggggtgagccagcgggccgaactccttgttggaggggtccacggcttcgtccagcgtggcaccggacttgatcttctcgcggatggtggcgtcctgctcgagcagcatttccgcacgttcgacggtgctcatctgcgggacggccggggtttcattctcagtgttttcggtattttcgacaacttcagccatgattcatcagtgtacgcaaggccggcgattatgagcccggcagaccgtacggccatctgaacacccgctcacatgacgcaaaaccggctctgcacaaggcttgagagacctgtacacacggcgaatccaccatcacgcaacactcgcgacatgccgatttgcattgtccaccaccacaatgtaatatctacgtctgttgccaaacgggctgtagcgcagcttggtagcgcgcttcgttcgggacgaagaggccgcgggttcaaatcccgccagcccgacaactggaccggattgttgagaaatcagcaatccggtttttcgtttcctaacccaacaatcagaccaagcgatcggacagcggtaaacaacccgccgcgcacagcgacaaaccgcgtcgcggcaaggcccgtatttgttggcggaccaccgtaatatatcgctcgaatcaatcgattgccgcactgtttttgtaagtaatactgaagtaattagaggaaccatgaagaagagtctgcttgcactggcttcgggcgcgttcattctcggtgccgccgagttcgtgatgatgggtattctgccgcaggccgcggccgccaccggcgtggacatccccaccgcaggccattacatttccgcgtatgcgatcggcgtgtgcttcggcacactgattctggtgttcggccgcaaggtgccgccgaagaacctcatcatattgtttatggcgattgccttggtaggcaatctggcttccgcgttctcggtcaatgccgccacgctgattgtcgcgcgcttcattgccggcctgccgcacggcgcatttttcggcaccgccacactcatcgccaaaaccttggccgacaagggcaaagaagcacaagccgtatcggtaatggtcaccggccaaaccgtagccaatatgctcggcgtaccggcgggcaccttgatggctgagttcctatcctggcgcctcgcattcggtattctggctgcatgggcggcaatgaccatcgtgctagttctggcatggatccccttcgttgcgccgattaaggacgccggcatcgccggtcagttcaaattccttactcgtcgtggaccgtgggtgattctggccgccgtattcaccggcaacgcaggcgtgttctgctggtggagctacgtctccccttggctgcagaagaccggtggctggtcgtctaacctggtaccgctattgatgatgcttgccggcttcggcatggtgataggcggtcttatcggcggtcgcatcacagataaatggcgccacgccggcactgccgcgctgggtcagacgatttcctgcatcggcttgctgatggttttgctactgccgggaaaccagggcactactgctttgctgaccttctggatcgccttcggcctgttcttcatctccgctccgcaacagctgttgatgaccgaagccggccaaggcggcggcgagctcatcgccggcgcagccgtgcaggtggccttcaacttcggcaatgccatcggctcgattgtcggcggcgcgatgctcaccactttctcgatgaactatcgctataccggtctgggcggtatgccgctggctctgcttgccgtagggctgctggccttctactcgtggcgctgcgaaaccgataccgacgccattcaccgcatgcgcgaaatcaaggtggactgagaccaagctcacagcaaactccctgacgcgtttgtttacagtattaatagactgaaatcagacacgattcagggaggtctggcggtatggacgaggaagcactgctcaaacaattcgccgcacaattcgcgcatggtccagacgatgccgacgacaccgatgcggcggccgcagcgcaaggtgccgattctactgcgaaccaggccacggacgatgccgatcaatcgcccgcaacctttgatacccaacaattcctgaacggactggacgcgattttcgatcgccacgcggcagccaccgaagccggtccgtacttggaacaggcgatggtggacgcggaaaacgccggcgacgaggccggactgctcaccgtactcaacgaaacgatgggcttctatcgctcgcagggccggcacaaggagaatcagtggattgtgcagcgggcgctggaactggccgctcgtatgggcttgaccaccggcacatccgaggcgtgggccaccacgctaatcaattgcgctaccgcgatgcgcgcggcccaacaatacgatcaggccgaggatttgtatcatcaggcgcagagtgtctgccggcattcgctggcacccaccgaccgtaggctcgcagcactgcacaacaatctatcgatgctctacagcgagacgaatcggcccgacaaggcggaactggagttgcgtgaagcgctgcgcattatcgaagcctcgagcgtgaacccggacgcggatatcgacgtggccagctcgcacacgaatctggcgttgaccctgctgaccgaacacaagttggagggcgcgcattggcatgcagccaaggcactggaaatctatcgcaccggccatctggaacattccgcgcattatgcctccgcactggcgggcttcgcgcaggtgtgctttgccgagagacggcatgcggatgcagttactggataccggcatgcgctggccgtgatcgagaaatgttacggcaaggacaccgattactggcgtatcaccgccgacaatctgcggcaggccgaggaagaggcggcgaaggccggggtgacggttgacaatgcgggtgttgccggcgatgcaggcgcgctgccccagtccgaatcacggctgccggacagcccggcacagggcaagaccggtgcgggcgtcgaggcacaggtcggctccgcgtcatcggccgtggacgcggatacgccgggcgcattggcgcaggcgttacccgagaccggtgcgaacgcggcgttttccccatccaccgtttcggtgtcgaccggttctgcgggcgcggccgaggccgtttccgcatgcccggtgtccggactgaagctggcccgcgcgttctggacgcagatgggcaagccgatgattgcggcgaagtatccgcagtatgccgggcgtatcgccgccggtctggtgggtcatggctcggaatgctacggattcgatgatgcgtattcgcaggaccacgatttcggcccgcgcttctgcctgtggcttacggatgaggattacgcggccatcggcgagcaacttgaggccgattacgaggcgctgccgcgcaagttcagcgtggatgcgcaaggccgcgtgacgttcgaggcgcatgccagatccgatgcttccgggacattcccctccgcaggtgcaggctccaccgtcatacccgatgcgacaaacgcacccacccccggcaccgctacggacgataccgccactgccgagtcaggcgcggcgtcctctgatgtggcggaagcgatgacgactccgattgatgcaccgctctcccccgtcacgccgcgcgcacagggcgcgaatcgccgtgacggcgtgttccgcatcggcgacttctttgagtcgatcaccgggtatcgcactgcgccggcgcagaccgcgccgcatgagtggctgatgcttcaggaatcgaccttggccgccgccaccaatggcgaggtgttcgccgatcccaccggtttgttttccaagacgcgccaagggttcaaaaacatgccagacgatgtgcggctcgcgctgatctccaagcgactcggcatgatcgcccaagccggtcaatataatctgccgcgttcgttgaagcgcggcgacggcgcggctgcatggctgtccatccacgagttcgtgcaggccaccgcctcgttggtgttcctggttaacgtgccgatggtggtgggctatatgccgtattacaagtggcagttcgcagcattgcgcaagctgtctggctcgatgttcgcgctgttgccgaacgtgggcgaacagttggaaaccgtgatgcgattgagttcggcagcctgctatggaggggccggattcggcgaaggcggcaagggcgcggctacagcaatcaagaaaatcaacgatatcgtggagcagattgcggcggatatcgtcaaggaactcaaacgcgaacacctgaccacgtccggcgagaccttcctcgaatggcagcgcccgtatgtcgaggaccacatcgcctctgatgatccggtgcttaaaagtttgtagattcaagctccttctgtcacggcttcgccgtgccatctccctcatcagagggagatattagtgaaaggaacgtcgatgaccaacgaactgactgatgatgaactgcgcgaggctattgtgcgccatgaatgggatcagttccagcgcaccaacaatgagggtggacgcgcggcatgccaaggcaactggccggtgttccaccagatgcggctggcccagttcctcacatgggagcggccattactcaccagctatgccgctgatcttgacgcggccgaccacgtgggccgcaacctcgtgaccgaaaaatacggccgcatgatggcctccaccgcgccggaagatttcacgaagaacatagagccgtatattccgcgtccctctgaagagcgcgtggcccgtcaggaacaggtcatcgcccagcaggtcgcctgggccaaggatttccgcgagcgctaccccaagctcggcgaggcgatgcgcgtactcaccaccaccgaagacacaccatctgccacctcattcgaaacctatctgcgcggcgagcttggtacgtattccgaacggaccttccagctctacgaggtgatgattagcgagcgcgccgcagccagcccgcaacgcaatatcactgaggaaaccttgttgcgcacagtccagctcggcggtttcgacactttggatgaggctgaagccgctcagcgctgacgacagtgcctccacgccgtcacgccccatccaccttcccgaatttgtgacgctcacggcggctcagtggcacatattcgggaaggagccggtaacgaccgtgaatatcacagactgaacaacccccagaaagacaatatcgtcaatgtgacaagtgcagccagtgtcaccatcacgcaaatgacacgacgcacgccgataatgctggcgcgataccgccacatacgttccagttcccacgcgaacagcacgaccaacagcacggtcagcacctgcaatgccctccacccaagggaaaacaactgcggttgaggcataaccaatacagccgatacgcctacggcgctcatatagccgtacaacagcacggtaatcaccatcaccgctgtgccgataccggcagataagccggcaatgccgtgcaacgtacgctgttgggcggctcccagcccactcggcgtcgcatgcatggcacgcacagtcgccacactacgtcgcccggccagcaacgtctgtagccaagaaaacacagtcaagccaatacctaatatcgccgccatcacgatcagcacgggccctgccaccatcagaccggccagcacgccgagcgagccgacgataccggatctggtacgttgcggcgcggcgaagcgctggtgaggtgtcgcaccggcgacttggggcgttgcccatccatcggctttggttccggcagtcacaccgttcacccaattttccagcgcttgcgtatagccttcggccaatggcaggttcggggtgaataagccctcaccagcccgcatctgatggttgccggcaaaatagcgtacggtgacgttctcgttgccggacttgttggccgtggcgatgatccgctgcgccccctgttcgatgggcatggccgtatcgtaggtgccgtagttcaccagcaccggcatggtgagggatttcagataccggtcggcatcaaagtcggcataggccagatcgaatggcgcgtagtccagcgacatcaatttggccatgtctttgaccacgggcttgggcgcgccggcctcatgcgtataggcgctgacagccatggccatttgctcacgtccattgaacaccggtgcggatgtaagtatggcaaaggcaatgtcttgccgtttcgaggttagaatcgtggcgatccaggtgccttcggattcggcgtagatgccggttttggcggggtccacgccgcttatgccacgcagcacgtcgagcgaacgcccgtattcgcgagcaaaacgcgggtagtcgcgatgcagcacggtgtagttgtcgttgcgcttggccggcaccaaggtcacgatgccggcagaggccatggcgttggcgatatcgccgaaatcctcggcaccgctggtaccggacccgtgaatgaacagacaagccgggcgtggcccgggagcgtcgaccggttcacgtagtacggcgggtagcgtgacgccgtcgccggtcttgatggatagtcgggtttcacgcgtacgatatcgcccctcgtggggaatgttcgcatgggcaggggtgatggtggtgtcggcagaagcgataacgatgtgcttggtgtagggccgtgtgttccattgcgacatcatcgcccagccaagtgtggcgaataccagcgtcatcgccatcgcggtggcgatgacgctcgctacccgccgcaccgaaatccgtttcatagttactatgcctccccccatcagcatagaacggtcggctcttatcggtcggctcccgtcataatgtgcttctactgggaccgtaatgcaatggttgtaacgctattttctcttcttgacggcaccgactatggcccatacaacggccactattaccagaataagtcccactacggcgcagataatagccgtcagcaattgcggattcggcgagaacagcgaaatcatccgatccggagatatgcacccgaaaaccagcgcgatcacgccgataatcacgcctaatagtccgaataccacagtaagcgcgctgatgctctgtttctggatgttcttggcactcttgacatccttagcattctggacgttcttggcgctccccccaggctggcatggtttgccggcggtctgagactgctcataggaaggttgcgctgaagatgctgcgtacatcggtacatcatcggcagatggaatcggcccaccatccccctccacggcatcggcaactgtttccagggcaatccgatctgtggttggttcgatgggcgatggagaggcagctgttgcctgcgtatccacatccgagaccggcgcatccgcatgatcgtcggggacgggtagcacagccgttttgtcattatccgctgcggatggcagcaccgtggtatcggttcggtcatcgacggtcaccatggttgtggtcgcggtggtcgcgtcggtttcggaaggtatggccgtggtcggtgtcgcatcctcgatggaggcgaattccttggtttcatcagtcatgattccatctcctggttgtaacggcttgatcattccgattgcccggttgtgttcttgcttgtgctgttgccgtcgtatatatcggcaagcggctggaacgtggagtctttccaatcggaggcgtacaccacgttgacacgtgcttccaccgcatagggaatattgatttttaattctgggccgttgtccggcatggcggatcccttatccagccattcgtaatcaggcccattcatgggattggtggcgctttcagctccgaagaaaacaaagcttagacccatgtagttgttgtataccatctcgtatttgccgccgacgtcactcgaagtggagtaggagtcggcggtgccgaaggcgtaagtgcaggaatccggcagaacgatatgcacttgcgcctgtgttgcggctatggtgatggtaccgaccgggcaattactgatggaggttttgccatccagcatcttcactgtgtgcggtccatgtgtcttgtcccaatcggaccaatcaatgattgcctgatcggtgttgtagttttcaccgttgaacgccacaccttgctgcaatgtttcgaacgtggcatcgctggcatcggcaacgaagatgccatccttttgtacatcgttcatgccgtcgctgtttctcgcactgacagattggctcagtgaaacaacagtattgatgccgctggcaccaatatcacggtagtgcacgccatacgtgcctgaaacgatggtcatgcagagcgcgcatccaccggcaaccagtccgagaggaatcagaccaccggtacgccgccctctgaatccgagaatgatgaccaccagccccatcactatgcatactgcggcaatccagatggtgctcagacgcataatgccgataatgcccatgtcgtttacccaaatcagtcccatcagaccggcaaaggagaggaaggtaaggcccagtatgctcaagaccacgattgggcccgccggcttgcggcgcttggactcggtgggggcataagccgtcgcgttcatacggtcgggggcaaacggcccgttgggtactgtgccgggcatcgcgctgggcactgtgccgggcatcgcgctgggcactgtgcccggcatcacgctgggcatcgactgatagacaggctgtgaaacaggttgtgaaacactaggcgcggttcgtgaaacagattgtgaaacaggttgcggagctgaatacaaaggagatagagggaccggttgcgcggctggatatgaggcaggctgtggagctggatacgacacaggctgtgaaaccggtcgcggcgcagatgccccgaatccgtacccttcctgctggcgaatgccgcttttggccaacaaccatagcgctaaggcggcgagcgcaatacaaacccaccccgcacctggaatcacgattgccacggctaggaacaggaagcatccaagacaattccagtcccattggccggcaatgaggtcctcggccaagatgtgcccatcgcgtacatccggcatcagaaaccagccgagtgcgtacagagctgcgccaaaaccgaagaacaatgtacatacaatcaccaacgcacgtactaatgtggggctccagccaagccgtaaagcgatgccgctgcatacgccaccgatccaccggtcgtcgccgcgaaccagtccactggatcgcacccaagtgaagaagcgtcgcgatatcttgtttttttgcggaccaggctgcggctgtggctgatacggattcgcgtttggattgctcatgattccattacaccgcccgaccactgccacaacgctcggggaacaccctgattgttccctgaacaccgggtaaaaccccggccgcaacgccctgagcgcggcacaataggagtatgacgtcatctcccgaaccattgctgcccgcgcgcatgccgctgatgcgcccccggcagggccgctggctcaccggcgtgtgcaagggcatcgccctgcacttgggcatcggcgtgacatgggttcggattgcgttcatcgctctgaccttcctctacggcgcaggcatcatcgcttatgtattcctgtgggtgttcatgcccgccggagacccggtggcggctgcggctcgcacagtgcccgttgatcaggcgccgcttgcgcgaggcaatcagccacttgccgctcatgacgacgaatcggctgccgcaccggaatcattgtccgaggccatccaacgtgctccgaaaccggccgtcgtggcattggccggtttcgcgttgatggccaccggactgctgctcaccagcaccggtgcggatgcccagattgtgcttccgctgctggtagggttgggcggcatcgcactggcatggatgaatcttagtccgcgaggcacgcagctgttgtctatgttgggcggcatcgcactgattttcatgggatgggcattgtatgtgcataatgtcagcattcccgggtggggcacctctcctcgacgcattgttgccagcggattcatgatgatcgtcggtatcgtggtggcggtgatgccgtgggcgaacgcgatgctgcaacgactcacccacgagcaggcattgaaggagcgcgaagaggagcgcgcggacatgaccgcccatctgcatgatggcgtgctgcaaacgttggcgctgattcagctgcactccgaggaaccgactaccgtattcgccctggcgcgtagccaagagcgcgagctgcgcgaatggctgtatcaggaacgttccacatcggatcgttcggtgggagccggattgaagcagatcgccgccgaggtggaggacgagcacggcaaaccgattgaggtggtcaccgtgggcgacgcgcggccgagtgcccagaccgatgcgctgctggacgccacccgtcaggcgttggtcaatgcggtcacgcatggcggcgagccggtgtctttgtattgcgaggccagcgacacgatggttgaagtattcgtgcgcgaccatggcgaaggcttcgatatggacgccattccgcccgaccggctgggcatccgcgaatcgattatcggccgcatcaaacggcgcggcggtacagtggagatagtgtccagagccggctggggcaccgaggtcagaatgcatatgccgatcgcgctgaaagcggcgcagggagaacatcgatgagcgagaacgagacagccaagattcgtgtggccgtggtcgatgaccatgagatgttccgtgcgggcgtaatcgccacattgcgcgattccttcgatatcgtcggccaagcggcggacgtgcccggttcggtggcgatgatcgcacagaccaagccgcaggtggtgttgctggatgtgcacgtgcccggcggtgaaggtggcggcggtgccgagatcctcgccaaatcgcggccctactcccctaccaccgtgtttctggcattgtcggtttcggatgcgccgcaggatgtgggggcggtgattcgcgccggcgcccagggctatgtgaccaagacgattaccggcgctgatttgatttcatccatcaagcaggtgcatgagggctatgccgtgttctcgccaaaactggccggttttgtgctttcggcctttcagggtgtgccggcggcggggtctgatggcggcgctgatggtgcggcacgggctcatgatgaggagctggaccggctgtccgcccgcgagcaggaggtcatgcggctgatcgcacgcggatacacgtataaagaggtggcggccgaactgttcatttcgatcaagacggtcgaaacgcacgtgagctcggtgctgcgaaagcttcagctttcgaatcgcaccgagctcacccgctgggccgccgataggcgcattgtgtgataaacgacagatgagctccctcatcagagggagctcatctgctcatatcactcggcgtcgcggaaaccgttggggttcttggtctgccagttgagggaggaggcggccatgtcgtcgatggtcagctcggccttccagccaagctccttctccgccttggaagcgtcggcgtagcaggcggcgatgtcaccggggcgacgcggcttgatcgtgtacggaatcggatgaccggcggccttctcgtaagccttgatgacctcaagcacggagtagccgtggccggtgcccaggttgtagacgaacacgccttccttgtcgatgtggtcaatgacggccacgtgacccttggccaggtcgaccacgtggatgtagtcacgcacaccagtgccgtcgggcgtgtcgtagtcgtcgccgtagacctggacttccttgagctcgccgaccgcgaccttggccacgtacggggtgaggttcgccggaatacccttcggatcttcgcccagcaggccggactcgtgtgcgccgaccgggttgaagtagcgtagcagcacgatggtccaggacggatcggccacatgtacgtcgcgcagaatctgctcctggaacagcttggaggtgccgtacgggttggtggtgccgccggtcggcgtctcctcggtaatcggcagttccttcggcgtgccgtacacggtggcggaggaggagaagatgatcttcttgacgttgtgcttcttcatcaccttgagcagcacaagcgtggagtacaggttgttgtcgtagtattcgatcggcttggccacggactcgcccacggccttgagaccggcgaagtgaatgacccaatcgatgttgttttcggtgaagacgcgttccataagcgcctcatcgcgcacgtcaccgtcgtaacgcttgaccggcttgccggtgatctgctcgacgcgctcaagcgccacgggagacgagttgccgtagttatctacggaaataacgtcgtagcccttgtcgagcagttcgatgtcggtgtgggtggcgatgaatccagcaccgcccgtaaccagaacagtagtcatatctcctcctttggaaggacttgccttcggttttccttcagtattgagcttacttcacttgacctgtttcacctagcggcaaaaccaagactttcgaggaatgtttgcgtggtggctttctgcttgaagacggccgtgttgccgaggatgcggtagcagacgctgccgagctcgtcacgtacggcttggtggatggcctcgcggtcgcggtttccggccaatgtttcagcgagttcgccccattcgagactgaattcgctgacttcatcgggcaaatcgcggccttcggcgagcgcctcctcgacgatgccgagctggtcgacgagccgtccgggcaggatgaacaggccttgggcttcgatcagtccaatcggctcctgcttgaccggccagtattcggggtgtgcatggaaaataccttccgggtactcgtcgctgatcgcattgttgcggaagatgagactcatctcatagccacgttcggtgatgatcgcgctgggcgagagggcggattggcggttgccgtccgcgtcatggctggcgatgccgttcgccgcgtcgtcataaccgacccatgcctcgcggatgatgtcggatacgtcgatgatgctctggcggtttttcgacaccacacgcacggcggtaccgggccagtcgaggatttcgaccacggcgtccggatagtcggcgagcgtgaaggcggcccaagtggcggccttgtgcatcggcagcagttcgccgccgccctggtagtggtcgtgggcgagcaccgagccgccgatgcgaggcagcgcggcgttgcatccgaggaagtatccggggaagcggtccacgaagtcgagcagatggccgaaggtgtcgcggtccacatgcatcggcgtgtggtcggtgttcacgcagatgccgtgctggtcgaagtagccgtagggcgagaactgccagaaccatgactcaccgccgagcgtgaccggcagggtgcgcagcgtgcgcttgtcacgtccggcgaagccctcgttctcatggcagatcgtgcacttcgggtagccgccggacacggcgttgccggccgccgccttcttcatgttcttgaattcgggtttggcgaggttgatggtcaccgtcagcccgtgcgagtcgaagcgcgggttccggtcgagctgggcacgcttgacataattgttggccacacagtagtcgtagaaccattgcatggcggccatgccgccgtccctgtgctcgatgagcaggaaccggtcgtcgagatcggcggggttggcggagaggatgcccatgatggtgtcggcgtaggccgggccttcctccggatcgaagaggccggcggttgtggcggcggcgcggaaggcggcgagtagggggtcgggggtcttttcgtcagagggggcctggcttcggctgccgacaatgtcttggactgcgtctgacactgacgccgccgacgttgtggttttgggtccggggtaggaatccaggtggaagagggcgaagatttggttgcgggtccagtctgcgttgcgtggatcgaggtcgagatgatccaaggcgtaatcgactagggcgtcgatgctggcgtatacctcggtcagctgatcgctcattgctcggcccccatcatgctggttcgggtatggttcgactgacggctcacttggcagcctccatgatgtcggctacgatggcgtgggtttcactggccttctgctccatctcctgcacgagtttgatctgggtgcgggtgcgcaccagattgtgctcggggtacttggtggcaaagtagatatcgccttccaagtagtcggcgagaaagcgcatgccgcattccatggtgagcaggttgccgctgaacggcagcagttcggcctcgcgcgcggtgatgctgccacgtagttcgcccacgaatccttccgtgtaggcacggaacagctcggtgctgaaatgcaccttgctgaggtccttttcgtcttccagagcagtggacgcaccaaagcgtatggaatcgccgaagtcgaacagcatggagccgggcatgatggtgtcgagatcgatgatcgcacgcgccttgccggtggtggcgtccatgaggatgttgttgagcttggtgtcgttgtgggtcacgcgcaacggaatcgaaccgtccctgagcccatccatcacgacggcatactggtcggcgtggctcagatagaagtcgatttccggctggcatgcggcagcgcggccgagcttgtccgcggcgagggcggccttgaagtcctcgaaacgatgcggggtgtcatggaagcgggcgatggtttcggtcagctggctggcgtcgaattcggacaggaagttctggaagtcgccgaatgcgctgccggcctcgcggaacacgtccgggttcggcacgaggttgtacgacacggtgtgttcgatgaacttgtagacgcgccatgcgccgccatcgatctcggcccaggtggcgccggaggtggtgggcacaatgtccagcgtctctttgccctgagccttgagagcggaggtgaccagttcgacattgcgcatcagattcaccgtatcggggaagatgctggtgttcatctgttggaggatgtagcgggggccgtccgtggtcaccagataggtggtgttgatatggccgtctccgtaaggttcgatgccggtcacggcaccttccagcgcaaaatgcgaggcgatgccgaataaaacttcattgctttcggtcatgatgggtccgttctccaaaacgcgggaatcaggcttcacgccatgcgatgccgctgtcgggcaggtcgaagtcctcggtggtgccatcggccagagtcaccgtggtccgctgcggctgatcggtgttgttgattacgcagtacaacccttgctcggggaagtgcgccacctcgcactccgggttggacgagctccaagccgcatacttgtcttcgttgtgggaggcgtagaacagcacgcgttccagcagtcgggcgttggccgccgaatagggcagaccggagatgtacacaccgcggccttcgccataatcattggtcgcgagctgcacctgcccgccgtccgcgcgcagcagggtcacgttttcattgaccggatacgtgttgagcacgggttcgccgaagtcgatgccgcccaacggcttgatggactggccaccgccgcaaccgctcagcgggatgcggtagccggcctgttcccaagcctcgcgggccgccgggtcgaccggcacatcggcggtgatgaagtggtccggcaccaccggtgggaagtacttgtccacggagagggtctgatagcgctcctcgtccacgccaatcacgtcggccagctggaagaaccggcccgcttggaagcgcggtgccgagctcggctcgcccacgcccacgaacgcgccgccaccacgcacccaggcgcgcacggtttccacgagcttcgggttggtccacacgtcgccgccggtgaatgcggtgtcgaccgggccgccgttgatgattacgtcgatatcactatcgatgccatgcgcgagtacgtcgtcgaagctgatgaaccgcacgttcacgcgcatgccggacagggattccagaatgccgtagtaggagtaggtctgcttgttgggcagggcgtgtgccacggtgaacgccatccaggaacgcatcttgccccaggaattcagaatcgccacgttgagctcgccttcggcggccaccccaccggtgcggtcgtggatgtcgcggaattcgtcggcgatatgggtcaccgtgtccacgaacttcgggaacttggcggccaaggagaggtagccaccgtagcccatacggccgatcggcgaacgcaggatcgcgcggcgggccttacgccagttgtcgaggccttcgatgctcgggtcgttgccctcgtagaacgtgtcggggaagaagtacggcaggaagcgtccttccgtgtatttgacgcccggaatgtccgcgatcatgcgggtggtggtgccgtctccgatggagccgacgaccgcatccaaacccagcttttcgaacccgtccttatacggttcggtaccgatccactggtcgccaaggaacatcatggcttccttgcctgccgcgtgcgacatgtcggcaagccgcttgacgttctcgcgcacgaatccggagaggaagtcaatccagtcgcgttgcgccttgcggggcacgcgccacgcggagttgtaggcaccgccatccacgaaatcctccggacgcagacggtaaccgtactccttctcgaaatcgtccaatgcgcgcgggctcacggtgcaggcgcaaccgaaccagtcgaccaccttttcgcgacgcttggcatcgaacaggagcgtgaactggtagaagaacgtggtgaaacgcaccacatccacctgcgggctgtccttcagccactgctcgaacgtatcgaacacgaacttgcgggtggccggatggtagatgtcgaacggaatctcgtgttccttgtctccccaatcattggtcaggtggttgtacatctcgaccgggtcccagatgatgtaggccaggaaactcaccgtgtattcgtgcatcggcacggcagcggtcacgtgcacggtgtcctcgcccgggtcgagcgtccagccggacgggtccacgacctcacccgtggtgcggtccacgacttcccagtacttgtgcgggtcggcgtcgcggttaggcttgagctgttcctcgaagaagccgtccatcagcggcacgtccaccgtgtcggattcagccaggatacgggcggtcagcaggtagacctgcggggtctcgtccatgtgcagggtgatccactcgttgtgggcgcgggtcgggaagtaggcgctgtagattttcttgccaagagcgagcactgcctcgtccagatgcgtgccgtcggagttgcggatggcgtccgcaccccacaattcggcgagttccttggtcttttcggcaaaattctcttcactgggcagcgtgaagcggccggtgctggtcatgagtgctcctttgtggggttggtcatcaaaaaaactacaaagcgacgaattcgtcgcatacaaaatgaccggcgtcatcgcgggccctgggaccctgactgcgtagatccttgacgcttacggtgacgccggacgattggaatcgtgtcactgaatatgggagggacgttgcccggcaccggaaggagtgacacgacatgccgggcagcggattggttagcccttgacggcaccggcggcgaggccggactgccagtagcgctggaggccgaggaacagcacgatcacgggcagcacgccgagcaacgcacccatcatcagggcgccgcgatcggtgaacgtggccagcgagaccatgccgtacagaccgagggtcacgggcttcaaggtgtcggaagacaccatcatcaacggcagcaggaagttgttccacgtggccacgaacaggaacaggaaaatcgtcaccatggccggggccaggagcctcagcacgatggtgaagaagatcctcgcctcgctcgcgccgtcgatgcgggcggcttcaagcagttcgtccggcaccgaactctgtgcgtacgtgcggcccaggaagaagccgaacggcgaaacgcagcacgggatgatgatcgagagcatagtgttggtcaggtgcaacgtgtggaagatcgagtacatcgggatggtcagcagggcggacggcatgagcatgcaggccataatgatgccgatggccgcgttcttgccgcggaagttgaattttgcggtggcgtagccagccatcacagacacgatggtgccgatcaatgccgagacgcccgagtagatcagggagttcagcacccagcgccagaagttgccacgagtccagccaagcagcttggaatagttagtggcgatggcattgggcagctggtcaagcggcacagcaaaccacatgccgttgctaccggtcatctgggccggcgtcttggtggacgcgatgatggcccagtaaatcgggaacaggaagtagatcaacaccagtaccagcagcaccacggtgagggtcttcacggccgcggacggtcgcatggagcgaggcaaatcgtgttgcgcagcctgacgctgcttttcgagcttgcgctcggcctttttgcgggcgcgttcttcaacggttgcggagctcattactcgttcaccttcctttcggccaaggtgtacagcacggcaagcacacctgcgatcagagccatgacaatggcgatggccgaggccggaccgtcaccagacggggtaatggtgccctgagaagtgttcatggccatcatcatcggtgtatacgacttggaaatacccggatcagccgtagacatgatctgcggttcgttgaacagctgaatggtgccgacgatggaaagcagcatggccagcagggccgcgccacgcacgttcggcagcttgatcttcgtggcaatctgccaaccattggcgccgtcgatacgggcggcctcatagaggtcatgcgggatggcctgcagtgcggcaaggaaaatcagcatgttgtagccggtgaaggtccatgtggtgatgttggccatcgagccgagcacgatgttcttgttgaagaagtccacattgacgccgatggcggcaagtcccttgacgatcggcgagatttggccgttgtacaggtagacccagataatcgaggccacgacgccggggatggcgtagggcaggaagtagcccagacggaaaccggtgacatgcttgaccacgaacgagtcgatgacgatggccaacgccagtgcggcgatgatcatgatcggcacctgaatcagggtgtagagcagcaccctgccgacgccggaccagaagttgccggaagtaatagcatactggaagttctggaatcctacgaatttattgaccagctcgccaccgccgtatgcgccaccgccctcggtgacctgacggaagaagctggaatagatggcccagatgatgggcaagatgaacacgaaagtgaacaggacggcgaacggtgccatgaacgcccagccggtgcggttctcgcgcttctgagcgccggaccgcttcggcttggcggcggcacgcctaggtgctttgcccttcgcctgagtagtggatgcagtcataatacaaaacctgtcttcgcaaagaacagtaaaacaaatgacaagggccacagcgcccctgcagcaatacccccaaacaatacggaaggccggagtatgtgccccggcctttcgctatggtgatgcgaggcatcggaggtcttggacggccggctatttcaagccggcccgttgacaagacctagtgaggtcactccttgacggacagaccgaggttcttcagcgtatccaccgaggtcttctgagcggtgtcgaacacatccgaaaccttggcagaaccatcgacagccttggcggcggtctgtttcattgcagcgccgactgcggagaagccaggcatgtaggtgaagtcacccatgttgtcgttcgcggtcttgaactcagccatgacatcctgtccgctgaagtagtcggaccacttctgcggggtcttggcatccgcggtggtggcggccacgacaaggccctgggagacaaggtcatcaacctgggtgttgaaccagtcaaggaactccatggcttcggccgggtgcttggcacccttgagcacggccacaccggaaccaccatcggcaccggtcttggtgccattgccgaaccagtcaccgagctgggtgaccttccactcaccagcaccagtgccaccggcggaatcgatgaacagtggggcttcccaagcggcggccacggtgccgatcagctgaccggactggatggagttatcaaacgatgcatcccaacgcgggttggtgagggcggccttgttgtcgatcagctgctggtagacatcggccacggccttggagcccttagtctgggtgttgacaacccaggagttgccgtcgaccttgtaccacggaccggaagcgccggcctggccggacatcatcatcatggcctcatcaggttggaaggtcatgatgtacttgccttgggcagcggtcttcttggcggtctcaatgagctcgtcagcggtcttcggcacggtgatgccgagcttctcaaattcagcggcgttgtagaagtaagtcagcgggccggtgtcctgcggcagaccgtaggtcttgccgtccacctgcatcagtgcgaacgggccggaagcgaaatcgtccttgtacttggcggcctcatcggtgacatcctgcagaaggcccttggtgaagacctcaggaacctcggagtaaccgacctgagccagatccggcgcattgccagccttgacgtcggtctcgagcttcttgatcatgtcggcggcattgccatcgaacttggtggccttgacctgaatgttcgggtgctccttgttccacttggccacaatgtcgttgaccaaggtcatgccttcggaatcgggcagacgatgcatataggtgatgttgaccacaccgccatcgctgccggacttcgtgtcgccggcagtgtcgctgccgccgcaaccggccaaaccaatacccattgctgctaccgcggcaagagcagccacgatgcgcttgttgtgcgataccatatctctactccttcctagtgaaatcatcacctcagcgtgatgactgattgctaatttaggcctttgctcttttattgtcaacttagctaacaattaccgcgcgtcccgttgaggtgagtggcattaaaccgattcgatgctcgattgtgcgggtttgttcatttcattaactccccttacaaagcaacgtacttttggtccaccggtagacctaatgagatattggatagcggcaacaatccaagacgttagcttgcaatcgtccaccacaaattgcaagcacttgccaacattatcggttttcaggttgccggcgcgatacccgactaggggggcaccgcgccttaatgagacgctacacgagcagtctcagcaactggtagagctgccacaggctacgcacgttgaagtgcgtgccgtcaaccgtggcgttcgcctcgccatcgcccacatggacgatcacggtgcgcccgttcacggtcagactaccgtgcatcgtgatatgattcatcttgcaaccttgttgattaaaggcgcaagccggtaatcaacgcaaaggcccgatgccgcaaacgtcgggccttttcttatcggctcacgccgattggcccgtcatatcaacggggacaccgcatgttacggcatcacaaaccaatatatcagcaccccggtggcgatcaagaagacaggttccagaaaaagaaaaagggcctgggcatgttgcccaggcctcggttcgcggacagggcgagattcgaactcgcggagggttgcccctcaacggttttcaagaccgtctctttaggccgctcagacacctgtcctgatgcgcgttcacacgcgcaagtattcattatacagaagggagggatgttgatattcggcagtgcggtcggtcttggattcgcctgctggctattagcgatctctccctcagtcagctacactgacagctcccccattaaagggagctaaagcacgatgagactcaggcctcccacttagtgggctcgatgacttccttgccgcccatgtaggcgcgcatggcctgcggaatctcgatggagccgtccttctgctggtggttctccatgatggcgaccagccaacgggtggtggccagcgtgccgttgagcgtggagaccggacgggtgccgccatcttccatacgctcgcggatgttcagacggcgagcctggtactcggtgcagttcgaggtggaggtgagctcgcggtagcggccctgggtcgggacccaggcctcgcagtcgaacttgcgggcggcggaggagccgaggtcgccggctgcggtgtcgatgatgcggtagggcacttcgaccttggcgagcatctcctgctccatggccagcaggtgctcgtgctccttgtaggagtcctcctgcttggcgtagacgaacatctccaccttgtcgaactggtggacgcggatgatgccggaagtgtccttgcctgcggcgccggcctcgcggcggtagcaggaggaccaaccgcagtagcgcagcgggccgttgccgaggtcgaggatctcgttctcgtgcatgccggcgagcgccacttcggaagtgccgaccaggtactggtcgtcgggctcgcgcagacggtagatctcgtcggcgtgggagttcaggaagccggtgccgcgcatgacctcggggcgcaccagcgtcggggtgatggccagcgtgaagccgtgctcctcggcctggtccacggccatggtgagcatggcgatctgcatacgggccacctggccacgcaggaagtagaagcgggagccgccgaccttgacgccgcggcgcatgtcgatgccggccacgccggtgccgagggtcaggtggtccttgggctcgaagccttcggccgcgaagtcgcgaatctggccaaccttcttgacgaccacgtagtcgtcctcgccgccttcgggagcttcgggctccacgatgttggagagcttccacatggcggtggtgtattcctcggcggcggaatcggccttggacttgtattcggagaccttctgggacagttccttggtctcggcgatgagcttggccttctcgtccgccggggcggaggcgaccttcttgccgatttccttctgctgggcgcgagcctcttcgaaggccttcagcgcctcacgacgtgcggtgtcggaggagagcacttcgtcgacgagttccacggactcgccgcgcttgcgctgggattccttgacgatatcggtgtgttcacggatgaattgaatatcaagcatgggcaccagactagccgcgcaagcagacaccgacaatggccgaatgcgcgggagtcacgcggaaatcacagggaagcccgggaaagtccgcggacgggtccacccggccaatttcgtcagatgagacgcgattgaaccataatcgcgccccacggggctgttgcgtgcaggaaatgttcacgtacggcgcaccatggccgcaaacgacctccccaccgataacaataggagccatgcctcagcctgccctcaccgtgtttctgatcatcgccgcaatcgccattgtggtggtgctcatcgccgtcatcgtcatcgccctgcgcgcgcagcgccgccgcaagctggctcagacgctggagaagcgccgggacgacgaggtgcagtacgccttcatcgtgaatccgtccaaaccgcaggccgaagcccgccggctgcatatccagaggttctgcgaggccaaggggctcaatcgcatccgcttctacgacacccagcttgacaaggacggcagggtctgcgcgcttgaggcgctggaggacggcgccgacgtggtgatcgcggtcggcggcgacggcacggtgcgcacggtggcgagcgccgtctccggcaccggccatgcgctgggcatcatccccatcggcaccggcaacctgtttgcccgcaatatgggcgttcccgtggacgatatcgacgccgcgctgaccgtggccacctcccacggctcccgcctggtggacatgggccgtctcaccctgctcgaccacccggaggacgaccacggccacgccttcctcatcatcgccggcatcggcttcgatgcggccatgatcgacgacaccaaccccgagctcaaggcgaacatcagctggctcgcctacttcgtgggcggcgtgaagaacctgttcgcgccgaagttccgcggcacgctgacagtcaccagcgccgacggctcgacccacaccatcaagaatctcgatttccgcacggtgatggccggcaactgcggccagattcccatgttctcgctgatgccggcggcatcctatgacgatggtctgctggacttcgaaatcatcgacaccaccggcggcatcctcggctgggccaacctgttcggcgacgtggtgcaccagacgatcatcggcaagcccgaacagaacccgctgtccacgaactcgaccatcgaacaggtccagggtgtcagtgccgaaatcacattggaaaagccggccaaagcgcaggtggacggtgacatgctgccggaaacccgccacatccgtttctcggtggatcaccgcgcgctgatcgtgcgcgtgcccgacgcctccgcgctggaaaagaccgcgcaggccgctgcttcaaatgccacctcgaatttcgccgaaatgaccggtacactcgagccgattcgctgattcgccaatccgctaatccgttactacgatgcgtggccggtgactcgggcgacatgcatcgccaaataagcgatttcgtcgtcgctgatatccgtgtcgaggcgcagttcgagcagggaggcgatggttcgcgcgcatcgcagcgcagcggggtaggactcacgaatcaccttcatcaccggtgccggctcgtccgtcagttgctggtgctggtggatgcgtacgaacaggtagcgcaggtgggtgatgaaccggcccacgttcacggaactgcggtccaacgtgatgccgtagctgtggtcgatgatgtcaagcagttgctggatcacgcctgtcatcgtgtacgtataggacaggtcgccggtggcgaagccggcgttgaccagatgcatggcaagcgcggtggcctcgccgtccggcagcgtgacgtcgagccgtgcattgagcgatgcgagcatcgcacgcccctgcgcgtattcctgcgggtacaggttgctcacctcgccgagcagcgggtaggtgatgtcgatgccgcgccgcacccgctccaccgcattcgccacgtggtccgacagggccatgaccagcgtggtgctgccggtctcgcgctcccccagtccggtctcctgcatggattcgacgaccacgcggatgatttcgggcggaatgtccgccagcatctgcgccagatggtcagggtcgcgcccgtccgatggcacgaaggtgcgcacaactttcgactcgtcgaccgtctgccccggcttggcctggaaccccagtccgcggccggtgagaatcacctcaccgccgtcgccgcctttggcgagcacgacgttgttgttgaacactcgcagtatttccatggcatcctttcgcaacgtcattgttccacatcgatgatcgggctgccggctgatacggttttgcagtcgccgccgttgtcgtcgctgctaccgtcgccgatcaacggcgtgaccacggtcagttcagcggcgttgaccaccgtcaccaccaccacaacgctgtgcccggccgccgcgactttgccgaaatccacggtggccagtggctctcccgccgcgatccgctcgcctttgcccacggccacgacgaatccctcgccatccatattgacggtgtcaatgccgacatgaaccagcacttcgatgccgtcatcggttttaatgccgaaggcatggccggtccgggccacggttttcagcgtgccactgaccggtgctagcacggccgtctcgccggccgtctccggcacgacgcctacaccctcccccagcgcgcgggaggcgaacaccggatcgccagtcgcttccagattcatcaaccggccggcgaccggcgacaggatggcgttggagtcaggagtccgatcggaggcaggccgcgatggggaatcttccgcagactccgcatccgacgatgtcgcgccaatccctctcaccgcatcctgcgagcgtacgttctcgcccgccgagaccatctgcgcctccgtggcgcgcggcggcgtacggtacccgaacagcaccgtcagcaccatcgccattacaaacgcaacggcgatggacagcgcgtacacccacattctgtcaaacaccgaaatcgtcagcaacgaggagaaggcgaacgccgtagtcgtgacgccccggaccatctgaccggatggcagcacggatgggaacagccagccaagcaccgcgctggtcacgccgccggccgcgcagccggcgagcagccagcggtagacgcggcggtgatgcagatggatgccgtacaggctcagttccgaaacgccacccagcaatcccgcgagcaacgcccccaccgcggtctgccgcatggccgaatccttgccgcgtacggccagcacgagcacgccagcggtggcaccgaagcaggcaaagttccatacacccatcggaccttggacgaaatcgtagccgagcgcctgaatgttcatcagcatcagggcattcaacggccagtgcagaccgagcggcacgagaaacgggtagagcatcgggatgatgagcgcgaataggaacggtacgtgcgcgttaagccatgctgtggccgctcccagcccaccgccgagccatattcccagaggcccgatgaccagtatggtgagcgcaaaaacgacgaccagtgagaggaatggcacgaacaccagctgtacgctgtcgggaatgacgcgcttcagcccgcggtagaccacggcgagcacggcggccatgagcaatggtacgaagatgttgccactgtagtcgttgagttgaatcggtatgccgaacgccgacacggtgcaggtttcggtgccgaatgtggcggtggccgagcattgaatctccccggagagagcgctggatacggacgtcccggacattccggacatcacgcc

SEQ ID NO: 3152 - DNA, 41463 bp, Unknown
  R53_2m  MAG No. k141_129
acttttttaaagtaagttttcaaaagcaatcattttctccacatttctagaaagttggtttaaaaaagtacccaaaatcgcctacaaatatacgattgttgcctcataatctccgcgtcgaggcacatgaaagccactttcataaagtatacttacatatatctcatcgcacaaaggggtaaatatgagggcaatgccatcgaccgcagtgaaagcgcacaaccgcagtgccatggcccagtatctgtatggccatagccatgtcaccaagcaggaactggaacgcgaactcggcctcagcctgcccaccatcacccaaaatctgcgcgccctagaagatgacggactcatccgcaaaggcgaactgcaggattccaccggcgggcgcaaggcgcaaaattatgagttcaatcccgatcatcgcactgccatcggcgtagtgatgcggtccaacgaactgcgcctgtgcgcgattaacctgtacggcaacgtcatcgaaaaacgcaacgatgccctgccttaccgcaacaccaacgtttactaccagcgtatcggcggcatcatcaacaacttcgcctccgacgtcgaaaagaagcacggcaaagtgctcggcgtctcgttcgccatccaaggcatcctctcccccgacgccaccaccatcaccttcggcaccattatgggcaacacggggcttacgctcgaaaccatcagccagtcggtccattacccgtgcatgatgatccacgattccgatgcctccgccatggtcgagctatggttcgactccacgctcaccgatgcggtgtgcgtctatctggagcgacgcccgggcggcgcggtgatcgtgggcggcaagctgtatcagggtccgaatatgtgcaatggcgccatcgaacacatgacgctggtgccgggcggccgcgaatgctactgcggccagcgcggttgcatggacacctactgctcgccggagaccttgcccgaggattacgaaagtattcccggcttcttcagcgtgcttgagcagggtgaacggcatcatcgcgagcgcatggacgaatggctggattacgtggcgcaggccatcgtcaacgcgcgatccatcatcgcgggcgacgtgattgtcggcggtgaagcagcccagcatcttgaagacagtgacatcgaggatctgaaggcgcgcgtcatcgcacgcagtccgttcggcaccgaccatttcaatctgcgcaagagctactgcgccgaagaccagaacatcatcggtgccgcattgcgattcgccgagaattatctcgacgatatctgtggtgctgcggaacgcggcaggaaatcaagggcttccaccagaagtgacaacacgtctacaatggaggtatgaaaaacccaccgttgcatcgttacgccactcgcccagggctgtacttcactgacgacggtggggctgacgtcgttgttcgttccgaaactgccgatcaggtttggctgtgtgtgctggagcccattgacgagcccggcgccttcttccaagacgccatccgcctgttcgaagacccgaacgcctcgttcatccagcagatccatgagtttccggtgtgcacgcgcattatcgaacatttgtatctgcgcgagaccctgttccgcatgaccggaccgaactacggcctgtggtacgtgcacctgcccaaagcatgggacggcatgcgttatggctaccgcgtggacggcgcatgggacccgaaacacggcgtgcgcttcaatccatacaaattcctgcttgacccgtatggcaagggcatcgacggctccatggagctcacccccgccgccttctcctatgaatgcgatgtcgtggaccacaaggtaaccggctcggcatacggtgccatgagcaccgtagactcgctcggccatgtgccggtatccgtggccatcgacgatcgcgatatccataagcatgagggcgacccgcagcacccgcatgtgccgtggcgcaaaaccgtcatctacgagatgcatgtcaaaggcttcaccgccaacgcgccgtggctgcccgaagcgttgcgtggcacctacgccggactcgcccaccccacaacgctcgcctatctgcagggattgggcatcacctccatcgaactgctgccgattatggccaagcaggacgagctcttcctgcaagaacacggccacaagaactactggggctactccaccctcagctacttcgcccccgaaccctcctatgccaccaaagcagcccaagagaagggcgcggccgccgtgcgccaagaagtcatagacatggtgcgcgcgctgcacgaggccggcttcgaagtcatcatggacgtggtctacaaccacacatgcgaaggcggcgtcgaaggcccgacggtctgctggcgcggcctcgacgacctggcctactatcgccatcaaaaatccaataccggtcgactcgaagacaccaccggttgcggcaatacgctggacttcaccaacacgcatgtggtcacctttgccatcgactcattacgatactgggccaagcgtatcggcatagacggtttccgtttcgaccttggcgtcacgctggcccgcctggaaggcgaattcacccatcatcacccgttcctctacgccctgcgttccgatctgctgctgggcaacctgaagctcattatggagccgtgggatctgggcaacctcggctggcgcaccggccaattctccgtgccgttcgccgaatggaatgaccgcttccgcgacacggcccgcaccttctggcttgaggatgtggacggcggctccgatttcggtcgtatcagtttgcaggagatggccacgcgactctgcggctcggccgatctgttcgccaccgaacccgggcgcggcgctccggcctccatcaatttcgtgtcctgccacgacggtttcacactgacggacctcaccagataccgctccaagcacaatgaagccaacggcgagaacaataatgatggctcgtcggtgaaccattccgccaatttcggcgtcgaaggcgtcaccgatgatccagacgtcatcacggcacgcgaacaggcggccatgaacatgatcggcatgctgctgctctcgctgggtacgccgatgatgctcgccggcgacgaattccgcaacacacaggacggcaacaacaacgcctactgccaagacaacgacatcacgtggctgaagtgggattggatgtattccaccaacaagacacgcgaaatgcgtcgcctgaaaaccgtgtctcgactggtggcgctacgtaaatcactggacctgtatcaccacgaggacttcttcacccgactgacccaactcggcctactcaagccctcaagccgcgtgcagtggttcctgcccgacggcaccacgccgatggagcgtgactggttcgatctgggcgtacgtagcttcaccatgcgattgctgtccaacagtgaggtggacgtgtgcattgtggtcaacggcaccgctgacgaccgcacattccacctgccgccagacactcactggacgcctaaatggtgctcggccgaaatcaacggccgccgagccgggcatggcattcaggtcgaggaatgcgatttgaacgatgacaccaccgtttggacgcagcatgtaccggacgccagcgagacggtacgcacgctggtcgaagaagtggccatgcagcgcacggaatcctcgactgaggatgaagcggataccatcgaattcgcgatgccagcaacggatcacgccgcaaacggcacctcgtccgcgcctcgggatgaggtatcagctgatatgcctgatgcccctgtggatgatacgccggacactcccgtcgacgacaatgtctggaccatgccggcgctgagcatcacgctgatgaaacaggtgtgagtcacactcaaaacagcacgacacaaacacaaaggctctccgcggaattccacggagagcctttgtatgctcggtacaggacaagcgaaattaacgcttggagaactgcggggcgcgacgtgccttgtgcagaccagccttcttgcgctccacgacgcgagcgtcgcgggtcaggaagccagccttcttcagggcggcgcggttggcatcacgatcgatggcgttcagagcgcgggcaacgccgaggcggatagcgccggcctggccggtggtgccgccgccgtcaacgaggacgatagcgtcgaacttgccttcgagcttgagcagaacaatcggagagttgacctcacgctgcagcaacttggaggggaagtactcctccagggtgcggccgttgatggtccacttgccgtcacccggaaccagacggacacgggcgacagcctccttgcggcgaccggtgccgtagcccggctcgatcgcggaggtgccggtgccagcgccagcgttggtctcggtggtgtagttggtgagctcctcttcggtctcgacaacctgggagtcgttggtgttttaagccatgattcttatctcctctcaggtttcacttggcctgctgcgagacctgggcgatctcgaagacctggggcttctgcggggtgtgcgggtgctcggcgccgcggaagacacgcagacggtcgagctgcaccttggccagacggttcttcggcagcatgcccttgacagcgttcttgatgatgcgctcggggttcttctcgagcagctcggcgtaggagtcacgacgcagaccaccgggacgaccggagtgcgagtagagttccttgcccatcttgttgccagtcagagcaatcttgtcggcattgatgatgatcacgtggttgccggaatcggcgtgcggagcgtaggtcggcttgttcttgccgcgcagcaggattgcagcctgggtggcgagacggccgagcaccacgtcggtggcgtcgatgacataccagtcatgagtcagatcagctggcttcggagtgaaagttttcactggattaccttttctatattgtgttccgggtctcagctgcttggcgtggcttggtcagggccgcatccaagaggcatcgaacctcattatccgtgggctccctgaaagtcctcgatggcgagtgggatagcgctttgaaggaccccttagggaaacacaacaatccactagtatatcgccgggcttgacatagggcaactggggacactccattgggtttatggcttctcttcccctatttatggtttctctcccacccacttcggctaaccgactcgcctacggtgagacaattccctgccttctctcagctatcgcttcgttcaggtctcgtctacggacagtccaccggactgtccgcttaacgactcggctcgtcagagggaggtaaagtgggtcaggaattgaagatttgggcgaagcgttggacgccgggggtgtcgaagagggtttcgagcggtaccatgttgcccttggcgtcggccagcgggatgcgccagttcgggtattcgttgttggtgcccggctggttctgcgcgcgcttctcccccaccgcgtcggtgatcgaggcggcgagcagcttgcacggcgaacccttcagtgcgcggtacaacgcgtcgatgatatccgcctcgtgatcctcacgatgttcggcgaagtcggcatcaagatagccctgctcgaccagcatggccagcatcgcatcctgttcggcctttgcggaggcttcgaattcctcagccgggccggtcagcaagcccagacgctcacgaatcttgacgtgctcgtattccaggtaaccggcggtcggcggcaaatcgtgcgtattcacggaggccaatgcgtacggacgccactgggagggggcgcggaacacgccgtcgcactgctcgaaccattcaacggcgcaaccgagaataccgtggctcgacagggaatcggccacatggtccggcaccacgccgaggtcctcacctacgaccacgccgccggcgcgagaggcctcgatggccagaacgcccagcatgatgtctgagtcgtagtacacataagcgccatccatagccgaccggctctcgggaatccaccacaggcggaacaggccgagaatgtggtcgatgcgcaccgcaccggcacgggcgaacatgccatgcaccatattgcggtaggtctcgtagccggtggcctccagattgatcgggctcagcggcggctggctccagttctggccttgctggttgaacatgtccggcggtgcaccgaccgtggctcccttggcgaagcgctcgggattccaccacacgtcagcgccggaggggtgcacgccgacggccatatcggacatgatgccgatatgcatgccggcgtccttggctgcctgctgggcggaggacagctgctcggcggcaatccattccagccagcggtagaagtccaaggtgtccgggtactgcttgcgcagattggcgatttccggggagttgcggttgaacttgcgctcccagttgctctcctcaccgttgggtgctccccacttgtcgtagcacaggcaccacgtggcatacgcctccaagtcggaaccgcagtccgccttgaattggtcgaacgcgctttggcgttcggcggtacggccggccttgaagataatccacagggcgtgcatcttgctgcgccacatggcgtcacggtcgatgagctgggaatcaccgttcagcggttcggtgtcggcatgcagtccgtcgacggcgttcttgtcgcccgcgctgagcgtggcatattcggcgatcgcctcgggacggatgtacgtgaagttgatcaggcgacggcttaccggcagatacggcgacggggtgagcggggacaccggctcggcggcatgtaccggattgatgagcacgaagtcggcaccggtcttctgcttggcgtccaccagcatggtcttcagatcctcgtaatcgcccacgccccaggagttggaggagcgaatcgagtacagctgggccatccagccccacagactgccgcccttcatcgggtcaagcagatcgacgcgatcaggtgcactgatcaaagtggcgtcttgcacacggtcggcgaccttgacgtgcagcgtatggtagccaatcggcagatcggcgggaatgaccacagccgcattcgaaatgaacgtgccatccaagtcgtaggcctgggatccatctccaggaccaacttcaacggtgccctgatatggctcgccgttctccagcgtgatgctcgccgaaggcacgtccagaatgccggtgttcaccagcacccggtcctcgctaccggcgatatgcagcacggtgggtgccaccaatcgggagtaacgctcgttcagaatgcgtcggatggcgatgagttgggcgttctcgctggaggcgtcgatgcccagcgctgccagcacctcgatcaggacgtcatcgtctatctcgtggtagtcatggctcatgcccacataactcgtgccgacaccgaccaacttggccagtcgaatcaacggacgggccagacgctcttcactctcggtaatctcactcatagccccagtctaacgccgtttgattgcgccacaccgtaagcaaaatgccgtgattccgccaaattatgtactttttaccctcacatagtgagatgtgagcgctcacaatggtggatagagggtgattgccggccaaatttgcacggcaaaacacagcaatagtgtgcttagcggcggctttccacggcgtgccgcacctcggccgaggggtcgttggccaatttggcaagcatcgcttcggacgtattggggttcagcgccacggcacggcggaccatcgaggaaagcactgccggtgctccctcttcggattcggtgccaagtacgcccaagaaatccaatgtctccgcatccgcagtggggtcctgcgcaccctcaagccgcatcttccagctggtgcgcttgtttttcaacgccgtatcccggaccgcaggtaccggatccttggtcaggcggccgaccagccaattcttgtcatccccgttggcggccacggcttggcgcacggacggttcggggtcttcggagagtttgaccaatacgttcgggaacggcatggtgtcggcgaggaacacgcgatcggccaccggggtgtgcgggttgccggccacagcctccaaaagtgcggtggcgcgggagaacgccgcctgatcggcacggtcaggcaacggccgacgggcgaattcggacagttcggccgggtcggtggaatgacgcagacgttcgtatgtagcggtcagcggttcgaaatccaccggagcggcggactcggctgcggtctgcgcgccttggtcccgctgctgggcgcccgtgtcgattgcagcctcagttgcggcctcggtgggctgggtctgctggctggtgatgttctcgtcggtcatgatgcccagcttagtcatacaggcgtcacgcgagcggaaccggaatgttgaccacgtcaatcggatccggcaccaccgcggcattgaacgcttcccgcacacgctcctcgaatcgcgcgcaatcatcttgcggcaccaccgcggtcagttcgacgttcaccgcatacgattcatcctcctggttgccaccgagctgcgccaggatctgctggaatcgtgccagctgcgggtattcgagacggacccggtatcgcttggcggtcatgatgcgggcggcgcgggcggctttcatcgccaatgatgcggcggatgagtacgcgcggaccagaccaccggagcccagcagaataccaccgaaatatctggtgacggcaactacgcaatcggtggtgccggactgcttgagtacgtcgagaatcggcttgccggcggtaccggacggctcgccgtcatcgctcatgcgttcggacagtcgcccatccgcgcctccgcacacggcggcatacgccacgtgtcgggctttcggatgctgctcgcggatcgcggccacgaacgcgagcgcctcgtcgagcgtatcgacatgggcggcgtcgccgatgaattcggactttttttcgacgagcgaatcgtgggcgggatcgtcggacgtgttgagaatcgtctgcataagcgtgttccggtggtcggctgactgggtgttcgattgagcgcgaggctagacagggctatcagtgttcggagacgacgacgttatagtcctcgccggcgaagtaggcggtcaggcaggcgatcatctggcgggtgagctccttgaacgcgccgtcggtacgccagccgacgtgcggggtcaggacgatgccgggcacatggcagatggcgtcgtcggcggtcagcggctcgcagtcgaacacgtcgagtgcggcgggaacatcgcccttttgcagtcgggcaagcagcgcaccggattcgatgacttcggagcgggcggtgttgatgaacagggtgccgggcttcacatgcgcaaggttctcggcggtgacgatgccgcgcgtggcgttgttgagcggcagatggacggagatgacgtcgctggtttcgatgagctcgttgagatcgtcgaccggagtggcgccggagcgttcgaaatgctcgggcggcacatgcgaattccatgcggcgacctccatgccgaaggcgcgggcgatgccggccacggtggcgccgatgccgcccagtccgatgatgcccatgcgacggccggcgagttgcagtccatcgccgccggcccacgcccagttgccggccttgacatccttatcgagttggccaacgcggcggatgagctcgaacaggagggcgaaggtgtgctcggccacggcgtgatcgccataatgttcggcgttgcagacgcggatcttcagctcgcgcgccttatcgagattgatgtagctggcgacgccggtaccgcagaacacgatgcacttgacgtgcccctgctcgctgatggtgcgcagcagatcatccgaaatgtggtagccgcccaccagcagggcgtcggcatccttcagacgctcggctacgatcgcctcgtcggacgtgaattcctcgaacatacgcacgcgggcaacgtcgtggagcgcggagaactgggccttgatgggctcgatcatcgcgtcgagcacggacggcatcacgacgaggggcagatcggtgcgttcgctttgggtttcgtaaatctcggtcatgggctccacattaggaggccgacgggaaaagcgtcaccttgcggcttcccctccttgagaccaagccgagcaactattgctttgccgcctgctcctgcgtgatgttccattccttgacgacgttctggtccgcgcccatcgaatagatgacatcccagatgcgttggcgtatctgagcgtcgtaggcttcgtcccaacatgtgcctatgggatggtcgctggatatcgggcaccattggtagttgccttgatgcacgttggcggtgggcacccagtcgatgcggttgacgcgccacgaccccttgacgcccttcttgccggcgaactggatgcgtgcggtcacaccctggttgttgaccaaggtttccggcgtgttcgccgactcggtgacggtgttgcccagaccgtagacaatccacgtgccgttatagttctcgatgggctgcgcacaatggcagccggcaccgtagataacgtcgaaggcaccagtgtcggcaagctcatgggcttccgaaatctgccaggaatcggcgtaatcaaggtattcctgcaccgagtgcatggcgatggccaccacatcggcaccttgctcgcgggccttgttggccttgtctaccgcgcgctggatgtcgctgccgtgattcgggtcgccgtcttcgcgcagacgatccacctgccagtcctcgtcggcggtcatgccgttgagggagaccgtgccggtgaccagacccagcttgccgccgccggtcggggaatcgatgactaacggtttggtggagtcggcttcggttttgtacgagccggtctgggcgatgccatcggcctcaagcgtgtcccacagacgggcgatgccatccgccccctgatcccaggaatggttggtggcatgtgtgcaggcgttgtatcccacgttgcgggcggcatccgccacttccggcggaatgttgaagatcgggtacgcggcatatgggccgccgcgctgggcgatcggggtttcgaattcgcacacggcgatgtccgaagcctgaatgtactgcttcatcggcgcgaacagcgggtcgaagttgaaggcggtgccatccgtggcgttggggttcgggccttggaaatggctccacaatccctcatggaacaacaaatcgccgttgaccagcatggcgatgcagtccgtatccgggcaatccggtgaattgccgtgatgttcggtcaccggtttgggcgtgttcttcgctttattcaacgcgacgtccgacactccggcgcgtgcggggccattgccgtccgtgcgatgggttgcgaaccatgcgccgatgcccagcgtaacggcgagcgtgatcacgaacacgataatcagcgccgcacggttggttcgtgtcgagttggagcgatgttgcccctgcccagcgatatggctcatctttgcccacccttcggaactcttcttctctctctaggataccgcccatctcagtcaaacactgcggggaggaaggcgatgggcaagcgattggacaagcgacataaaccggttaatcttcaatcaccattcacgaacaccacgcaaaagtctcacttagtggacattcttctttcgtttgttagcctttccccgaggtgccgcactcgttcacccgctaaaatggcggtttggaggcggacggacaatggcgtacctccgactccgcttaccacaagcggagaccgaccgtcctcggttatttcggttatttctagcgacacattcccaggaaagtttcgcaaaacagacccccaagcaacccactagaaacacattcccaggaatgcgtcgcaaaacagatatccggacaacccaccagaaccgtattcccggggttcgaatccctctgactccgcgaagtgcgaacaggcccatcatcaggagtttccggaaaacaaaaaagattccaagctttcacccggaaccttaatcggcggagtcagagggattcgaaccctcgagccgtttacacgactaacaccttagcagggtgcccctatcggccactcaggcatgactccacgttacgcaataatgcgcaacagcaaattactgtaccacgtcctgcggatacggcgtgccgaacgacacattattgaccgtccgcgggcgcggcatcgccggagaacgtaacgataaccgcgcaaatcaccaacgccacaccgatgatttcaccaacgctgggaatctcgccaaacgccagtcccacggccaccgccatggcgggattgatggattgcattaccgaaaatgcgccggatgtggtgcgtcgcagcgtgatctgctccaccacatagggaatgaacgaggccatcagggaaatcacaaacagcagagccagcagcttcagcgagccgccgggctcaagcgcccacgtggcatcggccttggggtgaaccacatgagccacagccggcacgccaaggaacagggactggaccagccagccgatggtcacggcgatgcacagattatccagcgaattgccgccagccgccacgcgccggccggtgatgatgtacatgccccacatcgacccgccgatcaaaatcgcaatcagaccatacaaaaacgtgccattgccggacggattggccaatgatatgccggccaacagcaccacaccgaccgccgcgatgccgataccgacccgctcacgccagcttttgccggtaatcaccgccaccgaaagcggtcccaaaaattcgatagacacggcaatgcccatatccatattgctgatggccacataaaacagggtattcatcagcaccagcgagcagccgagcagtacgaccagtccccagccgcgggcgtcgcggtgaaacagctgcgctcgcttagccttgctccagggcctgcaccacagcagcaacagcaccgccatgaatcccacgcggtaccacaccgaatacagcgggtcgagctgggtgaacgcaagtttggcgacggccgtagccaaataaatcaccagtgcctcaccaatcacgataagcaccacgggaacacggttgaggataccgaccactgccttcttcacgaggtttacgctactcggagagtcaggacagcgcgcagcgacttggaaggcgttacggacagtgacgcaatgtggacgattccgtggaatcgcacccaccatgcgaaacagccgcacagtgcgcaaacccttggaattccggcgatatttggcattacgacaatgagcgccgcgccatgcgcgccacatagtgagcatgacctcgttcggcattcctacaatggtggcatgagcaccgcaccgagacttgaggccgccaaacgcgattggggccacgacgagaccggatgcaccgtgctgcatatcgacatggatgccttctatgcctcattggaggtggcgcgcaaccccgggctcaaaggcaagccggtgatcatcggcaccgggccgcgcgcggtggtgtccgccgcgagctatgaagcccggaaatacggcatcaattcggcgatgccggccgcgcgcgcccatcagttgtgcccgaacggcgtctttctgccggtggatatggcgtattaccgcatgatgtcgcaccgaatcatgcacgaggtgtttttgaccgtcaccgaccggttcgagcaggtttcggtggacgagggctatatggatgtgtccgccgcactgctggagtgggggcggccgagcgcaatcggcgcgtggattcgcgctcaggtggccgagcgcttccacgtgacgtgttcagtgggtatcgcctgtaacaaactggtggccaaaatggcctcgaccaatgccaagccggacggcatgctgctgattccggcggcccgctcggctgagttcgtgcagatgatgccattgcgtggcattccgggcatcgggccgtctttggagaagcggcttaatgcttggggcgtgcattcggtggctgaattggctcagctggatgaggctgcattgactcgtgccactggctccccggctgcggcacgtggattatgggcggcctcgcacgggttggattcccgcaaaatcaccacggtgcgcgaggagaaatccattgggtccgaggaaaccttggccgaggatacacgcgatatgcgcgtggtgtgtgggctactgcgttcggcctgcgacgatgtggccagcacgctgcggcgcaaggggctagtggcgcgcacgctgacggtgaagttgcggttcgccgacctgagctatcagacccggtcttttacgatggagcggccgaccgatacggccggcgtgctgtaccccgaatgcgtgcggcagctgaaagtcatgctggggctgccagcctcggcggagtctgccactcccctgcccaaaactattcgcttggccggtatgagcacgtcttcgctcagtgaggcggcggctacggccgtgcagccttcactggatgacatgctcgaagaggccgacaatgcccgcggccagacctcacaggcacgtttgcatgatgccgaggccgcgctggatgccgtacgccgcaaattcggctgcaaggccgcccagtttggggcgtgaacggctcaacgccacttacgatctcattacgccgtgagacgttcgcaggcggagcggatggcctcgtcggtggcggtggcggagaaacgcaggtaggcgggagcgccgtagaattcgccggggctggggatgatgccgattttggcgagctcggccatatcggcccagcagtcgccggacttggccttgacccatacgtacagcgcgccggagggcatttgcgccgaatagccatatgccttcagtgcgtcaaccagcgcggataggcggcgacggtaacgaccccattgctcgtgcacagcggctgtgtccttcagacctgcggccatggcggtctgcaccggtccggggataatctggccgatctgcttgcggtattcggccatttccttgaccagccggtaatcgccggcaatcagagccgtacggtagccggccatgttggactgcttggacagcgagtagagcaccaggatgccagctgccgaaccttcacacacatgtgaattcagggcacatggcgtggcggagagactgaatgcggtatcggaggcgggctcgttggattcggccaccggtgcggcaggcacagacgcagcagatgcagacgcggcaggcgcagaggacgcggctgtattgcggcgcaccgaacgccagtccatcaacgcatagcattcgtcggagagcaccacggcaccgatgcgacgggcagcagccacgatgtcggtcagccagtcagcggagatgacctcgccggagggattacacggtgagttgatccagatggccttgacgttcggaatattcacccaggaatcgacgtcggtcacatcatcgactttgaccacggtggcgccggcaagttgggtaccgatttcgtaagtcgggtaggagacagccggttggacgaccacatcgccttcgccaaggtgcagcaggctggccatcagtgccacggcctccttggaacccacggtgggtacggcggcagcgttgatggacttcagatccacaccgcgcagttcgcggaaccatgtatcgatagcggccttaaggtcggcggtgccggcggtgaccgggtatccatgggcgttgggggcgtctgcgccggcaaccagcgcctgctgggcactgctcggcaccgggtccacgggcgagcctacggacaggtcgatcatgccacccggcacggttttggcggtggctttgaagccggcgatacgagaccagtcgtatggcgacgaatatgcgtggaagcccatgagaacccctttcttggacggtatgttcctaagatacgacgaaccctcggccgtgatagaccgagggttcaatccgaactatgcgctgtgtgcagcgcttatccgcaaatcagtttactggttctgcggcggcagcgcggcgacctgttccgggtctttgccgattgggccattggcggaagcgccgcccaaatcgccgacttcagcgaagaagttgacagcggcatccttgtaccaagcccactcgtccggcagatcatcctcatagaagatggcctcggtggggcacaccggttcgcatgcaccgcaatcgacgcactcgttggggttgatgtacagcgagcgggaaccctcgtaaatgcagtcgacggggcactcgtccacgcaagccttgtccttgacatccacgcaaggctgagcgatcacatatggcatggaatcctccttaacaaatactgatacaagggtacgcgcccgttgggacgctcctcgctctcagccgttaacggccttatcggtttcggcggacagcgtttcggtcaggtcgcccttgccgaggcgcgcatgccagtagccgtagccgaagtagatggcgacgccgaccacgagccacaccacgaaacgaatccaggtgagcacggacaggttgagcatcaaccagaagttggccacggcgatgaggatcggaatccacgggtcgccgggcatcttgaaggcgcgcggcaggtcggggcgcttcttgcgcataatcgggatggagatggccaccagcgtgaaggcggacagggtgccgatgttgaccatgtcggagagcacgccgatgtcgaagaaggcggccacgagcgccaccaccgcgccgacgacgatctgcagagcggccggggtgccatgcttgccggtcttggacaggccgcgcggcagcagaccatcgcggctcatggcgaagacgatacgggtcaggccgagcaacagcaccatgaccacggtggccaggcccagcacgatgccgaagctgatgatcttggcggcccagtcggcacccaccagttcgaaggcggtggccagcgaggggctgtcttgcttggcgagatcggcataggagaccatgccggtggtcaccacggccacgagcatgtacatgacgatgatgagcagcatgcccacgccgatgccgagcggcacgttcttgtgcgggttcttggtctcctcggaggcggtggccaccacgtcgaagccgatgaacgcgaagaacacgagcgccgcgcccgaaaggatgccgggaacgccgtacacggatggggtcatgccggtggcgaactgccacagcggctgggtcatcacgccggtgacggcggaggaaccttccacggtggaggccggctggctcggtggaatgaacggggtgaagttggaggccttgacgtagaagaagccgacgatcaccacaaagaacacgatggcgatcttgagcacggtcatagcaccgtccacgcgggcgccgatcttggtgccgaatacgagcagcgtggtaaagaacgccacgatgatgatcggggcgatatcgatatggaaggagccgaacgccaggttggtgttggcgttccagcccatcaggcgcatgaaatcgttgaggtatacgccccaatatttggaaatcacggagccggccatcagcatttccagaatcagatcccagccgatgatccaggccatgatctcgccgaccgtggtgtaggtgaaggtgtaggcggagccggccaccggaatcatcgaagcgaattcggcgtagcacatcacggctgcgccgcacacgatgccggcgatcaggaagctgatgatcacggccgggccggcgtggaaggcggcggcctgcgcgcccaccgagaagatgccggcgcccacggctacggccacgcccatgattgacagatcccaccaagtcaggttgcgcttgagcttgcggccctcttcacccgtttcggcaatggtctgttcgacggatttcgtacggaacagttgcatagtgctcttctttttctctgttgtttgcgcaccgaatgtgcacaataccgacaatcgagtatagaagagcccgcgtgtcttgtctattaataagacttagagcccgcaatatatgggattaataccccactccatcgatcaatagcgcgattacagcacgccgacgcagaccggttcgggcaccaagtccactccgaacgcgctcttgaccgcctgctgaaccgcgcgcgccaaagctgcgatatcggctgcgctcgctcccccacgattggtcaaggccagcgtgtgctgcgtggatagactggccggcgcgtacgcatcgaccttatatcccttatggcagccggcatggtcgataagccaggcggcggacgtcttggtgccgggagtgccgtcaggcagagtcgcgtcgaacttcggcgcatcttcgggcagggccgccgcttggccggcggtcagaatcggattcataaagaacgagccgcagctgtggcgattgtagtcgggagcaggcaggccgtcatcgccaacgggaacgccggcggcctcattgagggaggccagacgctccagatcggtcaggatattggcctcgcgcttggcggtggccatgtcgggcaaggcgtagcgagtgggatcctcaagcatgcccttggcggcacgtactgcgagcacggctttgcggatgtcggcggtggccatacggtcgcccacttcgacgccaagcgctttggcaagctgtccgtaacctaccgtgccttcggccgagtgggtcagggcaaaggtgacggagagcaccacgtaacgtggcgtcgggaagaatcggtcggccggctggccgggaccggcgtacatgctggccttcagtgcggagtatcgatagccgaatcgaagatcggcgggtgtgaggtcgcgcgttgttttggtgtctcgatcccagacttccaccgattcgaccgaagtggcgacttcctgtccgtaggcaccgatgttctgcaccacggaagcgccgactgtgccgggaatgccggacagtccctcgacgccctcgagcccgagctctacggtgaaggccacgaaatcatcccaattggcaccggcctcggcattgacatgcacggtgcgatcctcgccctctaccggtgcagcctcgtccggcacagtgatgaggcgtcgggcgtctcgaaccaccacgccgtcaaaaggcttatcggaaacaagcaggttggagccgccaccgataacgaccaagggcaggcctttggaatcggcatcctccacggcttcgatgagtcccacgcgcgtggtcggctcgatgaaatgggcgatggggccgcccacgcccatggtggtgatgtctgcaaagcttgtcatgacttcctatcttagtggcgcaggtgcgatatcggggcaatcatcggctgaaacggcagaacgcccgcgaggggttcgttcagacgcgggatttctgccatttctcacgcgatgcggatactgattccgcaccctaccactcggctctggagtcaatacgcaaaaacccggccgaatgggccgggttttgtaaagctgtgatgcttgcgatcaacgagtctcgcggtgcacggtctgcttgccgcagcgcgggcagaacttcttgagctcaagacggtcgggcgtattacgacggttcttagtcgtaatgtagttacgctccttgcactcggtgcaggccagcgtgatgcccggacggatgtcggcgctcttagccattgtcattcacctctatgttcttaggtatagtgcgcgcccaccggttagctggcgcgatttgtagcgaggaagaggctcgaactcttgaccttacgattatgagtcgtacgctctagccagctgagctaccccgccagagagccccgagtgagaattggactcacgacctcttccttaccaaggaagtgctctaccactgagctatcggggcgtggcggatagtggattcgaaccactgaagcacgaagcggctgatttacagtcagctccctttgaccgcttgggaaatccgccagtctgtttcccgccgcggtgtttgacctcaacaggcaacttggctatataaccacatattttccaagtacgcaaatcgacctctacgcgaaccttgttttaccgcggaattctgcggttttatcggcgtgtctcacagcgtggtttcagggtccgcttcggccctgcaaacagccccgaccaaggctgcaccccgcacttctaccaatcatttttcttatatggtgttccagaaccttgcaatggcgcggttttcgagtggcgtcgcctgcttgcggcggcacagcgcatgccggcatgctgggcgcatggcttctgatcttgtacatcacggacaatcattcgacgaccagccgctcggattcggcacgctggccattcacctcggcaacggggtcgacgccgaaaccggcgcgatccgtcgccccatcacgctggcgaacacctacgcgctgccctacgacgcctcggccttggcgattgccaagcatctcgaatcgctggatgtggtgcgtttcgtggcgtaccccggtctggaatcgcacctgcaccacgaggtggcggccagccagctggcccgcccggactccgggttcggcggcgtgctgtcgttcggcctcgacaccgaccacgacgggcacaaccgattcgtttccaagctcaatgtgattacgtctgccgtctcgctcggccatgactaatcgatgatcgtgttcctcggtgaggatgacgagcgccagtacctgtacccgcctgagttccaccgcggcttcttccgtctggccgtaggtctggaggatacggacgatttgatgcgcgacatcgatcacgcgctggtggaggccggattcgaggtgtgagaccgcaccgcgcgcatgatttcggcctcttccgccctgctgccgccgtcagtgagtcacaagatggctcggtgacgacgatggcagggctttttacgtcggcacagggacaatacctggcggtctgccgacgatgacggcacttatcgtcggcagaccgccagtttttggaccgtcgccgacacaaaacgccgatttgccgtcggcaatggtccaaaaactggccctataacgacgccaacgcggctcagcatcggcacatcgccatttcgtggcccactgccgacgctggcctcatgccacggcactcagcgtaggtagagagacaaccattggcacagcgcgacaccacgaacctgcgacacggaaaaaaacaacataccgtcgacctactgccgtcttgtgcaaaatgtcttaagccgctcggccaagtcgccgactgagcctcttccatagggaccccaatccgttacccagtgtagatgcggtgcaacgccgaactcaactacgttgcgcgcatgcacctttatgcatagcaggcatggctgggcgtttggcgggagcggttttcggctcccctctctgaggggagcccctttccgcctgacaagagaaaaccccgactgttcgtgggaacagtcggggttgttgaagttcgctaggcgactaatcagccgaggatggcgagaatgtcgcgcgcgccgacgatgaggtagtcctcaccctcgtagtggacttcggtgccgccgtacttggagtacagcaccttgtcgccgaccttgacatccatcgggatgcgctcgcccttgtcgtcacgacgacccgggccaacggccaggacttcaccctgctgcggcttctccttggcgttgtccggaatatacagaccggaagcggtctgggtctgggcctcggcctgcttgacgatgatcttgtcttccaacggtgtgagcttaatcgacactgtgggtcacctcgtatctacttgtagttcgataatgccgcgccagaacgcctcaagaggctgacgatcacttgcgttgtccctttgcgctaggacacatcgtagcgcgattattagcactctgccaactcgagtgctaacgctgtgagagaaaatcggcgaatcgcaacgctcagttgccgcggcgggcaagaatggagtccaggcctgcgcccaacgaatcggtggtcgccgctggcgcttcgacgtcggcacgctcctcggattcgtggaatgcggctcgctgggcggcgtttgcagcctcgtcatcggcgtccgtagcggcgttcgtatcggcatcatcgcgctgctccgactcagtgtctacagcgtttccggcgccgacagccttgcccgcatcggcggccttggcatcgtccgcggccttgacggctcgggcctcgtcaatcaacttttccgccactgcgggttcgacaggttccgccttggacacctgacgggtcgacttgatctccaagctttccggagcgttgtcggcgttatgttccccgcccaaagtgaaggagatgagatcctgcgaggtggccatatcgaagacatccagtgctcgggcagggcgtacgctgaccagttccgacgtagcgtcggcagcggcatcgtcgcgctcatcacgctcatcacgcaccgtaagcgatggttcaactcgaggggcgacggacttatccgacttagtcgacttatccgtgcgagcggaggcatcgggcgcggcggaagattcactggtttcggcagcggacttacggtcagcggattcatcgaccatagcagacggttcggcggcaggcttatcggcggcggactgtgcagtatcagactcctcagactgtttggcgtgctccgccgcggcctgatatgcggcggcggactgacgcaacgccttggccttggcctgctcaatctcggcatcgcgtaacgcgcggcgaatctgccgctgttccatgacctcggtggcagcatcctcaacatgctcggaaagctccttggcaggcgcagttacggccgcaaccggttcggccttgttcacacgcttgctgtccttggactcggcagacggtttcttggaccagcccgtaccgctatgagtccgctcgtagcggaccaccttgcgttcccattgccgggcctggcgtgaggcattggctcccagcaccagcaccagcagtaacagcacgaacggaataagagcaagcagcgggctgaaatgcagggggaacgatacggcaaacaccaacacggttatggcaagcaggcatacggcgagaatctgccggcggcggatggccgcgcggcgcagttcccgcacatgggcgatgtgctcaggtgtcagcctcgctgacggtgttgatgctggcattgctgcccctttcgccttatgcggcttgatgtctccgaatcgtctgccgttctctgcatcaacgatatgcagggaaggcgaataacgatcctgccggtgctcgtccacacgtttcatgccgttggccgtacgtacgggcagccatacaacgataataatcgccacaatcaccagcacgacgacagtgctcagtgactcataacccatagagtcaaggataggagacgtaccgacgaactggggctttccgtccgggcgtgtcggagcggaattcttccggtcgacgcttatctggaaccggtggcggcgagtctggcagagaacccttgccccatatcttcagccaacagcgcaaatgttacgtggtcgcgccactggccattgacatacatataccgctcgcgcagtccctcatgatgggctccgaccttacgcactacagccaaagagcgcgcgttatccggaagaatggcgatttccagccgatgcaacgcgggcccgaatgggtctccgagtgcccaatcggcaagcatggccagtgccatcggcgcaaatccgtggccggcgtaccgttggtcaacccaatatccgaccacaccggtgcgcatggcaccatacgcgatggctcccaacgaaatctggccgacgatacgcatctggtattcgatggcgaaaatcacgccgacgccatgctgctcattacggcgctgtcgctgcacccattgattgaaggtgatggagccgccatgcatcgggtcgccggattcccaaggcgccagccagtcgttgttgcgccagcgcacttcgttccagccgtcctcatcgtccatggtcagggggcgcaggattatcgggaaaccgggatgggtgaggcgcggcggacggatctggtggtccagcttgaacgcctctttaatcgactggaaaactgacacggcctttattgtagccatatgaagggcttgcgccttcgcctcggccactttcgttttacggtggaaacactagattgtgcggtatgagcgaagcggacaatggcatgaatatcggcagcgaccacagcggcacggagaaaacagaaaagatggataaagcgacgctgcgccaccatatactgtctcggcgcaagcgcattccagcggaagaacgtggagcggccggtgaattgctggtgcgacggttcccggcacacatgattcaggatggttccacagtggcggcatatgtgtcgatgggttcggaaatcgaaacccggccactgttgcgatggctgttggctcatggctgccacgtgttggtgccacgattgggatctgggttggaaattggctggagtgtgctggattcattggaatccttgcgctcgatggatgcagtgggtggcgcgaacaatgccggtagctgcagctctcccagcaccgtccatcacagacccgatgagccaactggcgcagttctaccgcccgaagcgttggagaaggccgatctggtcatcgccccggctttggcagtggacccgcaaggcaatcgtctggggcgtggagccggctggtatgaccgggccttggctcgacgcaagcccgcgtgccccctgattgcggtgtgctggccgtgggaggtgttggacaccgatttgccggccgaaccacatgatgtgccggccgacggagtgctgacgccggggggataccggcggcttggcgaatcgggccggctgagttgaccggccggccaagatactcggcgcaagccagactgaccaaccagccacgcacactggccgatggaaccagagtggcaaaagcaggctggctagtaagaccgtaacgccaatgtgtcagggcggcgactaggatatgaacggttgcacggcatggtgttgcacgccatgcgcgagaaatatgactttgttggaggaatccgttgcctacctatcattaccgttgcaagaactgcggctatgacttcaccgaacagcagtcgttcaatgacgacccgattaccgtgtgccccaagtgctcgcaggagcaggtgcgcaaggtgtattccgccgtgccaattgagttcaagggtcacggattctaccgcaccgacaaatccggcaagtaaggtcggctccccgtttttcctctgtaaacgacgatgtcgacggcggtatgccgcggatattggcactacgggcactgtctgttgcacgggtttgaagcgttgtggataacttggcaagctagaatcacataggtcgattcagcttgcgcttacgaaaaacttcaggtcaccatggttgcatggtgaccttttcgtttattaagccgcctgcgcgcggctcattgcggcgacggcgcatggcggatgccttgcgccgactcactgctgcgttgtgcgtgggactcgcagtgttgtttgggcttgaagccgtattggccgtggtggagaccgagccgatggtggtggccgctcgctcgattcgacggggtgacattattctggccgccgacgttcagttggctgatatgccggtatctgcggcaggcccgtcttggacaggcaatattgaggatgtggtgggcaaggtagcgcaaatcgatatcgaagcagccgatcccatttccacgcatatggccagagatgcgcccgtagcaccgaccggcactacggtgattgaagtccgcttggccagtagcgtcgacgatgtattggccggcgatcaggtgagactggtttccgccgtcggttgcgaaggtgccgattgcacgctggccgagaacgccacggtgatgaatgtcgacaaaccggatacgactggcgcattgggaagcaacgaccggctggtgtcgttcgcaatgccgccggaggccgcggccaaggttatggagctgcaacaggccggagcgattatggccgttgtgcggtaggaagcggaatcggccttcggccgatgttgtgttttccgcagccgtacggctgcggaaaacacaacatcagagcgcacagagtgcgcctcaactcctactcgcgctcgttgaaaacagcccagtgtggaggcagttcgccgaggatgcgtttgtcgtcgtcggattgccgttgttggtcggtctgcatgtctccgggctcgagtttgacgccgtcagcgtcaaactgctcagtgcctttcatcaccacgcgcttgtgcttgcgcggtgtgcgccgtgtagccgagtattccgccatgattattcaacctcgcggtagatctcgccgatacggctgacgatacggtcgacttccttatcggggttcacaaaggcggcgacactccagacggtcatcacattccagcccaaggaaatgagatcctgtgccgacaaacgatgacgcctgcgcgtggattgcacggacataaagttcgcgtcatcggtctgcacggccaaggcaaacggcttgtccttcaatcccaccacgagcggaatcttcacgcccttgtcgaatccataatcaacagcagcgttcagtcctcgcgcgcgcaacctgtcggcgatatcgtcgaacagcacgttgccgcctgccgcatcacgcaacggaagcaccggacggtcgtcaagctgttcggcccacgtcaacatggtcttcaggaaccgaggaccggactggtgcagtcgttcttcatccaaatcttcggaaccaaaggccgacacaatatccaagctgtggtccgccaatgccagggcatccagcaacagtccgcgaccgcctgtgctttcgagcgggccgaactgctgaagcagacgtccgtgcgtggttttcgcatagcacatcgacagaatcacgtcagtggcacgacctccggccacgtcacgcaaggaaaccagccgcacatggcgcaggaatcggcccatcgccttggatttgcctgccaacgacttcaattcggcacccaagcgtgtgcggaatgcgtcggtcaacatcacgaccacaagtcgatagctggaaggaaccacagcaaaaccggcggcacgttgcgtaatcagacgcaccacttcatcaatctccgactggctggattccaccagaccagaagacataaccggcacaccgctcgcttccacacggtggaaccgcacctcaccggcagccggctcggtggccacatcatagcgaacaggaccatatccctcggattcaaggaatgcggacaggcgcggcgcacggcgagacggggcagcatccacctcgatatgaggcaacgtgtcgatcagctgcttgacgctttcgctggttaccgtcgcgcagtgggcgatcaccaccacctgctgcacgcggccgatgatggacagcaactcgatagcgggaatgtgcgcgcacgcatcgagaatcgccacatcagccagcacacccggctcggtgagtgcggcgagcgtacccggtgcggccaccagaatcggcttggccgcggccagaatctccggatgatcacggcgaatcctgctcagcgacacactggcgcgccctgccagcacggtgtgcatctggttggcttcctgagtgcgggagaacagcatgtcgcacaggcggcgcatggattcctgcgacaccatcggtccgatggagcgcacgtgctccacatcgacctgtgcgaagcggtcggatgcggtctgcagcgcagcaccatcctggttggagatgatggcggaagaacgcacaatgtcctcgaacacggtggtccaccatgccagctgcacttcgccacgcacctgctccacgcccacccggcgagcgttgagatcggcgaccaactcgttcagaccggcagaagcgaattcctgctccagcaggcaacgctccggcaaggtgtccagtgccttgcgatcatccagcagtgctttcaggcgtgcttccaccttctcgaaatcggcggtttccagattgccaccagcgggtgtggtggaaagcacggtatccagcgcggtcatattgctgaccagcgcctcttgggtggagatgatctcgtcgagcttgctgggcagcaccggccaaccgccgtgaggcacgaactgatgccactgctccccttgcttggcgactaccttcaacgcttcgtgcaagtcctcgacctgcgcgccgacgcgcagcagatccttggcttccttgacgtggcggcggcgctcccagaatcccatcgacgtgccctcggccttgcgctggctcttcggcttggtggcctcgatcatggagctgatgtctcgctcgaaaatctctggctggaacacgtcaagcactcgtctcagattcttcaaaaccgtaacctgacgctcccactcgcgagtggtgggaggaaccgggaatccgcaggtctgcacggtgcgtgccacctgctcgcgggtggcgggcaggaagcgacgcagcaaatcgtccacgcgctggtaagcggttaccgcttgttcttcagtggtgatggacgccttgtaccatgcggtgtcttccgggccgatggtgtattcgccgagctcgccggcacgttccatcttgctgatccatgtgtcaatatcgttggcgatgctcagggcacttgactcgtcaagtcgaacgtgggtggcggggtgtgtcgggagcacggagatacgggccaggttctgaatggtctcgtatgcggacacattccacttatcgttgcccccgtgcaggtcgcccagatagcgggtcaagcgcgagcgcacgcccacgagttcgtcggccagctggtcgaatcgctgggtggcgactccgggctggaatccgactgcggcaatcagctgcctatcaagcgcggcgttggcgtgttcatcggatacatccagtacctgcgccttcatctcattggcggaggccgtctggatgaacagacgcttctgctcggccacgccgggcacgtacagcacggaacgaccattcatcaggcagcgcgatgcgatggccacagcctgctccgcggtgcccttcgggaaggtgccgtcgaccacgatgctatggccattggcagcaagtgacgcggcatatcgcaccgtattgtccacatcgccgacttcgtactcagcatgcgggtctacgtcgaaaggactgtattgcggaatattggcatctttgagcgcggtgcgggcggatttgtcgccggcaagcgcgtccaacagcacattgccggtggggccattctccagctggtcgatgaactgtcggctttcgctgatcatctgcgacgaggggtccatgaagcatccgagcacaatctggcgctcgatggcgaagccggagatacgctccgatgcttcggacgaaatacgggcgaacatcgcggaagtctcgggagtgccactgtcatagctggcaccgtcaaacagggaatcctcatccaggaacaccccctgctcacgcaatgcattgacgaacgcggcgttcagggtcacgcgaccggtgaatcgaatggtggtcgacaagccatcatcctcgatcgtgacgctcaccgggtacaacagcaccggcagcgcgttgcccctccacgtggccacaccgaccatgagcgacaactccgccacgccggaaatcctgcgcttggcggcctggtcatccagtacgcgcccgatatggcgttcggcggccttaagcacacccgtgtcacggaacaacgaatccaaccgaacatggccggaagcgaacagctgggcgatgccggagggatgggcatgggtcatctccagcttcgcggccagttgattcacatcctcgagcggcgatggcggctgcatgctgcggtattggtcacgccagcgacggatgcgattcagaccttccgtgagattctggttctgagtctggctctgggtcatctctcgactcactttccaaccgcttcgcggtattcctgatagcccttgttgtgagacagggcttcgtcaatatcggcctcgccacgggcggcgagccaagaatacatgtcgtcgtacaggtacggattcatggcgaggaacgccagtaattcgggatgacgggcgacttcgaactgaacgttgaaatcttgcgtggtttttgcctcgtcagaggtcaggccatcgacttcgactgccggctcctgtgctttcagctcgcccttggccacacgctcgaacaccgagccgggctcgaagaccggagtgtgtacgcccgtggagtagatatcagacgcttcatacgcttcggagaccgactgctgggcggtttcggtttcggtcgccagctgctgatcctcgggtgcgtcggttgccggttgagcggtttcaggctgggtggttgtcggctgggcggtctcagactgagtgttttcagactgggcggcttcggactgagtgccttcagaatgctgtgcaacagtgtccaccggctgagaatcgtcggtattcggagcggactgaacgttttcggctgacttgcttgcgccagccaccacatcggattcaacaaccgccgccgacgccactgccggctcgcttgtgctgggagcgtgcttaacaacggcatgggcgatggcatctaccgggacaataccggagatcctgctgtgcttggatgcgggcgttacagtcgtcgactcaggttcggtctgctgcttcggcagtaccacggagtccatggcctgctggtttttgcgttcggtctcctgctcggcatgctgggccaacgcatccgcgaacaggtcacggggtatggccggctcatcgtttttcgtcactggctgcgtgatattcagcgagccaagttcaagctcgtcgaccttgcgtcgaacattatccgcgctgaagatggcggtcggctcgccggcccgcaaatcaagaatatcgtcgacagacatatccgccgcatccggctcctgcggtgcttcgtgaaccgcatagccaaacaaatcaggcaccttaaggtcgagtggctttgccactggatcgtcgatacgaatgaagtccgcaggcacatcaccgaactgcatgcgcatgggagacgtcggcaacaggaactcgacattggccggcaagcgcaacaaatcaccattttcccgcaccacatacgttccattggtcgatccaagatcgcggaccgaagccgtaccattgctttttaccgtgaacatggcgtgccgtttggacatcgatttggtctgatcggcgacgtcaaggcgggtgttgccatcatcggcaagggggcgtaacggcttacggccgatttccacgcactcccccggcttgacgctgatccggtcgacaccgttgatcttcaccgtccactcgctcaccgtgaccgccttcctggacacactatttgaccacactacgtgccattgtgtcatcttttaccggcttttggcggattactgggcacagaattgacaactttcgctcattgccagctttgtgattccacgtcggatcgcgttctccgcctcgccctcgtcaactagtctactcagtatgcggaaaccccgcagcctgaaacacaggtgcggggttcctcgaaaagctgtgattgcggcttatgccgcacaaatcacttgagctcgacggaggcaccagcctcttccagctgagccttggccttctcggcatcttccttcttggccttctcgaggacggccttcggagcgccgtcgacgagagccttggcctcggccaggccgagggaggtgatggcgcggacagccttgatgacctggatcttcttgtcgccgacggcggagaggatgacgtcgaactcatccttctcttcctcagccggagcagcagcgccagcaacagcggcaacagcggcaaccggagcggcagcctcgacgtcgaacttctcctcgaaggccttcacgaactcggagagctcgaccagggtcatctcgccgaaggcttccagcagctcatcgttggtgtacttagccattatggcttcctttcaatcttggcggcggacgaagtggtagatccgctgcctaataaaccttattgtttaaattatcgaagcgactgattcatgccgtgagggcgtaaatcaggcagccttctcctgcttttcgcgcagggcgtcgatcgtacgcacagccttggtaggcagggcgttgaacaggtacgaggccttggccatcgatgccttgatgtcgccggcgaattcggcaagcagctgcgggcgggacttgaggtctgccagcttcttggcgccctcggcatcgtagacagtgccgtcagcggcggcacccttgatgacaagagccttgttgtccttggcgaagtcacggatgaccttcgcagcctcgatgaagtcgcccttcacgaaggtgatggcggtcgggccggagagaatctcgtcgagaccctcgatgcccgcttccttggcggcgatgcgtgccagcgtgttctttgccacggtgtaggaagtatcgcggcctagcttttcacgcagatcggaaatctgcggaacggtaagcccgcggtactcggtcaggtagacggcgtcagcgttacggaattcttccgtaagctgagcgactaccgcttccttttcgggcctcttcatggcgttccttcctaagtcggccgttgacttggagttcggaactttcggccgggcaacaaaaaagccctgcgcacaggcagagcaatataatctcgcgaagcgaccttcgccggcccttgacgggcttatatctctcaacctgcgctggcttggcgaaccaaacttcggaaatgcactcgcgcgcacttcaaccaacggtctgtggtttacggatgattagattacggatggtcagcgacattgcagaattcgggcgtgtcgcaaggcattacaacgtggcggcgtactgggctacggacgcggtgacttccttcagatagtcgagcgagcgacgccagtggccgggcacctcgatcgaatggttggcatccgggtattcgtgcacgtgcggggtgagcgcgttggcgcgggctcgatcgtagaacgggtcggcggtgccggcgcagatcagcggtgccgggccggagtatcgggagctggcggcgtgcgactggtcggccagttctgcgcggatgatcgcccttgcttcggccacgctcggagcctcggattcggcgacgatatcatcgccgacagccggcaccggaatcacccgggcggatggatcgaagtcggcgtgatgcagcaccggggtcagcagcacgaacggcagaccgtagtgtgaggccacatgtgggtaggtcatcgtcgtcagcgacttgccgatcagcaacaggcgagggccggacggggtgtcggaatcacggttcggcgagccagctgcgccatcggccagcacggtagcagaatcatcggcggcaacgccatccccggaatcaccggctttacccgcgccggactcgcgcgcggcggccatccagccgtcaatcgcctgattgaggaccggaatcaccgtggacaggtcgtcggaagcgttgcgtacgttcatgcggtcgattcgccagccggcctcgaccagagcctgggccgaccagtagagcagcggacggtcgcagttgtagccggtgccaggcatcagcagtacgcggccgtactcctgaccgggcttgacgacattcttcttccaagaggtgatgctgacttcgacggccggtttcatcgcgcgccttccttccacgggtgtgccctgcgtgtccctgagttgttccgaattattctggcagtcagtctactcccggacccgttcacgttacctccacaagctataatcggccacggttctgattggatgcgcagcgcctgacgcgcgttgggcaggccgatcagggcgagtcgcaattctcgccggggccagccgcagcattatgcgcgcggtgcgcagccccgcataaaaccaaggaagtagagagtaaatggagaagttcttccatttgaaggaaaacggcacgaccgtctcgactgagattctggccggcctgaccacgttcttcgcgatggcctacatcatcgtcgtcaacccgcagatcctgtcgcagacgggtatgccgtggggcggcgtgttcctggccaccatcatcgcggccatcatcggcaccctggtcatgggcctgttcgccaatgtgccgtacgcccaggccgccggcatgggcctcaacgcgttcttcacctacaccgtgtgcttcggcctcggcttcagctggcagcagaccatgtgcatggtgttcctgtgcggcctgatcaacatcctcatcaccgtcaccaagatccgcaagatgatcatcatggccatcccggagtccctgcaacacgccatcggcggcggcatcggcctgttcgtggcctatgtgggcatgctgaacgtcggactgatcaagttcacccccggcgacccgaaagccgcggccaagggaggcgccgtggcggcgaccccgagtctggccgacttcaacgacaaggtgctgtgggtcttcctgatcggcctcgtactggccattgtgttcaccgtgatgaaggttaagggcggcatgctgctggccatcgccatcaccaccgtgatcggcatcccgttcggcgttaccacctggtccaactcgcagtccatcagcgaaaccttctcccagctgccgcagaccttcggcgcgatcttctccgctgagggcttcccggcgctgttctccgacgtctccaagctgcctctggtcatcgtgaccatcttcgccttctccatgtccgatacgttcgacaccctgggcactttcatcggcaccggccgtcgcaccggcatcttctccgccgaggatgagaaggctctggagaacggccacggcttctcctccaagatggacaaggccctgttcgccgactccatcgccacctccattggcgctatctgcggcacctcgaacaccaccacctacgtcgagtcttccgccggcatcgccgcaggcggccgcaccggcctgacctccgtggttgtggcgatctgcttcgccctgtccgcgttcctggccccggtcgtctccgccgtgccgtccgccgcaaccgccggcgtgctggtgatcgtcggctgcatgatggccgcttccctgaaggaagtcaagtgggacgacatcgccgaagccatcccggcgttcttcgcagccgtgttcatggccttctcctactccatctcctacggcatcgccggcggcttcatcatgtactgcatcgtgaagacctgcaagggcaaggccaaggaggttcacccgatcatctggattgtggccgcgctgttcattctggacttcgtgtgcatggcgattctgtaacgctgattgacaacggattagcctttaaggattaatccgccgccatacggcataaaggccgggctctcacaagggcccggcctttgttgttgccacagtgatcaacgcccatgagtaccttcgatgatcatccgccattcaatcaacggctggccatgactcggacatggcgcggcacggcaagcggattttgctgttgggcataacaacagacgagagaatagatccggtcgtgagcaacaggataggtgccatgcggtgccgtgtacaaactgttgtcagttgtcaacgctttttagcgtggctccaatcatcttaatggctgttttccgccattcttgatgcatgagaatagttgtcaactgacaactgaatgtacatggcagcagcacgagtgccctattcaacatcgaaatatgtagcgcgaagaagccgaaaaaccaaaaggcttctataccgaatgaaacggtatagaagccttttggtttgcgattaagctcttctcacccgagagaagctagagaacgatcagtcctcgaatgccgaaccgttaagcgggaagccctgcgggcttcccgtaggtgaggggggggcggctatgccgcgaccgatccgtgagagggctttagtcctcgaacggatcaaagtcgcgacggacgcggcgacgcgggcgctcagtgcgctcttcgcggtcggcgcggtagtcgtcgtagttgtcgtcggtggcgtagcgcgggttgcggtccgagccacggccacggccgccacggaaaccgccacggcggtcatcacgatcgccacggtcatcgcgatcggaagagcgacggcgacgcggacgatcatcatctcgggagtcgcgagcatcacggtcatcgcgatcgtcgaagtcacggtcggcagaacgacggcgacgcggacgatcatcatcgcgatcatcgcgatcgaagtcacggtcatcggagcgacggcgacgcggacggtcgtcgtaatcatcctcgaagtcatcggagcgacggcgacgcggacggtcgtcacgatcgtcgaagtcacggtcatcgcgatcggagcgacggccacggctgccacggcgatcgtcacggtcaccacggccacggccaccaccacggcggtcatcacggtcgccacggctcgggcgggcattgttctcctgatcctcgaaaccggggatggccagggagatcttgccgcgatcatcgacgccctgaacgatcacctcaacggtgtcgccttccttgagcacgtcttcgacggcgtcgatacgctcgccgttggccaggttgcggatctgggagatgtgcagcagaccgtcggtgccgggggtgaggttcacgaaagcaccgaacgacgtggtcttgacgaccttgccgctgtaggtttcgccggcctcaggcacgtgcgggttggcaatggaatcgatgatggacttggccttctcagcggcctctccaccctcggaggagatgaagacggtaccgtcatcctcgatggcgatttcagcgccggtgtcttcctgaatctggttgatcatcttgcccttcgggccgatgacttcgccgatcttctccaccgggacggaggtggtgatgatgcgcggagcgaactcgctcatctcggccgggccgtcgatgcactcgttgatgacctcgagaatcgtggcgcgggcttccttggcctgctgcagagcggcggccaggatgtcggccggaatgccgtcgagcttggtgtcgagctgcagggcggtgatgaactcggaagtaccggccaccttgaagtccatgtcgccgaaggcatcctcggcacccaggatatcggtgagggtcttgaagatgtgcttgccatcaacgtcgccggacacgaggcccatggcgatgccggcaaccggagccttcagcggcacgccggcagccaaaaggctcagcgtggaggcgcacacggaacccatcgaagtggaaccgttggaaccgatggcctcggagacctggcgaatggcgtacgggaactcttcgcggctcggcagcaccggcacgagagccttctcggcgagggcgccgtggccgatttcgcggcgcttcggggagccgacgcggccggtctcaccagtggagtacggcggcatctcgtagttgtgcatgtaacgcttggactgcggaccggacagcgcgtcgatctgctgctccatcttgagcatgttcagggtggtgacgcccagaatctgggtctcgccacgctggaacagggcggaaccgtgcacgcgaggcacaatgtccacctcggcggacagggtgcggatgtcgcgcaggccacggccgtcgatgcggtagtcctcggtcaggatgcggcggcgcacgatctggcgctgcagttccttgaaggcgttaccgagttccttgtccttctcggcatcgtccatatcggtgaactcgtccgcgagcacctcgcgcacgtgctccttgatctcgtggacgcggtcctggcgcggcagcttctcggcgatggagagagcctcgtccagatccttgtgggcaatctcgtcgatgcgggcgtacagctcgtcggtgtactccgggaagagctggaattccttggtctccttggcggcgatcttcttgagctcgtcctgagcctcgcaaatcaccttgatgaacggcttggcggcctcaagaccaccggcaacgacttcctcatcgggcttggtctggccctcgtcgtagatgaggtgccaggcgttcttgccggcaccggcctcgatcatggcgatggcaacatcaccgttctcgatcacgcggccagcgaccacaatctcgaacacggcgcgctcacgctcgctccaacgcgggaaggcgacccactggccgtcgatcagcgccagacgcacaccggagaccgggccttcgaacggcaggccggagatcatggtggaggcggaagcggcgttcagggcgatgacatcgtaagcgtcatcagggttcacggcgagcacggtctcgacgacctgcacttcgttgcgcaaggtgtgcgggaacagcgggcgcagcgggcggtcgatgatgcggcaggcgaggatggcctcggagctcgggcggccttcacgacggaagaacgagcccgggatcttgccggcggcgtacatcttctcttcaacgtcgacagtcagcgggaagaagtcgtagttctccttcgggctggaaccggcggtggtggtggacagaatcatggaatcatcgtcgaggtaggcggccacagcgccatcggcctgctgggcgaggcggccggtctcgaagcgcagcgtgcgcttgccaaacgatccattgtcgattacggcctcaacggccttgatttcgggaccctccatagggttcctccttctttaattttctaattattcctacatactgtgttgcggtttggcgactcgcttgaaccgcaactgtcctcttcagcggacgtcacataccttgtttcgactggccccttggccgtcgttcctcgtgtcaaccccttcattcgggttctcttgtcggccttacctgctggcctatcctctaaccctcttgccgttgttgccgttggctggcgatatgtaaaacgcccgggcaccatcctaggtgctcgggcggaagtcttcaattatcgacgcagacccagacgctcgatgagggaacggtaacgctcgatgtcgacgcgcttgaggtagtcaagcaggcgacgacggtcaccgatcatcagctgcataccacgacgggagtggtggtcgtgcttgtgctccttgaggtgctcggtcaggtcggcgatacgcttggacagcagagccacctggacctcgggggaaccggtgtcaccttcgtgcgtcgcgtactcgttgataatctgggtcttctcgtcagccgtcagtgccacggcgtcctccttattgtgtcgttgcgcggtgtttcgtgcaggttcgctcgaaacgctctctatccgcgggcgaaattacgccaaatgaaaactatacggcaggggccggactggggcacacgcgctcacacagtggtgagcaatccgccaaacaacaccacgagcagggcgatggtttcaatcacgaagtacagaatgaagctcgcccagcttttggtcagtacgttcagtggtgaggtcttccggataatcaccagcagacccacgaacatcagggcatatacggcgatgccgatcgccgcacccataatgcccagattcgcggcattcgccaggccggcctgcttaccgtagaccacgtacgtggaataccagaaattgagattgagcatgctgagtcccgcgatgaactgctcgccggccaacccgatcacgaacacgatcagccacggccaggacggcgagacgaccaccgccatcgccaatccgacgtacgcaatcaccacggtcacccaaccgaccagtgcgatgccttgcggagacactcccccgagcacggccacaatggagtcagtattatttaccgccaacgaacggccgaaccagtacggcgcaacgatggcgcacagtacggcaagaataatcagcgcccaacgcaacggatgcgaacgacggcgctcgatatccgccagagacaaatcggtctcgggtatggaagcctcggggtgcttggaaacctcgacggtctctactttgccgcctacgatttccgtcgcctcgttaggttcttgctcgttggattcctgctccatgcaccgcctcgccgattacctgctcattgccgattattgcgatgcccatcttagcgtgtgtgttaggcaagtctccaatacgatcgattactcgccatggccctcaccatgatcctcgctacgattctccttatccgaatccgtgggagcaacgtcatcattgcccgcagacaagccccgctcgcccgattcgcgtttcagaagcaagaaagatgatgccctgctcccccgtcgcccgctatgcagcaaagcctcaagcatatcgacctgccgctccagctcatcgatacgacgtacttgctgtgcgatcagcaggtcacgcagatcgttgttctgctctttgcgggagatggggaagatgatggcgcggcgttcgggggatacgtagaaatcggattcgctgccggctttcgccgtaatcgcggcactctccgcctcgcgccactcgttcgaagtatctgacgttccagcggttcccgatcgataaagcctcaaatgagatacccccccccccaaggctgggcgggttccgacgcttcggcacccaggatctcatcctgtgcctcgcgccagcgggcaagacaacgttcgatgcgcttgtacccgatcagggcgggatcgagcccggcctcacggaacaatcgcaccggcgaggcacctttgttataacgggtcaagaaataccgtttaaagtcgtcagtgtaggtaatgcgtttcgaagtggcttccgccaccgccggcaatgacttcaggtacttgatctcttcggggctaaagctccctccaccgacagtcattttcatctcctgcactctctggaaggttcgttcgcacccccttgaatatgggggcatgtcatagcttgggatgatagtacttgttatacgggcttttctaacccctagtagggtaggtttcatccccgataaactgctccttgcctcattgccggcactccccctattatcacccttgcggggaggtgcaacatatgccgcttttcttacgtgaaccggtggccggtagatgacggtggctccgaaatttcggatggaacaagtttttgcgtcaataacacaagttttacgtaccatgacacagaaattgggtagtcgagaacaataaactggcctcgctcgttgccgagcgaggccgccgaaaaaaatc

SEQ ID NO: 3153 - DNA, 24765 bp, Unknown
  R53_2m  MAG No. k141_344
aacatgctggcttgcttctgctatgcagggctgaccgcttacttggccggcgcttcccggttcggtgcacgttccaaagaacttgccagtcgcggactcggcatgggcgtatgcggtggtttgtctacgatgtcgacgttggcattggaaggcttcaccgcgattcgcgacggtcaggtggcggccggcattgcctatctactggtgacgttcgcgctgggtctggtttgtgcgtctgccggcgtgtgggcaggaacgcatctggccggctcctcgaacgcatccgccgaagcgtccgctgatacgaatgccgctacgaccagcaagggaggtaaggcgtgatgaccgtattcctaccaatcttggtctgcctgtgcggcggcgtaggcgcctcctgccgctatctgcttgacgcgaccatcaaaacgtattggcaacacgcattcccgctgtccacattcaccatcaatctcatcgccggattcctgaccggtctggttgcggcgctggcactgggcgggacacttgatgaaccgtggcggctggtgctggccaccggtttcctcggcggattctccacgttctcgaccgcgatcaacgaaatggtgacgctcttccacaaacgccgctaccccacggcaacggcctatctggtgctgtcgctgggtgtgccggtcgttgctgcggcctgcggttttctcgtctgaccgccacgacgattcccgacgcggtcagcggtatcattgcgaggtcgaacgtcacaggtacatccgggaggtatatgggcatggcgaacaatggagcggatgtgaagcacaatcagggcgcggacgtcacgaatgcctcggccacgacgaacactgcggaaaataccgtgggcacggcaaccccgaagcaaaatggactcgccgtgttgggcaagtatatgggtgtttccgccacgcagaccattgtggagtatgcgacgttcgccatcctgcacttgatcggcgtgccctcgcagatctccaacggtatcgccgtggtgtgttcggcgacctacaacttcgtgatgaaccgcaacgtgacgttcaaatcgtcaagcaacttcacccgttccgtgatgcttttcgtgctgctgtggatctggaacttcacgttcagcacactgctgatcggctggatgccgggcgcgacggacctgagcccgtatgtggtgaagttcattgcgatggcctgccagttcggctggggttatccgttgtgcaagtacgtgatttttaggtgacgcattccaattgctcactgtcgttcgccttcgcctatttgtatttggagcgcttatcagaagaacagcatcgcaacgcctgcggcgaagcacatgagcagaatcgatgtcaggaagctggcgagcatcggcttcttgcccttggaagcgatggccttgaagttcacgttgatgccgagcgcggccatggccatgccgagcacgatgtacgcaaagtccacgagctgcggggtgatggaggcgatgagcggcacgaaggtgccgatgatcgaagcgccgatgaagccgagcatgaaccacgggaaggccacggtcttcttgccggtgttctccacctcggagtgcttcttctcccaccagatagcgatgatgatggccgcgaacacgagcatgagcacgcgggaaagcttcatgatggtggcgatgtccaccgcgccgaaagcgtcgccggcggcgaccgcgtgggcgatttcgtgcagggaagcaccggcggtgatgcccagctggtccttggtcatgccggccagcgggccgagcgcgatctccagcaacgcgaacacagtacccataatggctacgatggccacggccatggtcacgtcgttgtccttctcgtcctgcttgtcctcaggcaccttgatggaaccggccaggcccatgacggcggccgcaccgcagatgccggtgccaccggcggtcaggatggcgagcatcgggtcgacaccgagcttgcgggcgatggcatagcacacgatgatggtcagcgtgacgaccacagctgcgatcggcagacacttgatgccctgcgtgaacagcacggcgaggttgagcttgaaaccgagcaggatgatgccgaggcgcagcagcttgttggaaatcaggccagcggcgtccttgacgcctgccttgcggccatcattggaaccgacgtaggcactgcggatcgggaactggatgatcataccgatgagcagcgcgatgataagcgcgccgaacaggctgaatccggggaactgcttgagccaggaggcgaacagcgaggccagcagagtcagaacgccaatgaacaacatgtcaacggtggtaatgcgcttccaccattttgtacagaactctctcacggtgtctattgaagctcaagcatttacatcggtcaaatcattgcaaccaatacatatcatcgattttgtcgatacctaattgatctccctctgatgagggaggtggccgccgcaggcggacggagagagagaaacaacgttcgcgacctcccctcagtcgactatctgactacccgcgcagcgcagcaataatcatctccgccaactcccgctgatcgtgcgtcagaccggatctcggcaccagcgcatagaaccgccgcacaaactcatcgccaagctcccgctgcaccggcacgcccgccggcacggcggcttccgaaatcaacgactgcccgaacccggcggacagcgccgccacaatcgccgcattactggacacttccatcgtgcgtgcaggcacaacctgagcggtcttgaaatacaaatccgtgtaataccgcacgccggaaccgtgctcgcgcaccatccacacgccgtcgggctcccccgccaacaccagccggtcctcgcacagggtgacgcggtccaccgaatcgttcacgatcggcttttccaccacgccgagctgcacggccttcatgctgacccgttcgagaatcgcatccgagttcatcacgtgtacggcgaagtcgaaactgtccatgttccgagccatcaccggcaacgccttcggcagcagaatcgccgcggtcgtgtgcgagaacgaaacggccagcggctcacgcgcctcctgcacgcgggcgatctgctcacgcgtatcccgccataatccgtcgatgccgatggcggtctggtacagcatccgcccggcctgtgtgggcgtcacgtcgcttttcgcattgcgcacgaacagcggcgcgccgaccatctgctccaattgggcgatacgcgacgacaccgtcgactgcgacaccttcagttcgtcggcagccagcgtgaactggcccacctcgtatacggcgaccagggtttcgagcagagggaacatggtttaactgtacgctgtatgatgcacgaatatttcaattagcttgggcgtagccctaggccacggacctggaccaccctcagtctcgctttgcgagccagctcccgccagcgggaccccaatggttttcatatcactatgcttcgcgcagttttgcgagctgtgttttggccttgtggagcttggcatagatttcattgcgctgaacaggattcttgacgcgctgatggtcgcgggtgagcttgtccacttcggattcgagccgagcaatttcagtatggcgaatgatgcgcgcatccagattttcgatctccggcgtgcccagaatggtctgtgagcacagcgaggcccacagctcatcaatagtagagccggccagctccagccgggcctcccccgccggctgccaatcgccggcatatacccgatagatcggcgtgtggccggcacgccccggtatcgcccgacgcacggcgaacgcacattcctcacgtgtgctgccctcgaacggcacgtcgcgtacgcacacgaacacgatgcccgatttacgctgcccggcaatcaaatcgatgacctcgttcggtatgccagtggctttggccgtaagcttcagtccgatgaccagcacttccggaaccagtttgccgtccgcaagcccagtgttaatcgaccggaccaacgccagcatggtaatggattcgatttcgttcaccaatcgctgcttgagtttgcctgaaatcggtgccttgcccacgaacaaggctttcggcagtgtgcctttggcttcgggaatcgccgtggagacgggcagtcccagtgaaagcgcggatacggaaccacagtgtgcggcttgcgaaccagtcatcatcgaccttctttcccggcctgccatcagtgtcataccctcgcagtgcagcagtccgtttatctattggaaagcaacactagcgcatccaggccggaagtcgtggtacatatccatatcctgctgcggttataggaaatcccctccgagtttcctcgaaggggatttcttaagtcgctagttcaagcgaagattcttgtctgatgataatcaggcgaggatcttggtcacacgaccggagccaacggtgtggccgccttcacgcacagcgaaggtcaggccctcctccatggcgatgggctgaatcagctcaacggtgaaggtggcgtggtcgccgggctgaaccatctcgacgccttccggcagctcgatgacgccggtgacgtcggtggtgcggaagtagaactgcggacggtagttggagaagaacggcgagtgacggccgccttcgtccttggtcagcacgtagacttcgccctcgaacttggtgtgcggggtgacggagcccggcttggccacgacctggccacgctcgacatcctcacggccgaggccacgcagcagcagaccggtgttgtcgccagcctcgcaggcgtccatggtcttgtggaaggtctcgatggaggtgacggtggtggtctgggtcggacggatgccgacaatctcgaccggggtgttgacggccagctggccacgctcgacacgaccggtgacgacggtaccacggccggagatggtgaagacgtcctcgatcggcatcaggaacggcttgtccaggtcgtgaaccggggtcgggatgtagtcatcgacggcggccatgaggtccttgacggactggacccacttctcgtggtccggagcgtcgtcgtgcagggcgccgtaggcggaggtgtggatgaccgggcagtcgcgatcgaagccgttctcgtcgaggaggtcacggacctcttcttcgacgagctcgatgagctcttcatcgtcgaccatgtcgcacttgttgagggcgacgaggatcttcgggacgccgacctgacgggcgagcagcacgtgctcgcgagtctgggccatcgggccgtcggtggcggccacaacgaggatggcgccatccatctgggcggcaccggtgatcatgttcttcacgaagtcggcgtggcccgggcagtcgacgtgagcgtagtgacgcttctcggtctggtactcgatgtgggcgatgttgatggtgataccgcgggcggcctcttccggagcggagtcgatctggttgaagtcgtactccgggttgacatccgggaactcctcgtgcagcaccttggagatggcggcagtcagggtagtcttaccgtggtcgacgtggccgatggtaccgatgttaacgtgcggcttagtacgctcgtacttttcctttgccattacttttgtcctcctggacgtctcgtgagtttcctgcgccctttcgcacagggactcgcttattctactgggtttctgggttatgtgccactttgaagagccagaacccagtcagcggtatacgatactaccgctgactggagacaccggccacttcatgatgtggcgcgtgtcactcgccgcgctgggccttgatgatctcctcggagacgctcttcggcacctcgtcgtaggagtccatctccatggtgaacatggcgcggccctgggtcttggaacgcaggtcgccgatgtagccgaacatctcggacagcgggaccttggcgtcgatgaccttgacgccgacaccgtcggtcatggactggatgttgccacggcgctggttcagatcgccgatgacttcgcccatgtactcttccggcgtacggacttcgaccttcatgatcggttcgagaatgaccggcttggccttcggggcggcttccttgaagcacatggaacctgcgagcttgaaggccatttcggaggaatcgaccgggtgcatctggccgtcggtgacggtggccttgacgcccacgaccgggaagccggcgagaacaccggactccatggcctccttgacaccggcctcgatggggccgatgaattcggcggagatgtggccgccggtgaccttgttctcgaactcgaaggtcttgccctcggtggtgtcgagcggctcgaagttcatcaggacctttgcgaactggccggaaccaccggtctgcttcttgtgggtgtagccctggtccatgacggccttgcggatggtctcgcggtaggcgacctgcggcttgccctggttgcactcaaccttgaactcgcggcgcatacggtcgacgatgatgtcgagctggagctcgcccatgccggcgatcagggtctggccggactcttcgtcggtcgtgacctggaaggtcggatcctcttcggccagcttggacagggcgatgcccatcttctcctgatcggccttggtcttcggctcgacggccacctggatcaccggatccgggaaggtcatggagtcgagggtgatcgggtcgttgatggagcacagggtgtcgccggtggtgacgttcttgaggcccacgaaggtgtagatgttaccggcgtcggcgcggtccatcgggttttccttatcggcgtgcatctggaagatcttgccgatgcgttccttcttctcgcgggtggagtcgagcacggagtcgcccggcacgacggagccggagtagacgcgcacgaacacgagcttgccgtagaacgggtgggtggagatcttgaagaccagagccgcgaacggatcggtcttgaccgggtggcggtcgatctcgacggactcgtcgccgggcttgtagcccttgatggccggcacgtcctcgggggacggcaggtagtcgacgacgccgtccagcatcggctgaacgcccttgtccttgaaggcggagccgcagaagacagggaaggcttccttggcgatggtgagcttgcgcacgccggcgcggatgtcttccttggacaggtcgccgtcctcgaagaacttgttcatgaggtcgtcgtcggcttcggcggcggcttccacgagcttctcgtggtactcctgagccttgtccttgaggtcgtccgggatctcagtggtgtcgtacttggcgccgagctcctcggtgccgttccacacgtaggcctgcatctcgaccaggtcgacgacgccggtgaagtcgttctcggaaccgatcggcagctgcatcacgatcggagtagcgcccagcttctccttgatggtgtcgacggagtagtagaagttcgcgccgagcttgtccatcttgttgatgaagcagatacgcggaacgccgtacttgtcagcctgacgccacacggtctcggactgcggctccacgccttccttgccgtcgaacacggcaacggcaccatcgagcacacgcagggagcgctccacctcggccgtgaagtccacgtggccaggggtatcgatgatgttgatctggaacttgtccttggtgtcatgggactgacggctccagaagcaggtggtagcagcggactggatggtgataccacgttcctgctcctgcgccatgaagtccatggtggaggcgccgtcgtgggtctcgccgatcttgtagttcttaccggtgtagaacagaatacgctcggtagtggtggtcttgccggcatcgatgtgggccatgatgccgatattgcggacgtcgtggaggtccgaaatctcttcagccatctttttccttagttttactcagggcgagtgattaccagcggtaatgagcgaaggccttgttagcctctgccatcttatgagtatcctcgcggcgcttgacagaagcaccgaggccgttggaggcatccaggatctcgttggcgagacgctcagccatggtcttctcacgacgggcgcgggagaagtcggtcagccagcgcagcgacagggtgttggcgcggttcggcttgacctcgaccggcacctggtaggtggcgccaccgacacggcgggagcgaacctcgagggacggacggatgttgtccagggcgcgcttgagcacagccaccggttcctggtcggacttctccttgaccatatcgagcgcggagtagacgatgtcctcggcgatcgacttcttgccgtcaagcagaatcttgttgatgagctgcgccaccacggtggaaccgtagatcggatcgggcagcacgacgtgcttcttggaaggtcccttacgtgacatatctcttacttcgccttctttgctccatacagggaacgaccctgcttacggtccttgacaccctgggtatcgagcgcgccacgcacgatgtggtaacgcacacccgggagatccttcacacggccgccgcgcacgagcacgatggagtgctcctgcaggttgtggccctcgcccggaatgtaggcggtgacttcgatgcccgaggacaggcgcacacgagcgaccttacgcagagccgagttcggcttcttcggggtggtggtgtagacacgggtgcacacgccgcgacgcagcgggctgcccttcagggccaaagtcttggacttcttcggctttgcctgacgtcccttacggacgagctgttcaatagtaggcaacttgaattctccgattcagtggtttctcttgcttttgtgtgaccgccgcactgcgcccacacttttcagcacactcgcttggcatctgcctgttggcgacacccgacgaatcggaaaagatagcccagtccaccggcccgatggccttcgcccctcccgtcggcgcattactacgtgcgatcagcggtttgaaggatatcccagcatgctcgcctgttacataaggcgcgctgctggcacacacgaatatctatactacgattccgccggacaacgacgcgccgggcctcgactcactggtttggggacctcctgcgccctgtacttctcccctcctcccaacgcaacaatcccgggaatgcgtcgcacaacacacgcacacacgccctcccaacgcaatattcccgggaatgcgtcgcaaaaaagcgaacgccacacagcaggtgcccccgcggagactatgtcacacgggggcaccgccaaggaggttacattatgtttcttttcaccacatgccgcttctgtgttatctgtttccagcacatcctcgtgctcttccatatccgatgggaacctctagcgacccggcctctttgccgtatcaccttgccgctttctgcattactaattatagcaaaaccgccctcgcgaaacgcccgatacattaatcgggagtaagcgggagcggctatgttatgcgaggtaggaaaggtgagtgaccgactgactggagtcgtaccttacccgacctttctcaccatctcaggatttcaggcagcgaccttggcggccttgtcggcgtcgaacgggtgggccacggaaacggtgctcttggcggagcccttctcgccgttgtcagaatcccaatgaatctcgtgccggtcgtcatggttgcgccaccagctggacaggatggagccggagatgttgtgccacacggagaagaacgtggacggcacggcggcgagcgggttggacgcgaaggaggtcagggccagcgtggcgcccagggcggagtcctgcatgccgacctcgaacgtgatggccttctgctgcgcgtagcggaagcccttcgggtagatcctgtacatcagcttcgagaagccgaagcccagcgagtagccgcacagattatgcaggatgaccaccgggatggccatcagagagctggccacgaacagcttcgggccattggcggcgacgaccacgccgatgatcagcaggatggccacctgagacacgatcggcagggccaccgtgaccttctcgatcttcttgccgaagatcatgtggcagatcacaccgagggcaatcgggaagagcaccaccttgacggcgttaaggaacagggattcgaccggcacgctcacatactgggaggccagcagctgcatcagcagcggaatcatgaacggggcgcacagggtggagaggatgccgatggagacatcgagggccacgtcaccacgggacaggtagctcatcacgttggaggaggtgccggacgggcagcagccgacgagaatcacgcccacggccagcgggccggacaggtggaagatcgcgcacagggccacggcgacgagcggcatgatgacgaagtgggccaccgtgccgacgatgaccatcatcggctgggtgaggatgcgcttgaaatcgtccagcgtcagggtcagccccatgccgaacagcacgatgcccagcatgtagccggtgtacgccttgccccacaggctggcggccggcacgaagtagttgaagacggcccagacgatgacgatgaccgtaaaccacttggtcagccaatccgcaaaggctttaaccttttccatggtgtttctcttcccttgttcggtgtaggtaacatcgcatgaaactaggcgggtcgcggttgatatgaaacataatgctcacattgtgaacgctcacgtaatcatctctgcaatccccagccgcaccatcacgccgttgtgtgccctgacttttcatcaatcgccacacaagacccactcgtccacatcccaccatttgagacagcccacagcctggccccaagaatgaaaccaaccgcttgattccatcgcgacacaccgatgagcacacatccgcaaagttgtgtatagtattcacctgttgtgcgaattcagcttgctgaatacgacaccatggtggccatagctcagttggtagagcatctgattgtggttcagaaggtcgcgcgttcgagccgcgttggccaccccagtaaaacccttccgttcgcggaagggttttgtttttctccatgaattccccgctcctgccgggaaccgccacgttgtacactcgggcatatccaattcatctaacacaaggacaaaaggtccgtcatgctgtcttttgagaacgattactcccgcgccgcccatcccgcagtgcttgaagccgtggctgaagccaacaaccatctgtattcgggctacgggtccgacgaactgagcgatcaggccaaggccaagatccgcgaggcctgcggccagccggacgcggatgtgtggttcctcgtcggcggcacgcagaccaaccaggtcgtcatcgacaccatcaccccggcgtatgcaggcgtggtcgcggtcgcctccggccatccgaacgtgcacgaggccggcgccatcgagttctccgggcacaaggtgcttacgattccccaacacaacggcaaaatggatccaaccgaactggacgagttctgcaagaccttctatgcggacggcaactatgagcacatggtgttccctggatccgtgtacgtctcgcaaagcaccgaatatggcaccatctactccaaagccgaactgcaggccatcgccgatgtggcgcataagtacgatatgccgctgttcgtggatggcgcgcgactcggctacgcgctgaccgccactggttccgacatgacgctcacggatctggcgaccatcgccgacgtgttctacatcggcggtaccaaggtgggtgcgctgttcggcgaggccgtggtgtttaccaagcacaacacgccgaagcacttcctgacccgcatcaagcagcacggcgccttgctggccaagggcttcgtgctgggcgcgcagtttgacgccttattcaccgacaatctgtacttcaagatcgcccgcaacgccaatgaggcggccgatcgtattcgcgaggccctgcgcgccaagggctacatgctcactttcgaagcgcccaccaaccagattttcgtgacgatggatcagccgaccatcgaccgtctggagcgcgaggtcaagctcggctttaccgagaaggccgacgacacgcataccgtgatgcgcatctgcaccagctgggccaccacgcatgaagagatcgatcagcttattgaggtgttgtaaaacccttcgctaatctctctctccgtcatcgcttcgcgatgccacctccctcaccagagggaggttttttcgtagctcccgccgatgagggagctggccgccgcaggcggactgagggaaagacctctccgcaaacgagaaggctcctactcccctatcgccttgcgttccatatccacgaacttgtggaccgaggcttccacggaataatgcgccttggtgtattcggcgtatttctcgccccattcggcgcgctcggcctgatgtgcgatccaccaatcgatgcgtcgggccagcagggccgcgtcccgcacggggaacaacgactcgtcgatcagcgcgaactggccggccgccgacaattcggacgcggcgatcaccggcaccaatccgcacgccatcgcctcgatcacgctcaccgattcgatgtcggcaatcgaacaatgcacgaacaaatcgcccgaacgcaacaaatcgggcatatcggcgtgcttgtggaatccgatatcggccttgcgcgccagcaaacgcccggcgcggaacttgagatactgcttgagcggcccagtaccggcgatcaccagctgaatatcgccggcgtgccgggacatcgacaccgccttgatcagcgtaatctgatctttctcgctggccagtcggccggaagcgatgacgcggaacggcacgggagccgaggcatccggatcggccggcttcttcggcgaatacaccggtgaataaccattggaaatcacgtgcaacttggctttatacccgtgcgcgcgcaacaggctcgcggtcatttcggtgggcacatggatgtggtcaatgtgcttgtacagccagtgcttgaacagccagtacaggaagctggaaataccgggaatgcgacgtagcgggccggccgaatacagcacgttctccggctgcaggtggaatccagcagtcacgggaatgcccagttggtgggcgactttagcggcacgacggccgaatttgaacggcatatagatatgcaccacatccacgccttggaaggcggtgcggaacaacgtgtcgctgggttcggcgaattgcatgagctgcttggcggccacccacgagacgagtggcaccttattcacacgcgccggatattcgggcgcccctataccgacaagcctcacatgatggccttgccgctccaattccgcagcccattgcaaggccgaattggaggtgccgttgccctgattgcccaccgtatcgaccacaagagcgatagtcagcggacgatcaatgctctcttcaatcccgttttcgcgcattgcctcatcctaaaccaccgcgcggcaatagcgtcggccgcgctgcctgaacgcgtgtgaaatggtatgggctgccgcattttgcccaatattgaatcacgcgcttcgcagcgcacgatcggcgcgggccacggcctggaacaactcggcggtgtgcttgagcagactgatgcgcacccagccttcgcccgcctgaccgaagcagacccccggcatcagcgccacgccggccgtgttgagcagccaatccacgaatgcggcggaatcgccatgccaccgcaccagccggccaccatatacattttggacagcgagccaagttccagcgccacgtccagcgcgcccggagtctccagcaggctcagcgagcgcacgtcgccgaattcgagcctcgcataggcgaaatcgttaagtacttcgactattgccagcgtgccggtttgtagcctgaaacgccggaaccggcacgccgctattcgctatatgtcgcatccaaaaatgttggcccgaccgccccatacttcatcggccggtaattgctaaggtacgacggctctgttacacacgcaatggcgtgtctatacgcagtatttatggcgggttacgggcatctgaatcttcatggggcggtaacctgcccatggggcggtatttaccccatggggcggtgaaattcccatggggcggtaaggcaaaacggcttaattccgcggtttcacaaaaccaacaaaccgccccatggactcattaccgccccatggggaatttaccgccccatgaagccggatattccgcccgtaattttgccgcgcgaggcactccgctcacgcgacataccgaaatcatcgcgtcatggcagaatgtgggtatgactgagaacgccgtgaatactgccgtgacttccgcctcttcccccgcaacctccgctgagacttccgccgtctcccccgcaactcgcgcagccaaccacccgctgggcacaccgctgggcaagcaccccacccgtgtgctgtttttgggcgctggcgagctgggcaaggaggtcacacttgaactcatgcgactgggcgcatgggtgtgtgctgctgactcctatgccggcgctccggcccagcaggtggcgcatgaataccgcgcgttggatatggcgaatgccgccgaattgcaggcattgttcgatgaaatcaagccggacatcatcgtgcccgaggtagaggccatcgccaccgatgtgctggccggtgctgcggccgcgggcgcccaggtggtgccgagcgccgaaatcgccgcgatctgcatggaccgcgagcgcctgcgcgtactggcccacgaagaattgggcttgccgactacaccgtatcgttttgccggctcgctggaagagctgcgcgccggagcttcggaagtcggctatccgtgcgtggtcaagccggtgatgagctcgtctggtcacggccagtcggtggtgcgttccgccgacgccatcgatgccgcttggaccgaagcgcaggagggccgccgcgccgccgatgagggcgatgtgtcgcgcgtgatcgttgaggcgcttgccccgctggagcgtgagctgacggtactgaccgtttcttcgtccgccggcattgtgacgtgcgcgccgatcggccaacgtcaggagtccggcgattaccgcgagtcctggcagccggctaccgagcccgatggcgaggccgagcgggcgcgcgacatcgcacgtaccgccgttgaaggcttggtggccaaggctcaggcgaccggcgaaaccggttggggcgtattcggcgtggagctgttcgtgctcaccgacggctcgattctgttcaacgaggtctccccccgtccgcacgataccggtatggtgacgatgacctcccagcgtctgagcgagttcgcgctgcacgcccgcgcgattctcggcctgccgatcacccccgagcatgtggcgctcacgattccggccggctcggtggcggcaagccatgcgattgtggtggccggcgacggtgaggccgagttcaccgatgtggccgctgctctggccgaacccggcacggacctgcgcatttttgccaagcccgaagtgcatggccaccgtcgtatggccgtggcactggccgtcggcgagtccgaagccgacgcccgtgccaaggccggccgtgttgccgatgcgttgacgattaccgtggagtagtccacggcctgatcagctcagcatggcctcaatattgttgccgtccgggtcgtggatgaacgcggcgtaatacgtggggccatagttcgggcgcgggcccggagcgccgttgtcggtaccgccagaggtgagaccggcctcatggaacgccttgacggcgtcctcatccttggcgcggaacgccacatgagacggcaccaccgggttgccgtccttcggagactccagccaaacgctgtcgccatcctcgtcattggcaaagcacacggcggtcgggtacgccactttcttgacgtaacccagcggggccagcagcttctcgtagaaatccgcgtactgtgcggcgtcggaaacaaacaaaccaatatgatcgatcatgacgaacctccttgcaccatttcgtcactcccattatcgtgcgtgcgcggccgtacactcacgttttgtctattgacgaacatctgagtgtccgcgtgcttgcgtagatactgttactccgaacgactatgcgaccggcaatgagtcgattgtcggaccaataccgtccgcctccgccatcccaacagcgtatggccgttcgatgcagcgacgtatgatgcgctggccgcatcgtagcgtcatgccgagtgttgttgtagccctcgattggtacccttttaccgttagttcacccagaaattccactcctgaaaggtgagtcatggagaagctggaaaagctctacgagggcaaggccaagcaactgtacgcaaccgacgatcccgaggttctgtgggtcgaatacaagaacaccgccaccgctggcgatggtgaaaagaaggaagacttcaccggcaagggccgcctgaacaacctcatcaccaccatcatcttcgacctgctcaagaagcgcggcatcgacagccatctcatcaagcgagtgaacgacaccggccagctggtacgcaaggtgaacatgttcccgttggagatcgtgctgcgcaacgtggccgccggccacttctgctcccgtctgggcgtggaggaaggcctgccgctcaaggagccggtgcttgagtacttcctgaagaacgacgatctgcacgatccgttcgtcaacgacgatgacctggtggccctcgacgtatgcactcgcgaggatctcgccgagatcgccccgctggcccgcaagattaacgaggccctgatcgagatcttcgccaagatcgacgtcaagctggtcgacttcaagatcgaaatgggccgcgccaccgacggcacgctgctgttggccgacgagatcaccccggattcctgccgtctgtgggaccagaaggaccactccggcaaggtcgagcaccttgacaaggacctgttccgccgtggtctcggcagcatcatcccggcctacgaagagatcgaggagcgcctcgccgaactcgccaagtccgaaggcatcgaagtcgccgaataagtcgtttaggtgcaggtagcagaacatacagctggctcctctctccgaggggagctgtcgccgatagacgactgaggggaggtcaagacgttcaccgccatgacaactcccctcagtcagctccgctgacagctcccctcagagaggggagccaagttcttttaccgcgcttcttcaatttttcaataatttcaagaaaggatttccatggtttttcgcgtgtacgtggaaaagaagcccggctttgatgtcgaagcccagcagcttgcgggcgaactgcgcacgatcctcggactgaacggcctcaaggccctgcgcatcgtgaaccgctatgacgtcgaaggcatctcccaggagctgttcgaccagaccgtgcccaccgtgttcagcgagcctcaggtggacaatgtggcctacgacctgcccgacttcgccggcgccaaggtcttcgccaccgagttcctgcccggccagttcgaccagcgcgccgactccgccgccgaatgcatccagctcatctcccagggcgagcgcccgacggtccgttccgccaagctgtacgcgttggaaggcgaactgaccgacgccgacgtggacgccatcaagcattacgtgatcaacccggtcgaggcccgcgaggccagcctggagaccaaggaaaccctgaagacccaggtgccggtgcccggcaaggtcgagaccatcgccggtttcaacgagatggacgccgaagccggccagaagttcatcgacgagcgcggtctggccatggatctggccgacctcgaattctgtcagaagtacttcagcgaggagggccgcgagcccaccatcaccgaaatcaaggtgatcgacacctactggtccgaccactgccgtcacaccacgttcggcaccgagctggacgaagtgaccatcgatgacgccaccgtcaaggccgccttcgagcgttatctggcgatgcgccacgagctcggccgcgacgccaagcccgtctgcctcatggacatgggcaccatcggcgccaagtggctcaagaagaacggcgtcctgaccggcctcgacgagtccgaggaaatcaacgcctgcaccgtcaaggtcaaggttgacgtgaacggccacgacgaggactggctgttcctgttcaagaacgagacccacaaccaccccaccgaaatcgaaccgtttggtggcgcggccacctgcatcggcggctgcatccgcgatcctctgtccggccgttcctacgtgtatcaggcgatgcgcgtcactggcgccgcggacccgaccgtgccggtctccgagacgctggaaggcaagctcccccagcgcaagctcgtgaccaccgccgccgccggctacagctcctacggcaaccagatcggtctggccaccggtcaggtcgacgagatctaccaccccggctacgtggccaaacgcatggaggtgggtgcggtcgtggccgccactccggccgaccatgtgcgccgcgaaaccccggcccccggcgacaagatcatcctgctgggcggccgcactggccgtgacggcatcggtggcgccaccggttcgtccaaggcgcataacgtggaatcgctcgaactcgacggcgccgaagtgcagaagggcaacgctccggtggagcgcaagctgcagcgtctgttccgccgcggcgatgcctgccgtctgatcaagcgctgcaacgacttcggcgcgggtggcgtgtccgtggcggtcggcgagttggccgacggcctgttcgtggacctcaacaccgtgcccaagaaatacgagggcctggacggcaccgagctggccatctccgaatcccaggagcgcatggccgtggacgtggccgccgaggacgtggacgagttcctggcctacgcccgcgaagagaacctcgaagccacggtgatcgccaccgtgaccgaggacccgcgcatggtgatgacctggaacggcgacaagatcgtgaatctgtcccgtgagttcctggcctccaacggcgcttccaagcaccagaccgtgcatgtcgaggcacagcagtcctacgagaccccgtggggcgagggcacgctggccgagcgtatgaacaagctggtcaccgacatcaacgtggcctccaacaagggcctttcggagcgcttcgactccaccatcggcgcgggcaccgtgctcatgccgttcggcggcaagcgtcagctcaccccgaacatggccatggtcgccaagctgccggtgttcggcgagaccaccaccgcttcggcgatggcgtggggcttcaacccgtacatcatgtccaagaaccagttcaccggcgcctacctgtccgtggtcgagtcgctggccaagctggtcgcggccggcttcaagcatgagaaggcctacctgagcttccaggagtacttcgagaagctgcgcgacgagccggaacgctggggcaagccggcggccgccgtgctcggcgcactgatggcccaggtggacctgggcgccggcgccatcggcggcaaggactccatgtccggttcgttcgaggatctcgacgtgccgccgacgctgatctccttcgccgtggccgtgggcaacatgaagcgcgccacctcccctgaactcaaggacgccgatcaccgtatcgtgcgcatcgcgccgcgctacctggccgacggtctgaccccggacaaggatgcgctgcttgaggtgttctccgtgatcgaggagctcaccgacttccacgatgccctggccgtctccacgccgggctatggcgccaccgccgaagccctgttcaagatgacgctcggcaaccgcatcggcgtgactctgaacgacagcatcgccgtggacgacctgttcaccccggcatatggttcgttcatcgtcgagctggcagacgatgccaagcttccggccgtctccaatttggtcgagatcggcgaaatcggcaccaccacctccgagtacgtgttcaaggccgccggcgagacgctggacctggacgctgtgcaggaagcttgggagtccggcatcgaatccgtgttcccgtaccgttccaagggcgaggacaagggcgcgaccgtcgagaccatcgacttccacgcgccgaagaagaccgtgtacgtcggctcttccgtggccaagccgcatgtggtgatcccggtgttcccgggcaacaactgcgagtatgattccgccgccgccttcgagcgcgccggcgccgacgtgaccacgctgatcatcaacaacctgacaccggccgcggtcgccgaatccacgcaggcgttggtcgatgagatcaacaagagccagatcgtgatgatcccgggcggcttctccggcggcgacgagccggacggttccgccaagttcatcaccgcgttcttccgcgcgccggccgtcaccgaggccgtgcgtgacctgttgaagaaccgcgacggcctgatgctcggcatctgcaacggcttccaggcgctcgtcaagctgggtctggtgccgtacggcgacatcgtgccgatgaccgacgcctgcccgacgctgaccttcaacaccatcggccgccaccagagccgactggtccgcacgcgcgtggcctccgacctctccccgtggctgtccaagacttcggtcggcgacatccacaccgtggccatctcccacggcgagggccgcttcgtggcctccgacgaggtactcgcccagctcagggccaacggccagatcgccacgcagtacgtggacgagaccggcacccccggcatggacctagatgtgaacccgaacggctcgctgctcgccatcgagggcatcaccagcccggacggccgcgtgtttggcaagatgggtcactcggagcgttccggcaacggcctgtacgtcaacgtgcccggcaacaagtaccagccgatcttcgaggccggcgtggaatacttcgccgcctgataatcggcgcgtatcgcgtctgatacggcacacagggaaggaactctcgggttccttcccttttttgttcatgccggtcatgggctaaggttggggtgttcgcactaccgaatccgccgctgaaaggacctgtcgtcatgccgatcaacgaggcattgttcgccgcgatgaaggccgccagctacatcaagcccaacgcgggcaagtcgtacaaattgcagcgcgtggcggaagagcttatcgccaagcaggcacccgccaatccgaaatgccgtgtcgaggacgccttcgcgcctatggcggatggatatgccgtaccattgcgagtgttcacgccgctggtcgcctatggagcgcccctgcccgaagccctggaggaatcttccgccaatggcacgccagtggcctcggcaatatccgcgattctgcccgccgtattacccaaagtcctacccaaaatacccatcaaggaaagcacgtcgagcggcaacaccgacggtatttccggcaatgccaacacggaacttccctcagtcacgccgcgtggcacgatcctgtttttccacggtggcggttggaccacaggcggcatcaacctgtacacgcaggcttgcgcgcatatggccgtacgtctgcaacgccgtgtgatctcggtcgagtaccggctggctcctgaataccgcttccctactgctgttgagaattgctatgaggtagcccggcagctgtttgctggggaattgccgatttctggggtgggtggttctgttgatgttgaccacccccagtcggctgcgccgacagcccccaccggcgggggcgatatatctgcgacaatcccagcaccggatcccgacagcatcgtgctgtttggcgacagcgcgggcggcaatcttgcggccgccgtctcgctcatggcccgcgaccgcggcgagttcatgccgcgcacgcagatgctgctttacccggtggtcggcaacgactacaatcccgagaccagcccgttcgaatcggtgcggaccaacggcaccgactacatcctcaccgcacaggacatggccgactacatcgacatgtaccgttcgtccgtggccgacctgaccaatccgtatttcgcgccgctcaccgcgcatgacctgagcaatcagccgcgcacgctggtgttgtccgccgaatactgcccgctcagagacgaggacgaagcgtacgcccgtcgtctgcaattggtgaacgacaacgtctcctgttaccggattcacgacggcatccacggttatctgctcaacacgtcggccgtagggctggtgtccaccacttaccggatcatcgagcatttcctcgacgacacaccgctggtgccggctcccggcaccggcaccaccgccaacgcaccggagggaggcgacgcatggcaagacgtacttggtaccgactagacaacatcggcaagttctactcctcccaggctggccgctcctcgcagaccgtgttccgctattcggccgagctggcggacgacatcgccccggacatcctgcagcacgcgctcgaccatgccatcgcccagttcccgagcttcaacgtgcacctgctcaacggcatgttctggcattacctcgaacagtcggacggccggccgctggtggagccggaacatctgccgatatgctcgcgactgcattacgggcccaaaagcatgctgttccgcgtgagttatttccgcaatcgtgtcaatctcgaggtctcgcacatcatttcggacggtcgcggcgccatcaacctgttcaagtcactgttgcacgcctacatcgccgagcggtacgacgtgccgggcgtgccttcggattacgacggctcggacagcgacaaagccgaaaacagcttcgacaaatactacgagaaagacaaggccggtgccgcgcccggcacgaagatctaccggctggccggccccatcgaccgggacgcgcccacgttcatggaatatcacgtcagcgccagcaaggtgcttggtgcagcgcatcagtgcggagtgagcctcacctcctacctcatcgccgcgatactgtgcgcgattcgcgacgtcatgccctcgcgcgcccgcaatcgcgcgattcgcgtggatattccggtcgacttgcgcgccttcttcaggtcggagaccgtgcgcaacttctacggcatgacttacgtggcgtacacgccggccgatatcgaagccgatgaggactccgcgaaaacttccgcaacgggcccagacgcgaccggcgacggccagcagtccgccgcccgcaccgcgcacggcaacggtatgggtggattgctgaccgatgagccgttggccgacatcgcccgccatgtgcaggagcagctcgaccatgccaccagtcgcgagcgcgtcgaatcgcatatgaaccgcatgattgcgctggaaaagaatccggcgctgcgtctcgcgccctcccctgccaaggactgggtgctggagctggcccggttcatcgccgaccgcgagaccacgaccaccgtctcgaaccttggccgagtcaccttggacgaacgactcgcgcgccatgtgcgttcggtgagcttcctcaccacaccggccagcctgaatttcacggtctgctcgtttggcgacgacctgagcatcggcatctccaccgtctaccatgatctgaacgtcatcaagaacctgtgtcggactctcgccgcgcagggcatcagcggccgtatgaacatcgccggcgcgcatgtggagaaaggagcgtcggcatgaagcattgcgatgcctgcaacgtcgatttcaccggcgatatggcccgttgcccactctgtcagaacgaattgcacggcgaggcctctcccgccgcattccccgcgcagcagatctatctgcgtccgaggcgtttggcggtggagatcatcacgtttgtaaccggcgcgattctgctgctgcatggcttcttcagctatctgttttcgtggccgataccgattgccagtgcatcggcagccgcgctgatcatcagcgtgctgttcatcaacagtgcgattctgcacgcgccacggccgcttcgactcatgtttcgatacttctatatcatgctggcgattgcgctggtctggtttgtcgcgacgatgaatcatgtcgtcaccatgttcgtcataccgatcacgtgtctggtttcgctggtctttgacgtggtgctgcttatcgtgctgcggaccaaggccattgaccagtacgccaagtatctggcgttcgacatcgtcgccggtctgctgcctctgacgttcattccgctcggctgggctccgtgggatgtgctggtgatggtcagcgggctggtctccctgctggtgctgctcggcctgctcgtcttcgcccgccgccagctcttctcggaattcggcaaacagttctcggcgtaagttgactgatattgacgtttaatagtgatggcccacaggaagattccctgtgggccatcactatctgttgtgtatggatacgcttaatcgtctacttcatagtggtcgacagatgccttcacctgcgccgcatcggcatcgctaccggtttcgaattttaccttttctcctgcaggccaagcattagtactggcgtatact

SEQ ID NO: 3154 - DNA, 22092 bp, Unknown
  R53_2m  MAG No. k141_370
actcggcatctccccggacgccctcgtgttgcgttccgaccgcccgctcaaccagtccatcaaagacaagatctccctgatgtgcgacgtcgatgccgaaggtgtggtcaactgcgtggatgcgccgagcatctacgatgtaccgaagatcctgttcgaagagggccttgatgcttacgtggtgcgtgagctcggcctgccgttccacgatgtcgattgggatgaatgggcagacctgcttgagcgcgtccaccaccccaagcacgaggtcaacatcgccatcgtcggcaagtacatcgatctgccggacgcctacctgtctgtcaccgaggccatcaaggccggcggctttgccaactgggccaaggtcaacgtcaaatgggttgctgccgaccgttgcgaaaccactgaaggcgcggccgccgctctcgacaacgtcgacggcatcgtgatccccggcggctttggcattcgcggcatcgacggcaagatcggcgccctgaagttcgcccgtgaaaccaagctgcccgcccttggcctgtgccttggtctgcagtccatggtcatcgaatactcccgccacgtgctgggcattgaagacgcgaactcttccgagttcgagcccgattgcgccaacccggtgatcgccaccatggaagaacagaaggacatcgtggccggcaagggcgacatgggccacaccatgcgtcttggctcctacccggccgagctggaggaaggctcgctggtcgccgaactgtacggcaccacgcatgtcaccgagcgccaccgccaccgttacgaagtcaacgtggcctacaaggatcgtctgcgtgaaggcggcctgcgcatctccggccagagcccggacggcgagctcaccgagttcgtggaactgccgcaggacgtgcacccgttctatgtggccacccaggctcacccggagttcaagtctcgcccgaccaagccgcacccgctgttcgccggtctggtcaaggcggcgctcggccatcaggcggcccgctgaccgtggatcccgcgcggtcggtccgcgcacgatgaaggcgtgacggcacggcatctcaggatgcttcgccgccacgccttcgccgtttggcgccatccgtgatgccgcatggcccgatggcgcccgcatgtaatcaagcccacagccaatatgcgtcagggcagctagtgtttgcacttgggttctgctaggttttcatagggttaagtgtgatacaaggaaggcaggatggtgaccgaaaacacagcaccaaacgccgccgctgacgtggagatgagccagtatgtggctgatcgtacccgcgtcaacgaggacaagatcaagaaggatgacgagatcatcagccagttcggcgactacaactatggttggcatgattctgatgccgccggcgaagccgcaaaacgaggcattgatgagaacgtcgtacgcgcgatcagcgccgacaaaggcgagccgcagtggatgctcgacatgcgtctgcgtggattcaaggcgttcctcgaaaagcccatgcccgattggggtgtggatctctccggcttcaacgccgacgacttcaagtactacgtcaagccgatcgagaagcaggcgaagtcgtgggaggagctgccggacgacatccgcaacacctacgatcgccttggcatcccggaggcggagaagaaccgcctcgtctccggcgtggctgcccagtacgagtccgaggtgatctacaactccattcgtgaggacctgaagaagcagggtgtgatcttcgtcgacacggacaccgctgtgcgcgaataccctgaactcgtcaagaagtacttcggcaccgtcgtgcccccggaggacaacaagttcggcgccctcaacaccgcggcatggtccggcggctcgttcgtatacgtgccgaagggcgtgcacgtggacatcccgttgcaggcatacttccgcatcaacaccccggccatgggtcagttcgaacgtacgctgatcatcgcggacgaaggctcctacgtgcactacgtggaaggctgcaccgccccgatctggtccgaggactcgctgcacgccgccatcgtcgagatcatcgtcgaaaagcacgcccgcgtgcgctacaccaccgtgcagaactggtcgaacaacgtctacaacctcgtcacccagcgtgcctacgtgcgtgagggtggcacgatggaatgggtcgacggcaacatcggttccaaggccaccatgaagtacccggcctgcatcctcgccgaaccgtacgccaaggcatccaccatgtccctcggcttcgccggcaagggccagtaccaggacacgggcgcgaagatgattcacctcgccccgcacaccagctccaccatcgtcgccaagtccatctcgcgcggcggcggccgctccgcctaccgcggtctggtcaaaatcgtcaagggcgcgtacggttcgtccaactcgaccgtgtgtgatgccctgctggtcgacgacttctcccgctccgatacctacccgcacgtcgatgttcgcgaagacgacgtttcgatggcccacgaagccaccgtttccaagatctccgaagaccagctcttctacctgatgagccgaggactcacggaggaagaggcgcgaggcatgatcgtgcgcggcttcgtcgaaccgatcagccgcgagctgccgatggaatacgcgcttgaactcaacagacttgtggaacttcagatggaaggatcggtgggctgattccgatgaccgacaacacaacacccgtcaaggaaatcaagattccggtcgccgaccccaacgacccgtacgcgattccggccgccatgccgtcctccgtggaccatgccgtgcgttcgttcaacgcaggcgactacccggagcccagccgcaagcaggacgaatggcgctacacgcctatcgagcgcatcaacgagttcttcaccgtgttcaagccttccggcgaaacgcagatcgaagtctccatgattgactgctcgccgttggccgaaggcgtgaagctcagccagatcaagctcggtgagggcctgtccggcactgtgtccaagcccaacgaccgcgtctccgcagtcgaatgggaatccggccacaccgcaaccattctggaactgtccggtgagatcgcccagcccgtgctcgtcaaggtgcacggcgcgggggaggacctcgacgccttccatctggtgatcgccgccgccgacaaggctcatgcggacgtcgtcgtggaacacgacggtgacgcacgactggccgaaggcgtggaaatcaccaccggcaaggactcgcacgtctccaccacgttcgttcaggaatgggccaaaaccgccaagcatgtggccaaccaccgcatccacgtcggcgaaggcgcatccctgcgccactccgtcgtgaccttgggcggcgacatcgtccgcatccgcatggatcaggacttcggcggcgaacagggcgacctcaacatgctcggcatctacttcgtggaccccggcgagcacatcgagcaccgcacgatggtggtacacaaccaccccgactgcaggtcccgcgtggtctacaagggcgcgcttgacggcaagggcgcgcactccacttgggtgggcaacgcgctcatccagcccaccgcccccggcaccgactcctacgagctcaaccgcaatctggtcctgaccccgggtgccatcgccgattccgagccgaacctcgaaatcgaaaacggcaacatcatcggtgccggtcacgcctcttcggtgggccgcttcgacgacgaggaactgttctacctcgaatcccgcggcatccccgaaaccgacgcccgcaagctcgtggtgcgcggcttcttcggcgaactcgtcgaggagatcggcattcccgccatctccgaacatctgatgaccgtgattgaccgccgactggcccgtggcgaaaacgacgccatggcacaggtcctcgaagacaagtaagaacagcatttttaggagcacaacaatgtcaacactcgaaatcaaggacctgcacgtccacgtcgaaaccaaggaaggcatcaagccgatcctgaagggtgccaccctgaccgtccactccggcgaaacccacgccatcatgggccccaacggttccggcaagtccactctcgcctacacgttggccggccaccccaagtacgtggtcgactccggcgaggccctcctcgacggcaaggacatcctcaagatgactccggacgagcgcgccaaggccggcctgttcctggccatgcaatacccggtcgaagtaccgggcgtgtccatgaccaacttcttgcgcaccgccaagaccgaaatcgacggcgaggctcccggtattcgccagtgggccaaggacctgtccgcagccatgaagcgcctcaagatggacccgaagttcgcctcccgttccgtgaacgaaggcttctccggaggtgaaaagaagcgcgccgaagtgctgcagctcgaactgctgaagccgaagttcgccatccttgacgaaaccgactccggcttggacgtggacgccctgcgcatcgtgtccgaaggcgtgaaccgtgccaaggaagccaaccagttcggcatcctcatggtcacgcactacacccgtatcttgaagtacatcaagccggacatcgtgcacgtgttcgccgacggccacttcgtcaagaccggcggccctgagctggccgacgaactcgaagagaacggctacgaccagtacctgcccgaaggcgccgactccgagtccgcactggcctgagtccgtgaccgtgggagcctgacatgccctattctcgacacgctccgggccactcaggccaagtctttacggtcgcgaacaggccatgtccgactcccactcgtttcgtacaattgttacgtaagtaggggaacataatggttgattttaaggagattcggggcgagttcccgattctgaatcaggagattcacgggcacccgctcgtgtacctggattctgcggccacctcgcagaagccgaatgcggtgatcgacgccgaggcgaacttctaccgtacgatcaacgccggcgtgcaccgcggtgcccacgagctggcggcccgtagtaccatggcttttgaagaggcccgtgccaaggtcgccaagctggtcggcgcgaatgcagcggaaggcgaagaagagatcgtcgtcaccggtggtgccacggccggactgaacctgctcgccaccgcattcggcaatgcatcgctgggtcgtgggggagaagccgccaagcgttttgccctgaagccgggcgatgagatcgtcgtctcgcgtgcggaacatcattcagtgctgctgccattccaggagctggcctaccgtaccggtgccaccttcaagtggatcgacctgaccgaggacggccgtgtgcgtacggacaacctcgacgaagtcatcaccgaacgcaccaaggtcgtggccgtcacccacgtgggcaacaccacgggtgccatcaccaacatcgcccctatcatcaagcgtgcgcatgaagtaggttcgatcttcatcttggacgcttgccagtccgtaccgcacctcaaagtcgatttccatgcgcttgatgtggacttcgctgcctggagcgcgcacaagatgtacggtcctaccggcgtcggtttcctgtacggtaagcgcgaactgctcgaagccctgccgccggccaacttcggcggctccatggtcgaactcgcctacatggaccacgaggcccaatacatggcccctccggcccgcttcgaggccggcacccagccggtcgcccaagtggtggccgcaggcgtcgccgccgaatggatgatgaacatcgggctcgagaacatcgaggcccatgagaagaccatcgccgccgaactgctgaagctcggcgacatcgatggcattcgcatcctcggaccgcgcgaaaacgtggaccgcatcggtaccgtggcgttcgacgtggccggcgtgcacccgcacgatgtgggccagttcatcgacgcccagggcatcgcgattcgcgtgggacaccactgcgcccagccggtgcaccgccacttcggcctatacgcatccaaccgtgcctcctccggtgtctacaattcggtcgaagatgcccaagcattggtcgaagcggccaagggcatccgtaagttctttggagtggagtaaaacagaacaccatgaacgaattcggtatgagcggggatgacctcgaacagatgtaccaagaggtcatcctcgaggcgtcaaaacatccgcatggcaaggaatcctttgcgcccaacgcggcggtcgaacagtccgcggacgcggcggccaatgtcaccgtgcaagccagccacgaatactgcacgcccggtgaatcgcaccagttcaacccgacctgcggcgacgaggcgaccatccatgtcgaagtctccgatgacgaaccgcacaccatcaagcgattggtgtgggacggccacggctgctccatttcgcaggccagcctgtcggtgatggtcgatctggtggacggcaaaaccgtggacgaggccatggatctggaacagacattccacaagctgatggaatcgcgcggtgccggtctggacgacgagaacctggaagaaaagctcggcgacgccgtggtattccaaggcgtgtcgaaataccctatgcgcatcaaatgcgctctgctaggctgggaagggctgaaggactccatcgccaaagccctcgctgcaaagaactgaggaaatatgtccaacgataatttggttcccgaaccacagccgtccgttttcgatgccgtcaacggcgtcctgcaggacgaggaggccgctcgccgcgtgatggccaacccggccttggccaagggcttcccgaacggacgcccgatcgagcactctgctgcgtccggcgatgacacctgtgcgtgtggcggtcaccatggcaaatgcggttgccgggatgacgaacagtccgatggcagcgagattccgatcaaggcgattgacgatatcggccgcgccactgccgaagacgtgcgcgaggcactgcatcaggtgattgatccggagcttggcatcgacgtgatcgatttgggtctggtctacggcattgagatcgatgagctaggccgcgccattattacgatgacgctgaccacgccggcctgcccgctgaccgaccttatcgaggacgaatgcgcatccacgctggccggtctggtcgaggagttccgcatcgactggacgtgggacccgcgctggaccatggagcgcatcacgcccgaaggccgcgaccagctcgccgcccttggcttcaacttcgacaacatgccaaagtactgatagcgcttagtaagctccctctgatgagggagctctatacgcgagaaaagccccgcatgatgcggggcttttccaagtctggactggtcaatcagtcatcgacgatggtgttcttcgggacaaccgtaatgccgtccggcgtgacggtgaagccacgggccagatcgtgctcggtatcgatgccgacagtggagttttcggtcaggaccacgttcttgtcgagaatcgccttgtacacgcgggcgcggcggttgatgatcacaccgtcgaacagcacggaatcgacgatctgtgcccacgagtggatacgcacattgggggagagcacggagtggtgcacttcaccgccggagacgatcacaccgggggagacgatcgaatcggtggcgtggcccagacggtcgcggccggcgtgcacgaacttggccggcggcaggttgccggacatcgtgtaaatcggccaatcctggttgtacaggttgaactcgggcacataggcgatcagatccatgtgcgcatcgtagaactgcttaatcgtaccgacgtcgcgccagtaggcgtgatcagtgaccgtggaacccggaatctcgttcgagttgaagtcgtagacgccggcctcgttgcgggaagcgaagtacggggcgatgtcgccgcccatgtcatgcttggtgtcggcagccttctcatcgagagccagagcctcgaacagggccttggtgttggcaacgtagttacccatggaagccagaatctggttcggattgtccggcagaccggtggtggtggccggcttctcctggaagttcctgatcatgttcgggtgatcgggatcgacctcaattacaccgaactggttcgattcctcgatgggctggcggataccggccacggtgaactcggcgccggactcgatgtgctgctgtaccatctgctcgaagtccatgcggtagacgtgatcggcgcccacgatcaccacgatgtccggctggacgtcctcgatgatgttgatggtctggtagatggcgtcggcggagccgaggtaccagtgcttgccgagacgctgctgcgcgggcacaggggagacgtacgagccaagcagcggggagaaacgccagacctgggagatgtggcggtcaagcgagtgagacttgtactgggtgagcaccacgacctgacggtacccggagttcaccagattgctcaacgggaaatcgatcagacgatacacaccaccgaagggaacggcgggcttcgcgcgatcgcgggttaacggcatcaggcgggtcccctcaccacctgcaagcacaatcgacagaatcttgggattcttggccatcgtaactgtcctctctgttactgagcgtctttcgacaccgcactgctgggccggatgcttccttgcattcggtttacatagttaataattgcagaaaaattcgaacatgcaaggctttcgcccccgcgtgccgtgaacttgcgatgaacagtttcgtagatttgtttaaggatccggccttttcggagcgcgtgcgattccttagcgtgtcgcgtagaacgccactgcgctggatgccgccacgttcagactatccacgccgtggctcatcggaatcttcacggtcaaatcggcgcgggcaatcgtatggtgggacaggccgtcgccctcggtgccgaagatcagcgcgagcttgtcgatatgcgtcggatcttcggcaggcgcgtgcagacggcgtgtcagctcgtccaacgaaatcgaacgatcctccaatgccatggccacggtggtgaagcccagcgacttcaactcgtcgatgccctggaacggccagtaatgcttgttttcggtaccgtcgtcgttgaacccggtgatacgggtccacggaatctggaatacggtgcccatcgacacacgagcggctcgtcggtacagcggatcaccgcaggagggcgtgaccagcacggcatccacattgagcgcggccgccgaacgcatcagtgcgcccacattggtgtggtccacgatgttttccattactgccacgcggcgggcgctcctgcagacctcggctacggagggcagcggccagcgtcgcatcgcgcatagggcgccgcgatgcagacgatagccggtcagtcgcttgagctgctcaggtgaggccacgtagacgggaatgtccgtgccccagcgcccgtcgatgaagtcgaaggtgtctttcatgccctccagccaaggttcctcgaccagcagtgacagcggttcgcggtcagcggccagcgcgcggtcgataaccttgggggactcggcgatgaacacgcccttggctggttccaagcgattgcgcaactgcatttcggtgaggctcacatacgcttcgacgcgcgggtcgtcaacggtgtccagtgtgatgaactgcattggtggcctttcgtgtgtgcagataacgaaaaaccccttgcaatgcaaggggtttatctgtgcccgagacgggacttgaacccgtacgcccgtataaaataggcactagcacctcaagctagcgcgtctaccattccgccacccgggcaggtgtcgtttggacaacgagtaaatagcttagcatgaaattacagggatgcaattcgcgcgtgtgcccggcgtgtcgcgtgtagccttgaagtcatgactgatgccctttttcttttcgacccgcaggtcgacgatgtcccggtgaacagcgacgaacttcacgccggctggaagctaaccctgcccgcgcacatcaagcgccatgctgtgcaggctatgcgactcaaggcgggggacagcctgcaactttccgacggcaacggcttgagaatccaggcagtgatggccgatcctgaagccggacttgctgaagttgtggaagtggggcgcgaacccgagccgctcacccgtttggcgctgattcaggcattggcgaaaaccggccatgatgagcaggccatcgatatggctacgcagattggcgtcgaccaagtggtgccatggcaggcggaccgatccattgccaagtggaaggtcggccgtacggacaagaagtggaattcggtactggatgccgccaccgagcagtcgcggcgcgcttttaagccgcaactggaggcgtgcgcgtccagcaaggaggtcgtggccatctgccgcagggcctgcgtgcatggcgatgtggtgattgtgctgcatcaggatgctaccgatacgtggtccggcgtggaggagaaggttacgcagttggtggaacgcacgctccaggacggccggccgcggactgtcagtgtggtggtcgggcctgagggcggcatcagtgagcaggaggtagctgatttcgtcaaggccggagcggtgagctgcgtactggggcacaatattctgagagccgcgacggccggtcctgtagcgttgtcgctgttgtctcgggtgttgggacgttacgagtaacgcccacgcgctaagctggtgcgtagcaacatcaaaccaaggagcatgatgagcgaatccgacgattgcctgttctgcaagatcatcgcagggcagattcccagcagcaaggtctacgaggacgagacgacctacgcattcaacgacatcaaccccaaggccaaggtccacgtgctcgtggtgcccaagaagcactacgccaacgtcgccgaacttgccgccgacgacccgaccgagctggcccacatcgtctccatcgcgcagaacatcgccgacaaggaatttcacggcgcctaccgactggtgttcaacaccggtctcgacgccggccagaccgtcttccacgtgcacgcgcacgtgatgaccggcgaaaagctcgacgagtagtaggggaatatccgcttcgtggcaacgactacacgtaccatcaccatcccgccccaacttgaccccgtcgccgtgctcggcccggttgacgaggtcattcgcgaggtggagcgcgcctttccggacctgacgattatcgtgcgcggcaaccgcgtggcgatcgtctcccgctccaagcagaccgaagcccaggccgcacaggccgaggatttggtcaacaccatcatccaagccgcctacaccgcgcctatggacgccgacaccgtgcgtcgcatgctcgaccagaacgtgctcaagaaccacgtgcgcctcgaacatccaggtcacggcccggtgcatgacaaactggcgcaatcgacctcaaacgaacgcgcccatgcacgttctgccggctcccacgacccgacgtaccgcaagcccacggttcccggcgtcatcacctttgctgccggcgtgccggttcgtgcgaaaaccgccggacaagtggcctacgtgaacgccatcgaatcgcacaccatcaccttcggcattggtcccgcaggcaccggcaagacgtatctggccgtggccaaggctgtgcgtgccttccaggacaagcagattcgccgcatcatccttacgcgcccggccgtggaggccggcgaaagcctcggctttctgcccggcacgctgaacgacaaggttgacccgtatctgcgcccgctgtacgacgcgcttggcgacatgctcggcgccgaccagctcaagcggtacatggacgacggctccatcgaagtggcgccgctcgcctacatgcgcggtcgtacgctgaacgacgcgttcgtgatcctcgacgaggctcagaacaccaccgaacagcagatgaagatgttcctgacccgtctgggcttcaacaccacgatggtcatcaccggtgatatctcgcaggtggacctgaccgtgccgcgctcgggactggccaccatcgaacgcatcctgggcggcatcaacgacatcgcattcgtgcatctcaaaaccgaggacgtggtacgtcaccagctggtcggccagatcgtggccgcctacgaccgtcactccgccatcgccggcgaccaccgcgacatcgaacgcaagggccgccgcaaccataccgacttcgatgcccgccagcaaacggattcaaccaaccaaagtgagacagacgatgagcgttgacgtcaccaatgaaacccagtgggtcatcgaccccaaggtcttctccgatttgggtatttgggtactcgaccagatgcgcgtgagcacccagtccgacctgaccatcatgttcgtggatcccgatcccatcgccgaactgcacatgcgttggatgaacctcgaaggcccgaccgacgtgatgagcttcccgatggacgagctgcgcccaggcgacggcaaaaccgtgatggaaggagtgctcggcgacatcgtcatctgcccgtgggtcgctgcccaacaggctgccgcagccgggcacagcaccatgcaggagatgctattgctcaccatccacggcatcctgcacctgctcggctacgaccacgtgacccccgagcaggagcgccagatgttcggcctgcagcgacagctgctgctcaccttcttcgccctgcgccacgatgccaacgtgcaggccacgctgcccgccggcacacccgacgcgctggccctgtacgacgccgcgcacggtgctggccgcgacctcgattccaaataaacttccaaatcaatcacaccaaatttggattattctataccgttcaaggacattcaaggacaccgaaaaaacattatggagtattccagtaccacgctgatcgccgtcaccgtcattctcgtacttgtggcggccctgttcgtctggctttcgctgaccatggccgccgctgaaggcgccgtggcccgcgtaacgcgagccagcctcaacaatctcatcctcgaggtgcagaccgactccgaagcaagccagttcctcaagatgaagaagatcgacaagattcatcgcgtgcaacggctcatcgccgaccgttacgccaccgccggcagctgtgcgttcttccgcatcgcctgcaatgtgctcgacggcgtactggtgtcttccatcgcatccctgtggggtgcggaactgtgggttgaactgctcgccggattcctgttcgcgattatcgtagccgtggtctccgtactggtccgcccgcgcaccgccggcatgaccaagccggtcgacatcatgatttccaactcgcgcatcgtgtcgttggccaccaagctcacgccgttcgcacgcatcggtggcgacaagtccggttccaaggggccgggccgccgctccaaggactccgatctgtccgatgacgaggagcttgagaagattcagctcgagcagggcaaggccgccatcgaccgactggtggagtccaacgacttcgatccggaagtctccgaaatgttgcgcaacgtgctcaccctgtctgatacgttgactcgcgagatcatggtgccgcgcaccgatatgatctgcatggagcgcgactccacactgtcttccgcgctgaaactgttctcccgctccggtttctcccgcgtgccggtgatcggtgaggatgtggatgacctgatcggcgtggcctatttgaaggacgccgtgcgcgccaccgccttcaacccggcggccatggagcgcacggtcgaatccatcgtccggcagccgctgcttgttcccgaatccaagccggtggacgacctgttccatgagatgcagcgttcccgccaacatgtggccgtggtggtcgatgagtatggcggcatcgccggcatggtgactatcgaggatgccatcgaacagatcgtcggcgagctggaagacgagcacgaccgcacccagcgtaccgagccggagaaaatcggcgacaacaagtggaagatgcccgcccgtacgccgattgccgatctggaggagatcttcgagatcgacattgatgaggacgatgtcgataccgtgtacggcctgctgaccaagattctgggccgcgtgccgattgtcggtgcttcggccgtgacgcgcggtctgcgactgaccgccgtggactccgccggacgccgcaagaaggtgtccaccatcgtcgtcgaaccggcgcacgtcgagggcggcgaggaaaatagcaggacccatgaggaaactgacggcgagcccgtcgaaggcgatgataccgccagcaaggagtgatatgaccgaccagaacaacagcacgaacgacgtcgatgacattgacgtcaccgatgcttccgatgttgccggcgttgccgaagtcgacgcgaccggtgaaacggagaatgtgaccaagcaggacgtgtcgtatcgctccggattcgtggccgtggtgggccgcccgaacgtcggcaaatccacgttgatcaacgcgttgatcggcaagcagatcgccatcgcatcctctcgcccggaaaccacccgtaaggcgattcgcggcatcctgaccgccgaccacgcgcagctcgtgctcgtggacacgcccggtatccaccgcccgcgtacgttgcttggccagcgtctgaacgacgtggtcgacgaatccttggccgatgtggacgtggtggccttcctgctgcccgccgaccaggaaatcggccccggcgacaagcgtattctttcccgactgcgtaccgacttcgccaccaagcgtgaggacggtacgttcaagtggcgcatcccgctgattgccatcgtcaccaagatcgacgagcttggccgtcagcaactcatcaacaagctcatcgaaatcaacgatttcgccgatttctcggacatcgtgccggtgagcgccctgaagcacgacaatctggctgaagtgaagaacgtgctcattgagcacacgcccgagggcccgcagatgtacccggacgatcagatcagcgaggagcgtccggaagacaccatcgccgaactcgtgcgcggtgcgttccttgagaccctggacgacgagctgccgcattcgctggccgtggtggtcgattccatcgactatccggaagacaacgagaccggtcagggctatgacggcaaggcgcaggtcaacgtgtccatttacgtggagcgtgactcacagaagccgatcatcatcggcaagggcgcctcgaacctcacctacgtcaagaagaagctacgcaccccggtcaaccgcatcgtcggccaaaaagccaagctcgacctccacgtcaaggtagccaaaggctggcagtccgaccccaagcaactagaacgcctaggcttctagggcgtatagacgaaaaaagctccctcgtcagagggagcttttgctatacggtttacttccgcttggtgtacatctgggtgttgaggagggtggagtagcgcttgatgaccttggggcgaatcaccttcatggaggcggtcatgaggccgttctcctgggtgaactcctcgggcaggatgatgaacttgcgtacggattcggcgcgggagactccctcgttggcccgatcgacccactgctgcacttcggcgcgcacggcggcgttccttgccgcgtcctcgagggacatgttctcgtcaagccccttggcggcgagccacgggcgcaacgacttctcgtccaacgtcaccagggcggagataaacgggcgtttgtcgcccagcaccaacgcctgggagacgatctcgcaacgctggatgacctcctcgatcgggccgggggagacgttcttgccgcctgcagtgataatcagatccttcttgcgaccggtgatgtacaggaagccatcgttgtcgatacggcccaagtcgccggtggcataccagccatcttcggtgaacgacagctcagtggcctcgtcgttcttgtgatagcgcgggaacacggcacgacccttgacctgaatttcgccgtcctcggcgatgcgcagggagaatccggggaatgcgatgcccacggaaccagcgtggaacggcgtacccagcgggttgaacgcgcacggtgcggtggtctcggtcagaccatagccctcgtatacaggcacacccgcgccacggaagaaagccagcagttccgggtcaagcggggcaccgccggccacaatccacttggcgcgaccgccgagcacttcgcgcagcgaagagtagacaatcggatcgaaggcagcgcggcgagtgcgggtcagtgcacctgccttgccattggcggagacttccttcatatagttctgcgcggccaccacggcggaggcgaacaccacgccctttggaccgtgtccggccttctgggacgcggcgttgtacaccttctccagcacgcgcggcaccacgatcatgagagtgggcttggccacctgcagatcgctgatcagcgtcttgattccggtggcgatgtagatgcggacgttcgaggagacgacgatgtagttgatggcgcgggcgaaggaatgggcctgcggcaggaacagcaggatggtgttcctcttgtcgtgcagcagatcgggcatgtaggccggcagattcagcgcggtttggcagtagtgctcgtgggtcatctccacgcctttcggcgcggccgtggaaccggaggtgtacacgatggagcacaggtcggtcttcttgaccgaatcgatgcgctcgtccagctcctcgtccgagaccgtggtgccgtaggccttgatttcgtccaagccaccggtctcgatggtgatgatgtgctccagggacgggcactcttcgacggacccatccgccttcttacgcatgtccgtgtcctgcacgatcagcagtcgggcatcggagttgttgacgatattgcgaatctgctcggcggaatcggtgtcgtagatggtggcgagcacgccgccgcacgccatgatcgccgcgtcggtcaggtcccagtcgtaggaagttcggcacatgaatgccacggcatcgcccttcttcaggccgtaatgaatcaggcccttggccatggcacgcacgtcagccaggaactcgttggcggtgacggtcacccaatcgttgccggacttgtaggtgtacagcggctcatcgcccatacgttcggcgcggtccgcatacaggtcgtagatggacgtaccttcgtccagcggcggattgccttcggtggaggtggtgagcaggccggtgatggggtcgatgtcggtgacggtcaggtggccgtcgtcccaatcgtcgctgtgaggcaaagcgatattggtctcgaccggcacgtcggcattggacaggtaatcgggctcgtccggggtgtcgtcgtggaccgggtggacgaagtcggatcccaacctgagcgccttacgggtgagattgatagtgtgctgcgtgaaggaattgataaccgacaagtcttgctcctgtaaacctttcagtgtcgtccagccatgaggcgaacgcttctcaaagttcaaattgtaatcgcccaaaccgaactcgtcaccttacgcaaccgtaggattctggcgggttaggggagtgcgtggcaaaatattgcacaggtcccgatattgttgagtaaccgtgagctacgaaacggtgattgtcgataattactgagcggttggttgctgatcgatgccgggtgattgttggacgacttccgagcaattcatccgcaatgcacatggatacattcgtatttctcactaatttcgggttcgtttctgtttcgattggcggaatctcaagtcatggtctttatcttccgactacactttctatgcggataaccatgtccattttgaagtagaacaagaaagggctctcatggcgcaaaacccagaagccaccgtggtgttcggcgttttgaacgaaacgtccgaaacggaatcccgcgtcgcgctgacgccggatatcgtcacccggctgaagaggagcggagtctcctcgattattgaggccggtgccggcattgccgccgaatacaccgatgaggattacgaaaaggccggtgcgaaggtgaccagccgtgacgaggtgctcgccgaagccgacgcgctcggttttgtggaccgtccgtccgccgagaccgtggccaagctcagggccggccagtgggtcattggcatgctcggttccttcaccgatgccgattacgtggccgcgctcgagaaggccggtctggtgggcatcgccatcgaaaagctaccccgtaagctttccagcgcccagtccatggatgagatgacctctcagaactccgtgatgggctacaaggcagccatcaccgccgccgatgcttacggttccttcctgccgatgatgaccaccgccgccggcacgattcgcccggccaaggcgctggtgctcggtgccggcatcgccggcctgcaggccattggtacgctgaagcgtctaggcgcggtcgtcaccgcgtacgacgtgcgtcccgcctcccagggcgaggtcgagtccctcggcgcgaagttccttgatctgggacttgacttctccaagggccagggcgagggcggttatgcccgcgcgctgagcgccgaagaacaggctcagcagcaggctgccgtcgatgagaaggccgccggctttgacatcatcatcaccaccgccaaggtcccgggccgcaagcccccggtgctgctcaccgcagccggcgtcaagggtctcaagcgtggtgccgtgatcgtggactgcgctgcatccgacctcggcggcaacgtcgagggctccgccgtcggcgagcagatcaccgagggcggcgtcaagctgatcggcgctccctacctggcctccggcgtctccacgaccgcatccaacttgctttcgcgcaacgtggccgacatcctcgtgcacttcgtgcgtgacggcaagctcggccaggatctcaccgaagaactcgacgacgcgctggtggttgccggtcgtgccgccgccccggcagctgctgccgatgccgagaagtccgagaagtaaggaagaaggaataccatgcctactctcgtcgtttccattaccctgttcgtcctcgcgctgctcatcggtatcgaggtcatcggcaaggtgcccgccaccctgcacacgccgcttatgtccggcgcgaactccatccacggcatcgtcatcgtcggcgttgtgatcgtggcagccgaagccaatagcccactggcctacgtgttcatcttcctggccgccgtgctgggcaccatgaacgtcgttggtggctacgtggtcaccgaccgcatgcttgagatgttcaagtccagcaagaacgagaagaagggggagtcgaagtaatgacctccgcaaccgttggcgccatcgacatcgtcgcatggttcgtctacctgttctccgccgtcctgttcgtggtcggcctgcacttcatgaactctccgaagaccgcccgcaagggtaaccagatctccgcgttcggcatggtcgtggccgtgctcatggcgttcatcgtgcttttcgccaagggcttcgtgaacattgtcgccgtggtggtgctggtcgtcggcatcctgatcggtgccgtggccggtgtcgtctccgccaagaaggtgaagatgaccgacatgccgcagctggtttccgtgttcaacaccgtgggtggtggcgctgccgcactcgtggccctgaacgacatcctgaccaaggaaggcaccccggacatcgtggtgctcatcaccgctggtctcggtattctcattggttctgtgaccttcaccggctcgctcatcgctgccggcaagctacagggcatcaagtgggtcaagaagctgaacctgccgggcaagggcgtatggaacattctgttcgccgtgctgtctgtcgcctcgctggttatgctgtgcgtccagcccgaacagcgcctgctgtggtcgattctgaccaccgtgttcgccctgtgctacggcctggtgttcgtgattccgatcggcggcgctgatatgccagtggtgatctccgtgctcaacgcatgcactggtactgctgtggccatgtccggtctggcgattgacaacgttgccctgatcgtggccggcgcactcgtcggttccgcaggtgtgaccctgtccatcctcatggctcaggccatgaaccgtccgctgctctccgtcttggccggtggcttcggcggtggtgctgatgccgccgctgctggcgacggtccggaaggcaccatgaaggagaccacgccggacgatctggccgttcagctcgtctacgcgcagaaggtcatcttcgtgcccggcttcggtctggctcaggctcaggcccagcgcgagctcgctgacctcggcgaactgctcaagggccacggcgtggaagtctcctacgccattcacccggtcgcaggccgtatgcctggtcacatgaacgtgctgctggccgaggccaacgtgccctacgaggagctcgtggatctcgatgagatcaacccgcagttcccgcaggccaacgtggctctggtcgtcggcgccaacgatgtgaccaacccggctgctcgccgtcctggcaccccggtttccggtatgccgattctcgacgtcgacaagtcccagaacgtcgtggtcatgaagcgtggccgcggcatgggctatgccggcattcagaacgagctctacttcgaggacaacacccagatgctgttcggtgacgcgaagaagagtctgcagtccgtcatcgccgccgtcaaggaactgctcgcgtaaccattcttggctcccctcacagaggggagccaagctctatatctactacagcccaaacacccgcttaacaaagccgttaacgcgacgccaatagcggtccggatcggtgctggcgctcatcgtgtggtcggcgccgggaatcagcagcttctcgcggtcgatgctggcgcaggcgttgtaattgatgtccagatacttcggattgacaaaagtatccgctccgccgtgaatgaacatcatcggaatagtcgcgtgccgtaatgccttcacacaggaggcgtcctcaaaccggtatccagccttgcgtttagacacatgactggccactttgaccagcagcacggccaacgagtgcggcaaacggaacatcgcctcggcattatccgtaaactgcgagaccacggaactgtatccgcaatcggaaatcgcggcgacgacgttgcgggggagtcgcgcatcgccggccgccatcatcaccgtggcggcgcccatcgaattgccatgcagcagaatgcgtgcatccggatcagctgcggtgatcagcgaaacccagcccaacagatcgtcgctttccagcaatcccatacccacgtagcgcccttcgctcaattcatgggcgcgctgcgcgggtagcaggaccgtaaaaccgagttgcgcatagcgatgcgcccatttggccatttccgcgggctctccggtatagccatggcagcagatcgtgtatagatgcggctgtgggtcggaacaatccgggtccaacagccagccgtggagtttcaatccatcatggctgcgcagcgtgaccgattgcttggcctcctcgaaccaccggccggcctcaagctgctcggacatgtcgaattcgatgcctttcggcgtctcctcgtgcggcatgttgaacatcgaacgtttggccttggtgtccagcgcgaacatgaacatgacgttggcggccgcggctgtgacgccggctcctgtggcggctatcgcggcaagtgccgcagccatgcccctgacaacgcgagtgtgtgcggcgatgacgtcatggccatcctcattgatgacgtcgtccgaacgagtcatatcaacctcccgatatggtactcaccatcgtacgttatttttcgaaatcatccccaacttcgtgaa

SEQ ID NO: 3155 - DNA, 8759 bp, Unknown
  R53_2m  MAG No. k141_402
aatacggaccgaattacaacccgtatatttatggcgctcccgagccggataccaagaaggattccgccgcagccgctggcaacaacggtggcgcggcacaatctcagcaggccggccagccgtacggccagcagacgccgtggcccggcaatcagcaggcgggcggctggccgtatgctcaaggcggccaacagtccggtccgggcgggtacccgggcatgcagggccagccgtatggtcaacagccgaacggtcagcctcaccagccgcattattaccacggcatcgacctgaacgatccaaaccagaacccactctacgggcactgggattcgtatgcgatcatctcctttatcctcgccctgttcttcccggtgccagtgctctcggcactgatgggcgcggtggcaatgtggcgcacgcgcaccttccatatgaaaggcttcggtttggctgtggccgccgtggtgatcaacgtgctgtacaccatcgccgtcatctggatggccttcaatggctatgacgccatgagcctctaccaggaagccctccagcaactcaccggcggcaccggctcctcctccgactccatctccgcataagtagcgttcacataccaacacacccactgcataaatatgcaatagtctgcataatcgcgtatactcatcccaagacacatcagtgaaaagagatgagtatggcgaaatatacagtggccgtggccggtgccacgggctatgccggcggtgaagcgctgcgcattctggccgcgcaccccgacttcgacatcacctgcgtggcaggccattcctcagtgggggagtcgatggccaagcacatgccgcatattccccaactggccaatctggtcgtcgaagataccacgcccgaagtgctgaacgggcatgacgttatcatcctcgcactgccgcacggtgcttcgggcaagctcgcctcgcagctcgatccgaatgccgtggttgtggatttgggcgccgaccatcgcctcgaagaacaggccgcttgggatgagttctacggcggcgatttctatgagcattggacctacggcatgcccgagctcatcaccggcaaagccgcggacggctcctacacccgccagcgcgcggcgcttcctggcaccaagcgcatcgcaggccctggctgcaacgtcaccgccaccacgctggccctccagcccggcatcgccgaaggactggttgaatcgcaggatatcgtggccgatctggtcgtcggatactcgggtgccggcaagaatctcaagcgcaccaacctgcttgccgccgaggccctgcaatccgccctgccgtattcggtgggcggcaagcaccgccacattcccgagatcctgcagaacttcgcccacgcggccggcaagagcgcggccgaagccagcgaattcacgctcggcttcacgccgattctcgcccccatgtcccgaggcatcctcgccaccgtgtccgcccgcatgacggacaaggccaaggcgctgagcgatgaggagattcgcgccgtatggtccaaggcctatgaaggccaggacttcatggtgctgctgcccgagggcacactgcccgccaccggcaacatcatcggatccaacgcagcccacctgcaggtcgtcgccgaccgcaaggccggccgcatctacgcttttgccgccatagacaacctcaaccgtggcaccgccggacaagcggtccaatcactgaacatcgcactcggcctgccggaagacgcgggcctgaccaagatcggagtagcaccgtgagcgttacatttgcacaaggtttctccgccgccggcgtggcggctggtatttcatccgtcgaaggcaagaaggacttggccctcgtggtcaacaacggcccgctcgacgcggctgcaggcgtgttcacctcgaaccgtttctgtgccgccccggtgcagtggagccgtaaggtcgtcgccgacggtcacgtcaaggccgtgattctgaactccggcggtgccaacgcctgcaccggcgaggccggttacgcccagtccgtcaccaccgcggaaacggtcgccggtctcatcggcgccgaaccgaatgatgtggctgtctgctccaccggtctcatcggtgaactgctgccgttggacaacgtgctggctggtgccaagagcgcccatgaggctcttgccgccaccgccgaagccggcgacgacgcctcccacgccatcatgaccaccgacaccaagccgaaaacggtcgaactgaccggctccaacggctggaagatcggcggcatggtcaagggctcgggcatgattgccccgcagctggccaccatgctgtgcgtcatcaccaccgatgcggtcgtctccgccggccagatgcaggccgcactcgccgtggccgccgaacattcgttcaaccgcatcgacgtggacggctgcatgtccaccaacgacacggtcctgctgctcgcctccggtgcctccggcgtcgaaccggacaaggacgaattcaacaagctggtgcgtgaggcctgcgcatccctgtcccgccagatcgtcggcgacggcgaaggtgcctcccacgacatccgcatcaccgtcaccggtgccaccagcgaagacgcggcacttgcctgtggtcgtgccgtcgccgcctcgaacctgctcaagtgcgccatctccggcaacgatccgaactggggccgcatcgtcagctccttgggcactgtgccgcctgaagtcgcgccttacgattcgaacaaggtgaccgtggacgtcaacggcgtgcgcatctgcgagaacggcggcgccggccgcgaccgcagcgaggtcgacatgaccccgcgcgaagtccacatcgacatcgacctgaacaccggctcggacgccgaggccaccgtctggaccgacgacctcacccacgaatacgtccacatcaacgccgactacgaaagctgacaaacagcccagtgggctgtttgtagcagccggcagcgatagcgtcgccggcgtcgcatataacgcaaacagcccagtgggctgtttgtagcagccggcagcgatagcgtcgccggcgtcgcagaaaagagaaaaattggctacagaattgaagggacctgggttccatttcgacgtgcacaccgatttgcgcgccgatcagaaggcagaagtgcttattgaagcgctgccttggctggaggagttcgccggtcagcgtatcgtcgtcaaatacggcggcaacgccatggtcgatgaccatctgaagcagtgcttcgccgaagacatggtcttcctgcgtcaggtgggcctgcatccgatcgtcgtgcacggcggcggcccgcagatctcccacatgctcaaggccctcggcatcaaatccgaattcaaaggcggcctgagggtcaccacccccgaggccatggacgtggtgcgcatggtcctgaccggcaaggtgtcacgcgaactggtcggcctgatcaacgcgcacggcccgctggccgtaggcctgtccggtgaagacggcggcctgttctcggccatgcagcgcaagcccatcatcaatggcaagcccaccgatatcggcttggtcggcgatgtggtttccgtcgatgcctcggcagtcgaggatctggtggccgccggtcgtatcccggtcgtctcttccgtggctccgaacgaagaagatgccactgaagtgctcaacgtgaacgccgattccgccgccgccgctttggctgccgctgtgggcgcacgcaagcttgttatcttgaccgatgtggatggtctgtacgccgattggccggacaagaattctctgattggccggatcggtgtggaaaacctgcgcgatatgctgccggacctggaatccggtatgcgacccaagatggaggcctgtgtcagggccatcgacggtggcgtgccccaagcccatatcatcgacgggcgcaagccgcattcgattttgaatgagatattcacctccgcaggcatcggtaccatggttatgcccgatgaaggactggaaatgaggagctcttatggctactgagcatgaggaaaaactaggtacggaggacagcaagtggctgggagagtactctcaggtccacatgaatgtgttcggtacgccgttgcgcgtcatggatcacggccaaggtgcccacatctgggatgttgacggtaacgaatacctcgatttcctggcaggcatcgccgtcaattccctcggatacgcccaccccaagtgggtcaaagcggttgccgatcaggctgccaaggtggctcatatcagcaactatttcgcgtccgagccgcaaattgagctggcatccaaactggtcaagctggctggtgcacctgaaggctccaaagtctacttcggcaactccggtgctgaaggcaatgaagctgccctcaagcttgccaagctgtatggccgcaccttgcctggtgccctgccttccatcggcggcaagcccgcacgcattctcgcaatgactcacggcttccatggccgtacgatgggtgcgctgtccgccacatggaaacccggtatccgcaagccgtatgatccgctggtgccgaacattgaattcgtacgcgccggcgacaaggtcgccctgcacgacgcttttgcacagaccggtctcggccgctatggcaagggtccggtggctgctgtgattctggaacttatccaaggcgaagccggcgtgcagccgttgggcgccgattacgtcaagttcgtgcgcgaactgtgcgatatcaaccacgcgctgctcatcatcgatgaagtacagaccggtatcggacgtaccggcaagtggttcgcattccagcgtgacgatctgtccggcggcgtgacgccggatatggtgactttcgccaagggcgtggcaggcggattcccgatgggcggcatgatcgctttcggcgagaaacttgcggctctgttcactcctggttcccacggctccacctttgccggcaatccgctgggtgcggctgcgggactcgccactcttggcgtgattgaagacgagaatctggtggccaacgccgaagctcgcggcaaacagctgcgcgatggcattatggccaccggtaatccgctgttcgtttccgtacgcggccgtggtttgctggacgccgtcgagctcaagcatccctgctcccacgcggtgatgaactactgcctcgaacacgggctcatcgtcaacgcggtggctcccaatgcgctgcgtttcgcaccgccgctgattgtaaccgctcaagacgtggatcaggcacttgccatcctcaaggatgtgcctacggacctgcccgacgactgatttctcgccgtcactgccgacccaccgatccaaggagatcatcatgaccccagaacttcgccacatgctgcgtgacgacgacctcaaccatgaggagcagaagcaggtgctcgaacttgccatcaagttccaccacgaccgcttctacaagcagccgttcgccggtccgcaggccgtcgccgtactgttcgacaagccatccacccgcacccgttccagcttctccatcggcgttgccgagcttggcggctacccactggtcatcgacaagtccggctcccagctgggccgtggcgagcccgtggccgataccgctcgtgtgctcgaccgcatggcttacggcgtggtgtggcgcaccttcggccaggaccgcgtcgaagaaatggccaagtactccacccatccggtggtcaacgccctgaccgatgacttccatccctgccagattctcgccgacttccagaccatcgccgagcaccgaggcggcgtcgacaacctgaaggaccagaccatcgcctacctcggtgacgcggccaacaacatggccaactcctacctgctcggcggtgccgtggccggcatggacgtgcgcgtggccggcccccacggctacctgccccgcccggacatcgtggccgacgccaagcgcgtcgcggccgagaccggcggctccatcctggtcaccaccgatgccaaggaagcggtgaaggacgccgactgcgtgttcaccgacacctgggtctccatgggcgaggaggccgaatacgccatccgttccaagccgttctgggattaccaggtcaacaccgaacttatggcattggccaagccggatgcgctcttccagcactgcctgcccgcctaccgcggcaaggaagtcaccgctgaagtgatcgacggcccgcagtccgtggtgtgggacgaggccgagaaccgtctgcacgcacagaaagcgttgctgacttggttggccggcaaggcccgtggagacgaaagcctgctcgcatgagtgaaaccggtccgtccctgcagcgccctgccaccagggcggcgcggctgagtgccatagaacaggcgctcgccacgcatatcatcacctcgcaatcacagctgtccaaaatccttatcgacgagggcattgcggtgactcaggcgaccctgagccgcgatcttgacgagatgcatgcggtgaagacccggctgaaggacggcacggtggcctacacggtgggtcgcagcgtcgttgcttcagaaggtgaggatgtaggggagcgcggtgaggcacagatgtcccgcgtgctgaacggactggtcacctcggtggccgccgccggaaatctggttgtggtgcacacgccttccggtgccgcacaatacgtggcctcggtgattgacaagcagccgatcgaaggcgtgctgggcaccatcgccggagacgacaccgtcatggtgatttgcaccaatgacgacaccgccgtctcccgctccgactggctactaagcctcgcctccaaataaccaacacgccgtgcataaatatacagtcctctgtatatacttgcatcagtttgtttttcagaccttgaacgaaagggaaccaatggcagataacaagcgcattgttctggcctactccggcggtcttgacacctccgtcgccatctcgtacctgaaggagcgcaccggcaaggacgtcgtggccgtgtccctcgacgtcggccagggcggcgaaagcctcgagaccatcaagcagcgcgccctcgcctgcggtgccgttgaatcctacgtggtcgacgcccgtgacgagttcgccaacgaatattgcatgaaggccctcaaggccaacgccatgtacgaaggcgtctacccgctggtctccgccatctcccgtccgctgatctccaagcacctcgtgcgcgccgcccaccagttcggcgccgacaccatctcccacggttgcaccggcaagggtaacgatcaggttcgtttcgaggtctccattgcctccattgacccgacgctgaaggccatcagcccgattcgcgacctgtccctgacccgcgatgtcgagatcgcgttcgccaaggagcacaagctgccgatcacccagaccgagaagtccccgtactccatcgaccagaacgtatggggccgcgccattgagaccggcttcctcgaggatccgtggaacggcccgaccaaggactgctactcctacaccgacgacccggccttcccgccggtcgaagatgaagtcgtcatcgagttcaaggaaggtgtgccggtcaagatcgacggacgtgacgtcaccccgctgcaggccatcgaagagatgaaccgccgcgccggagcccagggcgtcggccgcatcgacctcatcgaggaccgcctggtcggcatcaagtcccgcgagctgtacgaggccccgggggccgtggctctgatcaccgctcatcaggagcttgagaactgctgcctcgaacgcgaacagcaccgcatcaagcgcgacatcgacaagcgctggggcgagttggtctacgatgcgcagtggttctccccggcaacccagtcgctcaacgcgttcatcgaggacacccagaagtacgtgtccggtgagattcgcatggtcctgcacggcggtcgcgccgtcgtgaccggccgtcgttccgactcctcgctgtacgactacaagctcgccacctacgattccggcgataccttcgaccagaagtcctccaacggcttcatcgacatctacggtctgccgtcccgcgtggccgcagcgcgcgacgtcaagttcggcaacggcatcgaggtcccgaagaacaccgtcgagtaattcttactcagtcgcccccgctgcgaggctgtcggcatagctgactgggagtggtctttgaaaggactgtcctcagtcacactccatgtgacagccctcgccagcgggggcaactgtatgtttgaacacattgctacgcttaaacacagctattttcacttttcaaggagccttcatgactgagaacaacgaacatctggccctgtggggtggtcgctttacgtccggtccgtcgccggaactggcccgactgtccaagtccacgcagttcgactggcgcttggccgacgacgatatcgccggttcccgcgcccacgcccgtgctctcggccgtgcgggacttctgaccgccgacgagctgcagcgcatggaggatgcgctcgacacgctccagcgccacgttgacgatggctccttcgcccccatcgaagacgatgaggacgaggccaccgccctcgaacgcggactgattgacattgccggcgacgaactcggcggcaaactgcgtgccggacgctcccgcaacgaccagatcgcctgcctgattcgtatgtggctgcgccgccactcccgcg

SEQ ID NO: 3156 - DNA, 5946 bp, Unknown
  R53_2m  MAG No. k141_442
tcgacgttcgcgcagctgggcgtgaacctcacatacgaattcagagatactttgcacgaccgttccattaccgcggataccggctgggaaattcttcccggtcgtggtcttgacatcttccagaaattcgttgacggcgattggcttaacccgttgctgcgccatcagcagctccgccgcgtcaaggaatgcaaggtcacgtatcagcgggtcagcgagaagtgaggtaaaaatgaatgtccaatgtccagcttgcggaacgtatgtggcagagaccgcgaccatgtgtccgtattgcggttttcgcggtgatgatccgagccggccaatatacaagcagggggagtatcgtcctgtgccaattgtgccttgcgaaatcgtgatggatgatggccagcgtggcgagatttggttgtctgacgaagacagcaagaatctgtttcggcatttgactaattggaaatggctctcaaccatgcttccggctctggcggaaacattagaaagtatgtttggcggaactgtgcatttggaagccaagcttccggaacatatcatgcgcatgattgaagagggcaaactccatttcgccacggataaaaacggtgagattctcgctgaagtgttcgatgaacgcaataaaatcttcaaacaagtgcgtttggagaaagtcgtcagaaatgatacgttattgccggctatgcagcatcttgaaacacaggctgccctttgcttggtaatggaaaaaatcgatgaagtcggccgagctgtgcaacagcttggtgaggaaatgcagcaggatcgtttggcccgtgtcgatgccgcgtttgatatgttccagcaagcgtgtcgtatcgagagcagtcgggaacgtaatgagtatgtacgtgaagcgttgaacgaggccacgcgcgcgaaggctttgctggtgcgtaattttgcgcagcagcagcggctggtgaagcagagtagcaagaaatcggatgccgcattaagggcaatgcaggattatgtggcgattgtgaatgcagtgaacgtgcagatgcaaacgcatatggcgttggggcaacaggacgtggccgcgtattgtcttcaggatcttaataagttcattaagaactatgatctcgataagcgcgatacgatgctcaaccttgtaggcagcgtgaagagcaagaacaggggcagtaatcaggaaaagtttattgatggttctttgcaggttgcagcgaacattgaaagcgtggtgaaggctctcgacgcgggcgaagtaatctctccgaaactcattaccgagaatgatgggaacgggaatgattctaacgatgaggagaagcagcatgatgaagaaaactgaggatgctgaaaaagttgctgatgaaattgcaggtgttgacgaagaaaatcctgcgtcgaaaaaacgctcttgtatcaagtgcaagatagaactggcttccgacaacaagctgccgttctgtcctgcttgctgggaagaaattaccggctacctgaaaaagaccggaatcgccatgggaacgttgatggtcgctttgataagaaagtatggtcccaaagtcggcaaggcggtcttcatggcgatcaaggcaacattaaagaagtaatcatctacgctttaattgagatgccatagagacgcattgcttgcggtgtcacgtggctgttgttctcatttcatgggaaatgagggtgaaaaatcaatgtttcgagaggtggcaccatggacgctggcaagaaaatcctgctggacttatttaccggttcgcttcggttcgtggttccggtgtatcagcgcagatactcatggggcgaggcgcagtgccggcaattgtgggccgacattgtaacggctggcaggcatcctgacagaacccatttcatcggatcgatcgtatggatgcaggaaggcggcatcggcccggatggtgtcagccggtgtctgctcatcgatggccagcagcgcctcacctcggtgaccctgctgcttatcgcactggccgaatatgcccgagaacaccctgagaacctgcgattctccgcagacatgctcatcgaccgtggctatcttgtcgacaagtatgcgactggtgaaggccgctacaagctgacgctttccgacgacgaccgggacgtgttgcaacgtctgtgcgaccatgcggtcgaccccaactgaatatttgattcgttgtggtccgttgttattgcggttgggggccattacgggttttggcggttattgcgtttcagggccatggttattgcgctttgaggacatggctggttaggctcctttcaccatgcgagggacgtgtggtgaaaggagctgccggcaatggtacggaaaatacaggcgaaactggtcctgcgtttgcatggccaggggttatcgggacgcgcgatcgcaaggtcccaaggcatgtcgcgccggagcgtggccgatgtgctgtacgcggcgaaggccgccggcatcggctgggatgacgtcgccaacaggccggacgacgaggtatacgcgctgctgttccccgggcgcggggaacgtgggagcgtgtaggagcaacccgactggggcaaggtccaccgggtgatatgaactgatttttgttccgtatttcctctgactcgatgggagatgatggaaccatggcaaagggcgctcgatatacgccggagttcaaggcgaaggcggtcagactgctggcggaatcgcgttcctcgtattcgtcggagacgaacgcgatcgccgcggtggcgaaggatccggggatagcgccggaatcactgcggcgttggcgcaaccagtcggacgcgacggtcgcggaggagacgaggcagtcggccgaggacgcgatggcggagctgaagaagctgcgggccgagaacgcggaattgcgtcgggcgaacgagattttgacgacggcttcggcttttttcgcggccgggctcgacccgacacggcgttgatggccgcgtacatcgacgagcatgaaagccgtttcaaggtcgggccgatccgcagggtccttttcgaatcgttggactgcgggtttctcacgccgcgcggctgccgcatgctcgaaacacgtcccgtcagccgcatgcgggcggggcatgaggcgccggccctcgacatcctccagatccactcggatttcttcatggccgtgtacggttacgggaagatgcacgcgcagctggtcgcccagggccgggatccggccgaggccggccgcgaccaggtgatgaacatcatgcgcgagcttggcatccggggcgtgcgccgcggcagaaccccggtgacgacggaacccgccaagggcacgggcggcaggccggatccggtggacgggaggttcgaggcttgtgcgccgcaccgcctgcacgtggccgacatcgcctacgtgcgcatggccaacggctcgttcggctacacggcgttcgtcaccgacgtgtacgcccgtcggatcgtgggatgggcgtgcgccatgaccatgaacacgcaggagctgccgttgcaggcgttggagcaggcggtctcatgggccgcgtcccatggtggcgcggatggtcttatccgccgcagcggccatggcacgcagtgcaccggcacggtgtacaccaccagggttgtgggatatgggatgctgccgtcgaccggcaccgtcggcgactcgtgcgacaacgccatggccgaaagcgccgacggcgcgtacaggaccgagctggtatggcggcgcaagcccttcgcggatctgaaggacctggaattggcgacgttccggtgggtctcgtggcggggactcgaagcgcctgcaccggtccctgggctacaggacacccgaagcggtggaaaccgagtattatcaacatcaagcggcacaagccgcctcactgtaagggcggaacaaaaatcaggccacttcacaccgcaacagcacgcgagaaaggtcacacgtgacggactatgcagttgacgtacgcgacgtaagcgtcgtcattaaggggaagacgattctttcccacctcgacctccaggtggaagaaggttcgttccacgggatcatcggtccaaacggggcgggcaagacgacgctctttaacgcgatccaagggtttcgaaagccgacggaaggaacgatccgagtcctcggccagtcgccctatccgcgcaatctagccctgctgtcccagatcgggatccagccccagcagtcggcgttcttcccgaagacgacactccgcgagcaccttcgcgcggtctgtgcgatccagggcgcagagcactccacgatcgacacgctcatcgaggccctcaacctcgcgaaggcggctgacaccaaagtggagaaactctccgggggcgagcgccagcgactcgccgtcgccaccgcgattgtgcaccggccgaaagtcctcttcctcgacgagccgacggcaggtctcgatcccgaagccaggtactcgttggtctccctgctccagtcgaccaatcttctggagatgaccaccctttatacgacgcactacctcgacgaagctgagcggctatgtgacacggtgtcgatcgtcgaacagggcaaggttctcacgacgtcgagcccgagccgcctcgtcgccgaggccgatctcggctcgacggtcattctccccaatgctctccaccaggcggatgcggtggcgacgcttcttggcccggacgcggtgcgggtcaccaaagacgggctcgaggttcggtctcacgacacggccgctctgttcgcgcgcctcgctgaaggcgggatcgatacacggaacgcccaagtccacgatgggcgcctcgaggacgtctatctccagctcaccggaagggattacgtagcatgaccagataccgcgcattaaccaatgtccttcttcgctatgacctacgcgactgggcgacccttatctttacgttcctcttcccggcgggcctactcgttgcgctcgtgttgacgatgggtgacagtatcgaaggaatggacctcaccgggccgatcagcgcgaacgtcatggccttcggcgcggccttcgtgggaatcttcgcgggcgccacccaccttgcgctgtggcgcgaaaacggaatgttcgtcgtcctacggagcttccccatctcctcaaacacggtcattgccgcacaggcgacggcgggcatgatcttcctgataacgcaggcccttgccctcttcggcatcgcaatggcactcggcatgactccggaggcgaccgcgccgattgcactcctgcccttgatcctgggcttcctgcttttcttcatgcttggggtactcgtcggaatcattctgccgtcgatggccggcgtctccatggcagcggtcgccatcatcatccccttgggaatgatcggtggagccatgatgccgattgagacgcttccgagctgggcgcagacggctgcaccgtacactccgatctaccacatgcgcgaggccgtgacgatgccgctcattggcgaggggacgtggggtgacgttggaattgggctcggctatctggtcgctgtgaccgcgatactcacgttgatggcgcagcgagcgatgaagtggaagtagagctgtgccttctttgctcaacacctgtacgcaggaagcctgtgtgatcgcagatggctttctcgcggcaggcccgcacagtctcacggcggaggagctgcgcgaacgttggttgcggacgcggtctacggcgctgaatcgggtgctaggctccccgaactccaccgctgtcgggactttcggggagttcttttcagggattcggcgagccatgacgcgatttgctggtcagtcgcgagaagccgccgcgtgggaattcagtttcacgcacggccagattcggcgcggctggctagcccggccggcagtcgccgtcggcggaacggcaggcgtacca

SEQ ID NO: 3157 - DNA, 9237 bp, Unknown
  R53_2m  MAG No. k141_462
gcgaatggtattccaatggtataccaatcgtatcaaatcgttggaattccgccgttctttccgtgggggccgttgatttcattatacgttactggatgtggaaggtgtgctgaactagcaccttttgtttccgactaagaccccttagaatgtcaacaattccaaggggtcttggcgtattggaaatgttcttggctagagaggtacagatggatttagcaacatttcgcaacaaataatatgatttaggtcttctgcacgttgcgggggttggttatggttcatccagatgagaacaggagcaaacctatgagcaagatgagtgacatgacggaatactatgcttcagcctaccgtttgccgtcaggcttcaagcattgctcgaaactgaagccggtggcagaggcagcgacggcgttgcgtcggtggtgagacaagacatgagcttctggcgacgctgggggatgttcaatgtcagtaatggttcaaggtttggactgctgacgtcgctgagacaccttagcgtcgttaacgggtcaagttctggcgatcaaacgacggtaaaaaggggcttagcgtcgttagctgtacataagttggcacggcaacgacactggagcgcgtgatcgtcggtgccgtgccaaactttggccaacctccgacaaatgagaaggactaacgtcggtggctgctcaaagtttggcgcgctggcgacgctgtaagaaaaaaagtgtggagtcgaaccggtaatagcatttattcggtttgttctctagtccaattgcgtcaggcaaggcctgttgtaggctcgggtacgacgggctgtagcgccgaataaggatgaacgggaacagaacgaagacggactgagatgaaccgaagcggtaccagaggggagcggctcatgcaggtggtgttggagaacaacatcgtttttgtggtcatcgagtatttagcaatcctgtgttggggattgtcgggcggacttgccgccattcgcaagggctacgacatcttcaccatcatgctgtgcggatggcttaccgcactcggcggcggtcttgtgcgcgacgtgatgctcggtgccctgccgccggtcggcatcaccgacaaaggctatgtgctcaccacgctgttttccggcattatcgtggtggtggcccacccggagatcaccaaactcaaatggacgatgactgtcatcgatgctctgggcctcggactattcgcagtcagcggcaccgcaaaggctctggcctacggttcctcaggcatgacagccgtattccttggcatgttcacagcactggccggcggcctcattcgtgacatcttcatcggcgatgtgccaatgattattcgagacaaacacctctatgccgtgccctcgttcatcggttgcattctgaccgtgcttgtatggcgtggtgtgcactacggttggttcgacatgtgctcggaaatgctgctcgacgtgctgatcgtcatcatcgtggtggcgctgcgcctgctctcggtcggcttcaacgtcaccttgcccggagccgtcgagcgtcatcgcgtctacctgcccagcgaaagccgatatctcaagcgcccggtcatccatccgcacgccgataccgtcgatcccggcgataccaccaaggacgaagaagacaagcctcaggatgattcaagaccgcctcagggctaactgccttcaaagaggtacatttggccttctgcaaaatgacaactgctttcaaagaggtacctgaagcacgaaacgtcgagtataagcgttgcaatgacggcgtttatacttgggctttctcggattcggtacctttctgaacggagatgtcatttcgcaagaccgccaatgtacctctttgaacggagatataaaaagtcccgcaagccagatgacttgcgggacttgctaaaaccttaagaggcttatgctcacagagcgttgatcgcaacagcgaggccggacttgcggttggcggcctggttcttgtggatcacgccagcgccagcagccttgtcgagcttctgggcggcaaccttgtaggcggcctcggcggcagccttgtcaccggcggcgatggcttcgcgggtggcgcggatggcggtcttcaggccggacttcacagccacgttgcgaaggtgcgccttctcattggtgagcacgcgcttcttctgcgacttaatgtttgccacgtttactccaaacgatgtgtgttataaggacatacaaaaggtagaggatagcatgagccccggaaaaacccgcgcaatgccacgccgaatacagtccctcggctacactaggtgaagtttgagtatatgccaagaggaggaatgcgttggtcgtccaacacaatcagccgggttccacggatcagtcggtgattcgcaacttctgtatcatcgcgcacatcgaccacggcaagtcgaccgtggccgaccgcatcctgcagttaagcggcattgtgcccgagcgcgagatgcgcgatcgcttcctcgaccgtatggatatcgagcaggagcgcggcatcaccatcaaatcccaggccgtgcgcgtgccatggacctttgacggcaccgaatacacgctcggtatgatcgacacccccggccacgtggacttcacctatgaggtgtcccgcgcactggccgcctgcgaaggcgcggtgctgctcgtcgacgctacccagggcatcgaggcgcagaccctgtctaacctgtacatggccatcgaccatgatctggccatcattcccgtgctcaacaagatcgacctgccgtccgccgagccggacaagcatgccgaggagatcgcaggtctgatcggctgcgagccgagcgacgtgctgcgcgtctccggcaaaaccggcgaaggcgtggccgacctgctcgaccagatcgtcatggacgtgcccgccccgcacggcgaccccgaggcccctgcccgcgcgctgatcttcgactccgtctacgatccctaccgcggcatcgtcacctacatccgtatggaggacggcgaactgcacgaccgcgaaaaggtccacatgatgggcattggcatgacccacgatcccatcgagatcggtgtgatcagccccgatatgacccgtaccaaggcactcggtgccggtgaggtcggctacatcatcaccggtgcgaaagatgtgagtcagtccaaggtgggcgacaccctgacctcggccgtccgcccggccaccgagccgctgcccggctaccgcgaccccaagccgatggtctacgccggtttgttcccgatcgacaacgcgcaattccccgaactgcgtgatgcactcgacaagctcaagctcaacgacgccgccctgatctacacgccggaaacctccgtggccttgggcttcggcttccgctgtggcttcctgggtctgctgcacatggagatcgtcaacgagcgactctcccgcgagttcggcctcgacctgatccagaccgccccgaacgtcacctacgacgtgaccgccgaggatggcagtcagcatcatgtgaccaacccgagcgaattcccggacggcaagatcaagaagatcgtcgagccgatggttgccgccgacatcatcacacccaaggaatttatcggtgcggtgatggatctgtgccaggaccaccgcggcattatgggcacgatggagtacatctccaccgatcgtgtcgagatgcactaccgcattccactggccgaaatcgtgttcgacttcttcgaccagctcaagtcccgcaccaagggctacgcttccctcgattaccatgaggatggcgagcagtccgccgatttggtcaaggtggacatccttattcagggcgagaaggtcgatgcgttcagcgccatcgtgcaccgcgacaaggcctacagctacggcgtgatgatgaccaagaagctgcgtggcctgattccgcgtcagcagttcgagattccaattcaggccgcaatcggttcgcgtatcatcgcgcgtgagaacattcgtgcgttgcgcaaggacgtgctcgccaagtgctatggcggcgacatcacccgtaagcgtaagctgctcgaaaagcagaaggccggcaagaagcgtatgaagatgctcggccatgtggaggtaccgcaggaggcgttcatcgccgccctgtccaccggcgaggactccaacgaccgcgacaccaaagacaagatccgcgccgctcagaagaccgagggctagtgttcgaggtctacatccacgtcccgttctgcttgcggcgctgcggttactgcgacttcaacacctacacggctacggatcttggtgcgggggcctcgcgcggcaactatgccaatatggtcattcgtgaaatggccctgaccaagcagtggcagctcgaccacggcatcgaggagccaccggtctccaccgtgttcttcgggggtggtacacccacgattctcgccgcccgcgatctggtcgccatgctcgatgccatccgcaagatctggagcatcgcgcccgacgccgaaatcaccaccgaagccaacccggacacggtcaacgaatattacatcaatgagctcgctgccggcggcttcacccgcgtttccttcggcatgcaatctgccgtgccgcacgtgctcaaaaccctcgaccgcacgcatacgccggccaacgtggccgcaggcgttaatgccgccaataaggccggcctgcgctccagcgtggatctgatttacggcgcaccgggggagagccttgacgattggcgcacctcggtcacgaccgccatcgacctcggcgtgaaccacatctccgcctacgcactgaccgtggaacccaccacgaaaatgggtcgtcaaatcgcggccggcactctgcccaaacccaatgacgatgacgaagcagccaaatacgaaatcgccgacgacctgttcgccgccgccggcctcgaatggtatgaggtctccaactgggcccgccccggatacgagagccagcacaacctcggctattggcgcaacgtcgattgggccggtctagggccaggtgcccactcccactacaacgcggtgaccgaggctgaccacccccagtcggcttcgctgatagcccccgccagcgggggcaagtccgaagccattgcctctgcctcagctgatggacaggccaacgccgaactaggtatgatcaacgcgcatgggaacaactcccaagaaattcatgcccccgctggcgggggctgtccggcggatgccggactgggggtggtttctgtctcacacggtctgcgcagctgggacatcgcgcacccgcgtttgtggggcacggccatcaacgagaaccgtgtgccgtgggccgatagcgagacgatcactcccgaggaaaacctcgaagagctcatcatgctcgggctgcgcctgcacgagggccttggcctcgaccgcatcaaccgcgccatcaacgatgcaggtatgagcagcacgccccagattctccgaaccgtttcggttgaccaactcgcccccatgatcagcgaaggcctgattaccgtatccgataatcatcgagtggtgcccactcgtcgtggccggttgctcaatgactcggtaatcgaacagttcttcgattacgtcggtgtatgagtcggtggtatggtgcgcggcagtcgccattacccgttcgctagttgtggttacaccgtcagagggagcttttttgttttaccggcgggggagggaaccgcgtaggactacgtccggggcgctttgcacgtagatcaggcggttggcagtgccgccggtggcctccgcgtcatcgcggttggacaggatgctgtccacggcggcctggcccatttcggccagcggcagatgcacggtggtcagtggtgggaacacgtcggcggagtaggggatgtcgccgaaaccggtgacgccgatttcctgacccggctcgatgccgttggtgcgcaacgcggtcatcgcaccgatggccatcacgtcgttgagcgcgatgattgaatcgatgcctttgccgtcgtacagtgcgccttcgcccggcttcagcagtccggatcgggccatttgcatgacggccgcatagccgtcggtgcggctgaacttaccgtttgccacggctttcgggtccacggtgatgcctgcctcgtccaacacttccatcacaccggccagtcgttctttggaggagcgatgtgcgtcatcgcccttgagaatcgcagggcgcgtatacccggaatcgacgatcagctttgcgatggcgcgcgcgccgacatcgttcgccacgtccacggccgggaagggcaggttgcggttgagtacgaacacggcatgtccgccggacgattcgtactggatgagttccgtctgcaacgcctggcgttccggcgcgtcggtgtattcgctttcggagatgatgatgccgcgcggcctggtggatacggacttacgcaccgcctccaactcctcgtgcggggtggctgccacgccgatggtcacggagatgccgcgttcggccgccgccttgaccacgccttgcgacacggatgcgaagtagggatcggagatatcggagaccagcagcacgatgttcggtgcagtgcctttggccactgcctgagcataggcgttgggacgatagttgagcttggtggctgcttccatcaccttgacatacgattggttgcgtaccttgcgggtgctgccgttgagcacacgggatgcggtggcgatggagacctgggcttctttggcgacgtccatcaatgtcgctggcgattgcgccttatcgttctgtacagccacgatcgaatcggtccttttcttccctgaaacggaaaacatgtctaaacgcttaccgcaatgatatcgcagttttgcttgcaatagtagcattgtggattggaaagcctgaattttgaacaaaaataatcacgcgaattatggaaagcgcttaccgttccgcgtgtcgtgcggtatgctcgaagcatgacgcgatacttatgtgcccctgactccttcaaagagagcctgaccgccatggaggcggcccgggcgatggctcaggggattgagaatgccgaccacgatgccgaggtccgttgcctccccatggccgacggcggtgaaggcaccgcacgtgcgcttgtcgacgccactggcggatcgatgcacgccgtgccggtccacgacccgctcggccgacctgtcgaaggccacttcggcctgctcgccgacggcacgaccgccgtggtcgagacagccgaagccagcggcctcgcactgcttgaagccaaaaaacgcaacccgttgattgcctcctcctacggcaccggcgaactcatactcgccgccgttcgttccggagccaagcgcatcatcgtcgggctcggcggcagcgccaccaacgacgccggtgccggacttctgcaggccctcggcgttcgtcttctggacgggaacggcaacgaccttaagcacgggggagcggccctcgctgatctggccaccatcgacatcagcacgatggacccggctctcaagaacgtctccatcaccgccgcctgcgacgtgaccaacccgctgaccggtcccaccggcgccagcgccgtgttcggaccgcagaaaggtgcctcccaggccgacgtcgccacactggacgccgcgttggcgcacttcgcgcaggtcatcaaaagccggctcggcgtcgctgtgaacgacgtgccgggcgcgggcgccgccggcggtatcggcgccgcgctgaaaggcttccttgacgccgaattccgtccgggcatcgccatcgtcatcgaacaatccggacttgatgcggccgcgcaatgggctgacgtggtgttcaccggcgaaggctccatcgacttccagaccaagttcggcaaaaccccggccggcgtggccgaaaccgccaagcgccacggcaagcccgtgatcgccgtcgccggacacatcggcacgggcatcgacgaactgcatgaggtcggcatcgacgcggtattcggcatcgcccccggtgccgccagcctcagcgaactgctggccgacgcggccgccaacgtgacccgcaccaccgaacaagtcgtacgaaccctacaactgaagcagcttcacaagctccctctgatgggccgagccgtgaaggaaacgccggaggcgtttccaggcgagggcttgacgacagtcaagccagccgaaggctccataattgcgggacgagctgccgcggcaaagccgtgactgagggggagacttgtggcgcagccgcaaaaaatggcatcggctttcagccgatacagtcattcgtctgcttctctccctcagtcagctgcgctgacagctccctcgtcagagggagccacacaattcggaaagaaagatatgcgcaccatgctgtacaccaaggtgaccagcatgctgagcaccacgggcatcgccagcgagaaatacgccttcggaatcggtgccttttcgaagagttcgttatccatttccgtcccttggtgttttcgttcttcagtcactgcgcgggatgccgttcggcgtgcatcacaggcattgtagaggcaacagtgtggacaacgggcgggggagtatctcatgatgcggtgagggcgttgatgatgacgcatcgtgtattggcggccgtgtgcatcgtatgtgaacctgtgctggcacggcgtacacacgatgggaaaagaaagaatatatggaccccgttgtcccggttattgttcagttattactgtgttgaattattgcgttattcaattattgtggtgtgccggccgattgcggcctgcgggggattgccttcgtatgtgtcgtgcaatctcatgaatgggatcgttcgctagattcagcgagcgtccttgttggcggcgttgatgatgtcggcgaacatcttggagtcggcgtagccggcgcgggcgatggcgtccataccggagagggtgaaaccgcgaatcatggaatccatgaatgacataatgtgttccttgtcttgacttgcaaagccgtgggctttgcgatgtgttgttgtttacgttatgagacgggccgtgtgtgagcggcgagtcagggaagaggctcagcgagcgttcttatcggtgtcgttgatgatgtcgagaatcatctgggagttggcgtgaccggactgggccagggaagtggcaccgtacatagccagaccgcgaatcatggaa

SEQ ID NO: 3158 - DNA, 10035 bp, Unknown
  R53_2m  MAG No. k141_497
caccgaggatttcccgtcgggggctagatatatgcttccggagcatatactttccggaaacctacaggtcaatccgtgaaaatccgcgattccggacacactttttgacccttaaccctgttcggcgatgccgatcccagccagctgaagtctctcgccaccctgagcaacgccaaggtattcgacggccgctccggcgacctcgccgccgtcttccgccaagtcaagggcttcaactgatgctccaggtaatctgtggattcgttgtcggactgctgctcgccgggctcggtttcggactggtcggcggcggagtgcccggcctgatcgtggccgtggtactggccgcacttgggtatatcgccgcctccacgctcaccgagccggagcgacgcatcggcaaaatgctggtttccgccttgcccaacggtcagaagaccgccgatacgatcgacgcggcgaacgctcaactcaactcgatcgccatgctcaccaagcaagtacgtgacccagccgtcaaagccgaagccaacgacttcatcgccgctaccaaagattgagtgcaatacgtgacccgagacacctccgcctacccgacgttgcgccactacatcaccgtgtacggcgagcagaccgagaaactgttgcgctcctacgtggacgtggaaagttccggcgcacgcgatcagatagccacggtacgaatcgaaaccatcgaggcgctgcaagtgctcgaacagaccgccgccggcgaactcagccgggcggtaagcgccaagacgttgggcattacggccgactccgacgccatccaacggttggcccgcatggatggatacgacgacgtcgcaccttcgcctgtgccttcctcggctgctgatgaaggacggcatgcacccagtcagactccatctggcggcccggctcaccagtcggaccagaaaacggacgcacaatgaaactctccaaatcaaaaatcatcggactgatcgccctgcttgcggtagtgggcgtggtctgcggcacgctggtgtggcggcaatcgcaaccagcgccggccgaaccgaccgaacaggtgagcatcaccggctacctgggcggcgagaaaatcggcctgttcgatgacgccaagttcaaggcgcttgccgccaagcaaggcatcgccatcgactatcgcaaggccggatcgctggccatgatggatgcggaccggaaaggcatggattacctgttcccctcctcgcgcgcggccgtcgaatacggcaatgcgaaaggcgtcaaggccacccaaagcgacatcgtcttcaactcaccgattgtgctgtacacgcacaaggccgtggcggacgggctcgtgaacggcggacttatggccaaggacgattcgggcgcgtaccacatggatatggccaaagccgtggacgcgatggtcgccaacacaacctgggccgacgtcggatacacggcaggctacgggcagttccgcatcgactcgaccgatccggtgaagtcgaactcaggcaacgaatacgcggcgctgctcgccacggtgctcaatggcgggcagccggccacggtcgattcggtggcgcgcgacggcaagaccatcgcctccatcttcgccaaatccggttggatggagacctcttccgaggattcgttcaaccagttcctgaccttgggcgtgggctccaagccgatgatggtgggctacgaatcgcagctgcttgatttggccgtgaaccaaccggatgcgttcaagcagatcaaggacgacgtggtcatcgtctacccgacgccgaccgtgtggagcacccacacgctgatggctttggacgagaaaggcggcacactgctgaacctgttgaaaacaccggcggtgcagaagctggcgtgggagcgccacggcttccgcgcggccaacttcgccggcaccgattcgatcagccgattcggcgtgcccggcacgctcgaccagatccccgccgtatccgaactgcccaacaacgacgccatgcaacaactcatcgccaccctccaatccacgcaatagctcttttgccagcccccaatcggtgtttttattaaccccctctgacgagctgagtcgtatagcaaacagcccagtgggctgtttgcagacgaaggcgagcgagagcgagcaaataagaaatcggctgtaggccgtccttaattgcgttcgggctcccggcaaagccgggtggggggagagacccaaacataactatcaaaaaaggaaccagaatgccccaaaacatcaccctcgcagacctcgccaaaagctccgcaacccccatcaccaacccgttactcaacaccaaccaagccgcccccaacaccaccctcgtccccaccgccgccgaagcccaagccgccgcggccctgaccccggaccagcagatcgccaaattgcccgaagccgaccatgccacggtcaaccagatggccggccagatcgacttcactcgcgacggcatcgaatccagctacggcaaggacgcccagcgcgccacctccgccttcgccgacgaaatcctctccgacacccgctccaaagacaccggcgaggcgggcgaactactgaacaccatgctggtcaccattgacgaggctgacctcggcggcttccgcaccattccgatcatcggccaggtggccgtcagcgtggataagctgcgccgccgctatcagaaagtcgacgcgcaaatcgacgaaatcatcgtgcgtctcgaatccgcgcaagccaaactcgtggccgacatctccatgtacgacacgatgtacacgcagaacgcccagcaataccgcgagctgaaaatgaccgtactggccggcaagaaggcgctcgccgacttcaacgccaaccagctgccagcgctggaggccgaggccgccgccagtggcgacgccatgcaggcgcaagtgctgaaggacttcaagtccaagctcgaccgttttgccaagcgactcgacgacctcgaccgcatcagcgtggtcaccttgcagaccgcgccgcagatcaaaatcatccagaacgcggaccagaccatcgtggacaagatcgacaccaccatctccaccacgattccggtgtggaagagccagatggtgatcgcgctgggcctgtccaaccagcgcaaggccctcgacctgcagaacaaggccgacgatgtgaccaacaagctgctggcgcgtaacgcggccgccctgcacaagggtgcggtggacgcggaaaaggccaaccagcgttccgtggtggaaatcgacacgctggagaagatcaacgccgaactcatcgccaccctgaaggagaccgtgcagatccagaaggaaggcaaggccaaccgcgaggccgcccaggtcaagatgcgccaaatcgagtccgacctcaaaaacgccttgctcgaaaacgcccagcagatgtgagccgttcgtgcgccagcatgctcccgttggcagaggtatatgagtacgcctactggtgtgcgtatatatgctcccgctggcgggagctggcagccgtaagactggctgagggtggtcacggcgctcggctcggccggctttaccggcaaccattccccgccgcaatttctctgtgggcataatcccggaatgattgccgcgctcgggaattgggtgaagtgaaggttaaaggttgagagcccgggagggttccggaaccggccacgataaccgctgctagccccgcgatacgggttggcggccggcatccaagccgattctctcctaatcaaggagtaccgattatggcaatgtttccggctttgatgaatgacacgatgttctcggatctgttcgatgatccgttctttgagggttggcgcaacacggacaacacgatgagtgccgcaatgcctgccaacatgatgaccaccgatgtgcgcgagaccgacaagggttacgacgtcgacatcgatatgcctggctttaagaaggaagatatcaaccttgagctcaacaacggctatctgaccgtgtccgcctcgcgttgcagcgagcatgaggacaaggctccggccgctgagggcgaggcttccgacagcaagtgcgcttgcgcgtccgattcgggcaagtggctgcgtcgcgaacgctacatgggctcctgctcgcgtagtttctacgttggcgaggacgtgaaggagtccgacatccacgccagctaccggaacggcacgctgtgcatccaggttccgaagatgcaggcccagccgcaagtcgagtccaagcaccagatcgcgattgagggctgacgatacttgattcgtcccgaagtcccgcttcgagtagctttgccccctctgacgagggagctcccgcgaagcgggtgggggagagataaatcgtaaccaaaccatgcttcccacgccgcctgccctacgctttcaacgccgactaacctgacagacggcgggaaacatagccaatgcaaatgccgggtagggatttaccctacccggcattttgctgtttcaatcaccgaaccccaccctgttcgcgcgccggtcgtgtgccgttctgcagctgtacacatccgatgagtagaatgccttcgaaacgaggcaagagaggcggacatatggcgaacggcgcacagaacgcaagcggcacgccggccccggcggcaagccgttccggcggccacgtcgtatccgcgcgcgccacgaccatcggcctgatggcgatcctgctgtggagcttcatggccggcaccgtgcgcatcgtctccgaaaacttcggtgccacgcttggttcggccctgatctacacggtcggcggcatcctgctgctgatgttccggcgcccggccccgattcgcgagttccccaagaaatacttgattatcggcggcctgttgttcgtattttacgaatcgtcgatatccctctcgctgggtctggcctctaccgacgcatcctcggtggaagtgagcctggtcaactatctgtggcccacgatgatggtgctgctgtcggcgggcgtatcccatcgcaagcacgcggtcgtcaaggtgctgccgggcgcgattgtggccactgccggcgtggtgctggcggtcggcggtaattccgggctcgactggcatgcggccgtgcagcatatcgccgccaaccctttgccctatgcgctggcgttcgcgggcgcgctcgcttggtcggtgtacgcggtgttcacgccagccatgagtcatggggtggacggcacttcattgttcttcccctgcgtggccgtggcgttgtggattatccacttcgcgtccgggcaggggtggccggccgagccgccgagtctggtcgcatggctgtttgtgttgattgccgcggcggcgattggcggcggttatgcctgctggggctatggcattctgcatgggtctatggagcggctggctattgcgtcctatgccacgccggtgctgtccaccggggccggtgcggtgctgctgggtttggcgctgtcgctgccgttttggtgtggcgcgctgctggtggccgccggatcggtgctcaattacttggtcagtgcgcgcaaatagcggggtggctttgctcatggggcggtaataatcccatggggcggtaaaaccctcatggggcggtatcccaaaatggctttattctgccgtttcacaatttcttcaaaccgccccatgggccttttaccgccccatgggtaaattaccgcccgatgggcagcagcaacttactcgccgcggcgctcggactggcggcgaatcgggtcaagcagcgtattcggatcggagatgccgaacatgctgcgcccgccggtggattcagggtgcttggcgagaacggccagcgaaatcgcccccggaatcataatgatcaccgaaaggccgccaatccccagttcacgaagaatccgagccccagtacgatggccaccacaaccaccaccgtgacgataatcgtcaacagtgctcgacgtgggttggtttccctggtccaagaggtgctggctgcgggttttgctgttgaactggccgcggcgtttgtggctgttgtgccatcagccgtgccggtcgtgggccttgccgccgcgctcgtcgcggggtcagtaggggcgtcagacacgttatcggcgacattgccggtcgctgctggacgttgttcgtttgcgtgagtcatatccaccaacatattccctgcttccggctaaagctgggacaagcctgcgcaccgctaatccagcgccgacactggccttgagctgcggacgtccaggccggatgtgaacaggagctgaacggagtctggggaaaccatgagaactcgcgacaatttttgtgaaattgggtgacgctctatgaatcgcgcgctagtgttgcgtgagcttacaagacgaggagcctggagtgcggggggcgaaggatgaagaactccgtttggaaaacgttcatggaattgtcgctggtccgcggaatcgtgccgtggaccgtgttcggactgaccgcgatcgcggcaatcatactgattgttgggctggcattgagcaagaagcgcggcccggcagcagacggcctggcaccgggcggcctggcgccggacggcgaatcgtcggcccagtcgcccgtcgacccagataaccagccggccaaccagcctacgaacgcggctgctacggcgtcatccgcagcttcgacggaagagacgtttatttcccatggcctgcgtacgccgcaacgtcgtcacttgcatccgctggccgccgcgctggccgccgccgcgctcgccggcgcgggcggactactggccacatggctgatgtccgacgtgttcatggtgttcggcgtatcgctgggctggccggtgatcctcaccgtcgcgggaggcttcgcgggcctcggcttcgtgctggccgccgccgtgacgttacggggggcccgtcgcgcgctggccgtcgtgctggtgccgctggtgctggcgtccaccgcgctcggtgtggactcgatctacggcgaataccagaccatcggcagtctcgtcggctatacgccataccccccgctcggttcggtcaccgtgcgcaaggcctcgatgagcgtcggcgagtggcgcgacaaggcgcgcaaggacgctctgccgtccatgcccgactcgggcaaggtgttcgccgtcgacatcccgaacaccgaatccaagttcaaggcgcgcaaggcgatggtctaccttccgcccgccgcgctgtccgaccgcccgccggccctgccggtgatggagctgctcgccggtcagccgggcagtcccggtcgcctcatcgacgccggcaacatcgccgccacgatgaacgcttacgccgccgaacacgatgggctggcgccgatcgtgctcgcacccgaccagaacggttcggccatgcacaacagcctgtgcgccgacaccacccgaggcaacgccgaaacctacctcaccaaagacgtggtgaactgggccacaacgacgctgccggtagccaagtcggcccgtatgtgggcgatgggcgggttctcgcaaggcggcacctgcaccacgcagctggtgccgcgtcaccccgacatctacggcgcgatgctgccggtggatggcgagcttgagccgaccgatggcagcgtcgagacgatggtccggcgatatttcgccggcgaccgcaaggcctacgacgggcaggtgccggtcaacgccatcgccgccaccggcacggccgaccaggcgctgttcgccggcgccggcaaaggggatcggaagtcggtcgccaacatgcgcaccatcgccgcggccgcgcgtgcggccggcatgcagaccaccgaactggtcgtgcccggcgccgaccatgactggcatgcggtgcaggcggtctggaacccaggtctcgactggttcggcgcgcgaaccgggctgggcgaaatgacgaaatcgttggaggaatacccacaagtggaggtgttgcaatgagcgaagaacaacagcatgggaacgcgcggccggcggccatgccgcagactcggcggcccctgcgggacgcggaaccctcgcggacgaagcccgccacgacctcccgcgccaccaaaccgcatacggcaaggtccagccatgcggcggaaagctggcgtgaactggccggtgacgtgcggcagtgggcggacgatcaccggttggccgtcaccgccacggcgacgctggtggcgctgaatctggcggcgtggctggtggccgcgatggccggattcgcgtttccgctgcggctcagcaccagcatggccgcattcaacgccggcaaactcatctgctcgctgttcctggcgcgcggcgtcatccaactcatggtcgacgccgtcctgtggctcgtcatgctgtcgatagccgaaccatggctcggccgtgtgcgcaccgtcgtcaccgcgctcgcctgcgcggccggcggcgtgctggcgggcctgaccctgtgcgcggcggccggatggatgttccaggactccctgttcgtctcccgcatgcggttcgcattgagcccgctggtgttgccggtcggcgcgctcatggcggccagcgcgttctgcagccacctatggcgcaggcgcatccgactcgtcggctatgtggcgatcctggtcacgttgctctacagcggcaaccccagcggctactgcatactcgccgccgcgctgatcggccatgccgccggccgtgtgatggccggtccgcccgcgcacgtcgaagccgaatggcactggctgcgcagcacctccttcgaggcgcggcgcatattcgcggccatcgccgtggtactggccctggggccggtcatcgccatcacctcccataaccatgcgggcccgctcagcacgatcggcctgctcatgagcccggtttccgtcgacgatggcatgctggccaaatgcctggccggtgacacgcacggcggctgcttcctgcagttcgatctgctgcgggcctcgatgcccggcgcggtgttgcgctcgttgctgcccaccgccgtgaccctggtgctggcgtggggcctgtatcgcggacgtcggttcgcggccatctgcaccgtggccatcaacctgttcacggtggccatcgccgtcgcctactatttggtcgtgccgctgagcttcgcgccggacggcatggcctccctgctgcagcacggcgcgatcgtggcctgcgtggcgaacgtcctgcccccgctgctgttcgccatcgccctgctggcggcgatgaaacacttcccgatccgcatcggctggtgcaggctggtcggcggcatcggcgccatcgtgctggcctggctggcgtgcgccgccatatacctgatatacggcatcgcccaacccgccaccttctcgccacgcgctacggcctcgtcgctgctggccgagctgccgggacgcttcctgcccatcggcttcctgagccatatgaagctgtcgttcgtgccgcgcactccgatggcctcgatcatgtaccaaggcgtcggcctggtgttctggatcgtggtgctggccgtggtgatccactggatgggcgacgtgagcgaatcgaacgagcgggcccgggcgcgcgccgaacgtctggtcgaaaccggcggcgaatcgatgagcttcatgaccacgtgggaaggcaacagctactggctgtcccccacgggcagatcggccgtggcgtatcgcgtgctcaacggcatcgccctgacctgcaccggaccgttcggcgatccggcggaatggatggacgatctgaacggtttctcccagcactgtgcggaacgttcgctgtcgccggtgttctacggcgtgcatcgggaacagcgcgacgcgttgctggaagccggctggaactccatcgaggtcggcagcgaaatggtggtcgacccgcgcggctggaagacgaccggcaagaaatggcaggacgtgcgcaccgccatcaacaaggccaagcgcgacggcgtgaccgacgtgcagtccacattcctggaagcgtcgcttga

SEQ ID NO: 3159 - DNA, 45409 bp, Unknown
  R53_2m  MAG No. k141_538
ggccaaggcgttcggcttcgaccggccgaacccggtcaccggggtgcctatcggcctcatcgcccccggcttcgccgccgatttcaaccttgccgatccgaccgattggacggtcgaacaggtgtggtgcgcgggccgcaaattgaaatagcgctggatacctctccgcaggagaataggcggagctggtggggggcggggtgacagtactgcgtcggcacagtcaccattcgcggcaatgcggtgcgacgccgacacggcaaatgacgaattgcgtttgaccgcactccgtactatattgttgcgagttgctttgcggagcaaagtaacatccaaggggctgtagctcagttggtagagcgcttcgttcgcatcgaagaggtcgcggtttcgactaccgtcagctccacgagaccctctgcattcattccaccgcagagggtcttttcatttgtcttcgttggtattgtgccatctcgcgtttcaaggggctgatttggggtttaccggaggtctacttgcgtttcgaggggctgatggtcaagtagatatgccgccaaaatggcggaatagcgttgcgtcaaagccgtttgtactggtgcttcaccggatgaggagccccttgaaacggaagtagacttccggaacatgtgaaatcagcccctgcaaagggagaatgcctcgattccgccatggattgtcgtggattgctctgtggtatgggcaatactgggagtatgacaagcgcagatgagttgaatgagcagtatgacgctgacggtagcgtgacgcaagtgcctgaacgcaatgatgaagttcatgccggcgaatccgccgccacccaatcccgcgaatcggccgtgaccgtccccgccggcaccgtggtgctcgccgcaaccccgatcggcaacgttggcgacgcctccgcccgtctggtggccctcttggagcgggccgatatcgtggccgccgaagacacgcgccgcctctacgatctcgcccgtcgcctcggcgtctatgtgaacggtcgcgtcatcgcctatcacgaccacaacgagcgcgacaaggccgacggcctgctcgaccaggtcgaaaccggcgccaccgtgctcgtcgtgtccgatgccggcatgcccaccatcaacgaccccggcttggccatcgtgcgccgtgccatcgaacgcggcctgcccgtcacctgcgcgcccggcccctccgctgtgctcgacgcgctcgccctctccggcctgcccaccgaccgcttctgctacgagggcttcctaccgcgaaagcattccgagcgcgtgcagtatctgcgcacgctgttgcccgaacgccgcaccatcgtgttctacgagacgcctcatcgcattgccgattcgatggacgatctgctggacgcgttcggcccgaatcgcccgatggccctgtgccgcgaactcaccaaggattatgagcagattcgtcgcggcccgattggcgagattcgccaaagtgtgattgatgatccgccccgtggcgagatggtgctggtcatcggcggcgcgtccaacgaggaggccgaagcggccgcgcccagtacgttgagcgtggatgacatggccgtgctctccatcgaccgtgctttggaggaaggcctgcgtatcaaggacgccatcgcgcaagtggtgcaggagcatccactggctgacggatcgttggccaatcgcaagcaggtgtatgcggctgtgctgaaaatcaagggatagcgcagcagccggcgattatctccccgttacgcctccatcgactcgaacaatatttccaacgcctgccggaccccgggcccaccacgctgcgagaccaattccagcaaaggcgcgtcggctttgggattggcaaccagccatttacgcagttcgggcacgtgatatgcgatgtgccagagcacggcaacatccgtatcgggcgaacatgccaccgcgggcgtaagtctgatgggtggttcaggcggcgcggtcatatccgagattgcgcgcgatgcggattcggatgagtgtgccgccgccgcgtggcgaggcaaccgttgcgcctgccgcaaatgccgtaaacggtgagcggcatggcggcctctgcgatggcctctggcaatgaatcccctcgtcatgcgcattgctccaaagccggttcgtccatctcctgctgcaccgattcaaaaaacatgcgtgcgcgtccggcatacttgtgatgccgatgctccttgacgatttgcagacagtcgtttggccgaaactggtacgcggacatcagttggcacaccagcgcgttgacggtggaaggatcggggatgtcttcaggactcatcaccaggtcgcaagccgtacgggctggcgtggtgacaggcagcccgccgagcttgatgatttgctccggcaacgtcaatcttttgaatacgcggatgcggcggctgacggatgccgagcggaagtgcgatgtggagatcacgtctatggtgctcggaaagtcggggcctcccagccatacccaagcggcggtcatcgaacacaccacagtgccaaacggggcgacctccgcgacgatttttgcgcgaccatacagtgtgcccgaatgctcgatccagtagccggcggaatcgtcgagcttacgtaacgcgccgaaggcggccagacggttaaggctgagcggtcccggcagatccttggtaaacagtatcggcggcaccgcgggctgcgcggttgccggcgaggtgactgttgtgatgtccgtcatcggacctgctgtgatatccatgaccgaacaatatgcagaaatgcggcttgcgcgccaccggataagcgaaaacggtggataagtgcataacttcactaggtgcgcgaatgatgtggataactcggtggatatcgacaggcggaagtgtgtgcggatgtgcgtggacgtgcgtacggatgggtgcgtggacgtgtgtacggatgcatgtacggatacgtgtgcgaatgcgtatgcggataagcgcgcaagcggtgtacggataagtatgtgggggaagttacgggtggataggtgagtgggatgaggatggcggcgcggcagctatccgggcgtgtccccgccgcgccggataatcaagccttatgagtcatgttttggtgaatgttgcttggccgtatgcaaacggcccccgtcatatcggtcacgttgcaggatttggtgtgccctccgacgtctacgcgcgctacgagcgcatgaagggcaatgacgtgctcatggtgtccggcaccgacgagcacggcaccccgattctcgtcgaggcggagaaggaaggcctcactgcccaggaactggccaaccgttacaaccgcgtgatcgccaaggatctgtgcgacctcggcctgagctacgacctgttcacccgcaccaccaccggtaaccacgagcacgtggtgcaggagatgttcaagcagtgcttggagaacggctacatctacaagggcacccagcaggtggcgattagcccgtccaccggccgtaccctgcccgaccgctacatcgagggcgagtgcccgatttgccacgccgaaggtgcgcgtggcgaccagtgcgacgcctgcggcaacgagctcgacccggacgagctcatcaaccccgtctccaagattaacggcgaaaccccgcgcttcgagcagaccgagcactacttcctcgacctgccggcgctcgccgaagccaacaaggcatggctggagacccgcaagggctggcgcaccaacgtcatcaacttctcgctgggcctgttcaaggaggtcaagccgcgcgccatcacccgtgacatcgactggggtatcccggtgccggtgaagggctggatcgacaacccgaacaagaagctgtacgtgtggttcgacgccgtgatcggctacctgtcggcctccatcgaatgggcccgccgccagggcgacccggagaagtggcgtgaatggtggaacgatccggcgtgcccggcctactacttcatgggcaaggacaacatcaccttccactcccagatctggccgtccgaaatgctggcgtacaacggcaagggctccaagggcggcgaaaccggcccgatgggtccgctcaacctgcctgagcaggtggtggccagcgagttcatgaccatggaaggcaagaagttcagttcctcccgcggcatcgtgatctacgtcaaggacatcctcgcccgctaccccgtggacgccgtgcgctactacatttccgtggccggccccgaatcctctgattccgacttcacctgggccgagttcgtgcgccacaacaacgaggagctcgcctcctcgtggggcaacctggtgaaccgcgtggccaacctcatcaacaagaacttcggcgagattccgccgctggacgaggattcgatgaccaacgaagaccgtggccttctggaagaggcttccgccgcgttcgacgtggtcggctcctccatcgaaacccaccaccagaagcacgccctgtccgaggcgatgcgtgtggtcggcgacatcaacaagtacatttccgccaccgaaccgtggaagattaaggacgaccaggctcgtctcggcaccgtgctgcacgtggccgcccaggccgtgtctgacgcgaaccacctgctcgcgccgttcctgccgcactccgcacagaaggtgtgggaggcgctcggcggcaccggtaccttctcgccgctgcctgagctcaaggaagtcgaggatctcgacaagcccggcttcacgtatccgattatcaccggcgattacgagctcggtgtgaacgtgcacccgtggaagagcgaggcaatcgaggtcggcgccgtggtgcccaagcccgcaccgatcttcgccaagattccgaccgaggccgtggaagaggagctggctcgcttcgatgaagcgctggctgctcgccgtgccgccgaagccgagcgtctggccgccgagaaggccaagctcgccgccgagtgattcggcattgctagctcgtagctgacgggccacctcgcacatgaagtgttgcgaggtggcccgttgccgtatgtgcggtcaagccccgacaatgcgaggccggttgtcggcgggcgtcacaaattcgtcacactccgccaagacttttcccagacaagcacatcaattcgccaagcatggagcggttatatagaagatgtcaacggaatgaagttcataccggtggcgaggttcttcgaaccccataactgaacccttcttctctcttctctctcacccggcggccccctccgccgggtttctttttttttaatgctgggaatgccatgggccgcatattgaaaaaaggattatggcagagtgctgtctgtttacaataaggcattgctgttctagaaaataacaaagaaggggggactgatgatgtataccgtcacattttcgggcaacctgactcaagcggaatcggccttggtcaagcgaggcgccatacagatcgccgcgttgctggccgcaaaaatcactggccgcggactcatcatcaacgacggtgacaccgaatactcatgggatttcatcctggtcgatgccagcagcgatgagcggcacacctttgacgagaggctattgcggatgctgtccgactacatccacgccggtttccccgatgccgtgatccgccacgccaagcacgaggctccaaagctcggcaaataatattggtcgcgtggtgagtcccatacttccgtcggaatatcgctatcgcgatatggtcgcatgcctgttgcgcattgaagcgttcgacctatgcgcagttgatgttccggtgatgacggcaaccgattgacgcgattaccgggacagatttcgctgtcccggttcgtgatttcggcttctttttgggaaccgggacagccccccttgtaaacgcccattatccgtaatcccaaaaccccggaattccgccgatgtacgatggcgaatattgcacggtggggtgataggtgaatgaaattttgtcttggttgctcaaaaaggggcgaaatggagaaccgggacagcgaaatctggcccggtccacacataaatcgattgacatcgctaccgggacatcggacacggacaccgagtcgcgcagcgtcggcgcaacatggatactgtacgactttcgcgataaacgttatattcttcgtcgcctccgccgggcgagctcatcgagtggcgttgccgtcaaagtgaaatcgaatacggcacctcgcaatgccaactgtcgcccgacccggtaggcgagttcggcttgggatggctcatcggccatgttcgcggcagtggcgatgatgatgatccaatgatgatgtcgcagcagttcgcgcttgtcgttgtcccgccgccactggtttttgtcggtgcgatgatgatcgccgtcatattcgatggcgacgcgaaattcgggccaagcgagatcgagcgttatcggcgcaccgttgctgaatgtcgcgccgggcaccgtgtaatttgtcacggctggcggaagcccgtatttcgtcgtagcgatgcgggtctttgattccatcggagagtccacgcggggcgtaatgaatgcaagagcgatcatgcacttggattttgcgttgaatttcgggagtccagtgacttgccgcacgaagtcctgataaatgccgtcagcagtgcggccgttcgccagacccggcttgcgggcgattgccgtaaggattgcgtcgccaagtatgaccagcgattcgagcgatatatgagcggcgagttgtgcccaagtgtgtatcagatccagtgcgtacacatgtttgttgatacgcacattgtgcgcatcgctcagcggcttccagatgtgtggtgtcgttggcggcacgatggcacgtattcgtgtgcggtgtgagtcggagacggtatggagctcggcggggtcgatatcgcaatccttgggaagcggcacggattgcagtatcagcgatgtggccatgccgaagagcaccggttgcccgagctgttgcgcggcgtccgtgcatcgtttaagcatttcccgcttacgttgggtgagggtttcgctcattgctggcgacacagggcctgcaatcacagttggcgcggaactcgccatacgtggtgatgaacgtagctcaggattgatggtgcgcgcagacgcaacgcccggtgtgtggggccggggccagccggacggttcgtcgtcgaatacgccgggcggtggagtgggcaatatgtcgttcatgacgccaccgtagcgcagcggtcacatgctcgccatgaaaaccggggtatgtggctctagcttgcgggagatgtggataactctgtggataactagttcggaacaattagcgaggccggaacctaccggcaattggccgatgatgacggcacttttgctcagctcagccgcgatagtctcgaataggtgcggccgggcgtactcgcataacgtaatgccccttctctctgaacagagagaaggggcattcgaatatatgctcccgccagcggaacgtcagcggcagcggcgggtgagaggctgccaggggtcgatttcgaccggttcggcggcgagcagggcgcgggtggcgtcgtcgaggtattccttgcggatgatgagctcggtaacgtagcggtcgaaccaggcgtcggacatgacgtagtagccgtccttgccggcgtccttgccccagctattctccaccttccagcggttcggcttgccgtcctcgccgaggttcacgccggtgaaggtcatggcgtggttgctcgggctgtcgccgtattcgaggccgtgggccttgtcgccagtgaattcagtgccgaacagctggtcgacgcgcaccacggactggtcgaagaagccgtccttgcgcagcgcgaactgcgtgcagtcgcaggcgaaccagatcgggtgaccggcggtgagctggtcaagcgcggccttcttgaacacgtccagcggcacgttgacgaattccatatcgccagcctcggccacgttcgcgctgaagcggatgcggtagcgccggttgaacgggcggttcttgagcggggcgttggccagcgtcacgaaatcgttgacgtccaccggcacgtacttcttgtagaactcgagcggggtgataccgatctcgcgaatctgcgggcgctcgtccttgccggttttcggcttgtcggacttgtccttatcgcacttgcaggccttggcgtcggatttgccctcgcatttgcaggagtcgccgcacttgcaggattcggccttgccgtctgcgtcggcctcggccttgcacttgcaggcctcgcccttcttatcctcggcgtcatccttggtgcgcgcgaagaagtcgaacttctccggcggctcgccaagcgacacggcgcagatgcggtacacggtgcccatgtactcgtccttcagcgcgcgcagctcgtcctcgccagcgcccgcagccgaacggcggcgcagctcagccgcgaactcgcgcagcttggagttgaggtactgcttgaaatcatcggaattacgggagttctcggactccgggtaggcgctcttgggcaccagaccgtacttgttcaccagcgcggcgaacatctgccaccagccgccgtcatcggacgggccccagttgatggcctcgaacaggcgtgagtcggtgggctcgtcgagcgtgcgcagcacattctccaggtaggtgttcgacttctccatcgcatcccagaagaagaggtaggtctcggagaactcgaagtcctcaaggttccagcgatgcataagctcgtagcgcagcgtgttcagggaggcgaacatccagcagcggccggaacgctcctgattggtgatcgaaccctgcttgagttcgatggagaagtcgcgcggcagcgcacgcacgccgcgatagtcggtggccgccttgagtacgccggccgaaaccgccgcgtccgccgcgatcaggttggcgcggtccttgttgaagtcttcggtgtacgtgcgtagaagttcgggtttgatggcccgtgcgctggcgtctgtcgtcatgatgcccctgtctgatgctgatgatgctgatggataatccgttgccggcggcggggactgtcaccatccgggccggcggactgctgacacgaaagtataaggcatgtccagcaaaggctcaggaaatacaaaattaacaaacggatgtttgcccaatatacagtaagtgttttcgcggttttccgtacaggaaaaagtcggaaaagtcaatacccatattccatatattgaactcaatttgtggttttgagcggggggggggtatcacttcttcagttatctgggaggtggttgggtgttcaagtacatcatcaagcgcattgtgaactacgtgatcatgctgttcgtggcagtatcgatgacgtatttcctggccagcgcattcatggatccgcgttcgaactacatgtcgcgcaatccgcatccgccgatcgcgtcgattaaccggtcgctcgatctggccaacatcaacgaccagacgccggtcgtcatccgctatttccgctggctcaagggcatcctcacccagtggaactggggcctgagcccggaccagtcgccggtggcgccggccatcgcctcccgtatctccgcttcgctgcagctggtgacgctcgccaccgtgctctccatcctcttcggcgtgagcatcggcgtgtacacggccattcgccagtacaagtggcaggaccgcgtgctcaacaccaccgcaacgttcttcctggtggtcccggccgccgtcatgggcctgatggtggtgctgctggccatcaacttcaacaacatcgtgggcagccgcgcgttctacgtgaccggcctgcactcctaccaaggctccaacccggtgctttgggtgtttgactatctgcagcacctgatcctgcccaccatcgtgatgacgattccgggcatggtgggctaccacctcacccagcgtacgtatctgctcgacaccatgaacgccgactacgtacgcaccgcccgcgccaagggcctgacgctcaacgcggccattcgacgccacgcactgcgcacctcgctgattccgaccgccgtggatgtggccttctccatcgccggcgtgttcaccggcgcggtgatcaccgaaaacgtgttcgccatcaacggcctgggcatgtacttcacccagaccatcgccaacaacgacatcaacggtgccgtggccgtggccgcgttcggtggcgtgtgcacgctgtccggcgcgctgctggcggatatcttctccgcctggcttgacccgcgtatccgactgagctgagccccgcgcaaaggacgatctaacatgatgaacgacaacgaaaacatggtctccgacgccgccgcccaggatatggaactcaccgatccgcagggcagcgaaccgcagtccgccgacgccaggaacgcccaggaggcttccagcgccgacgacttccaccgcaccggccgcatgcagctgtacgtgcgccgcttcatgcgccgcccctcggccgtggtgggtctggtggtgctgattctgctgattcttttggcgattttcggctcgaaattctcccagtggagctacgatgagcccgatttcgccgccctcgcctcgccgccgtccgcccagcactggctgggcaccacggtcggtggctcggatatgtacgcgatgatcatccgcggcctcggccgttcgttgaccatcggtatcttcagctcgttcggcaccacgatcatcgccgccctggtgggcacggccgtggcgttcttcgaaggctggttcgagcgcgtgggcatgtggctgctggatatgctgctcgtcgtgccgtccttcctgctcatcgccctgatcgtcggcatggcggccggcggcagcgactggctgtggctggccatcggcctgaccgcattcggttggatcggctacgcccgtacgctgcgcacgctgaccctgagcctgcgcgatcgcgaatacatccgcgcggcgaagttcatgggtgtgccgtccttcaccatcatcgtgcgtcatctggtgccgaacctgggttcggtgctggtcatcaacaccgtgctcggcgtgatcggtgcggtcaacagcgaaacctcgctgagcttcctgggcctgggcatcaaggcgcccgacacctcgctcggtacgctgctcaacgccggccagtccgtggtgcagacctcgccatgggtgctgatcttcccgtccgtggtgctggtcgtcctgaccttctccgtgcagctgatcggcgacggactgcgtgacgccatcgacccgtactcccgttctggcggcaaggccgagtgagaggggagacgggcatcatgagcgacgaacgcaacgcaagcaacgtaacaaccaacaccaaccccaacaccacaggagcgcaaggcatggcatccgaaccggtgatttcagtacgcgacctcaccgtcagcttcgcctccgaagccggcaccgtgcacgcggtgcgcggcatgaacttcgacctgtaccccggcaagaccctcggcatcgtgggcgagtccggctccggcaagtccgtgacctccatggccatcatgggcctgctggacaagaacgccagcgtcaagggctccatcacctaccacggcgaggaattgctcagcaagtccgatcttgagatgagcgagatccgtggcaagggcatcgccatggtcttccaggacccgctctccgctctgaccccggtgttctccatcggcgaccagatcaaggaagcgctggtcacccacaatccgaagatgaccgaacagcagattcacgaccgctccatcgagctcatgaacctggtcggcatcccggacccggaggaccgcctgaagtccttcccgcacgagttctccggcggcatgcgccagcgcgtgatgatcgccatggccattgccaacgacccggacgtgatcatcgccgacgaaccgaccaccgcactggacgtgacgatccaggcccaggtgctcgaagtgctgcgcaaggcccagcgtgaaaccggcgcggccgtcatcttcatcacccacgatctgggcgtgatcgccggcgtggccgacgacatcgtcgtcatgtacgccggccgcccggtcgagaaggcggacgtcgactccatcttcgaccacccggccatgccgtacaccatgggcctgctgggtgccgtgccgcgttccgaccgcgaacgcaacagccgcctggtgccgattcctggctccccgatgaacctggtcaacatgcccaagggctgcccgttcgcgccgcgctgcccgctggccaccgacatatgccacaccaccgagccggccatggagccggtgccgggccgcccgggccagttcgtggcctgccaccgcacccaggagatcgtggacaagggcctgaccttccacgacgtgtacacggtggccgaggccgccaagtcgaagttcgccggcatcccgcgcgacgaacgcaagatggtgctcgacgtcaagcacatgcgcaagaccttcccgctgaccgccggcggattcctgcgccgtaagatcggcgaggtcaaggccgtggacgacgtgacgctggacgtgcgcgaaggcgagaccgtggcgctcgtgggcgagtccggctcgggcaagtccaccacgctcatggagatcatggagttcaagcagccgcaggacggcgagatcgagatgttcggcaccaagctcgaacacaagattccgcgcgagaagcgccgcgagctgcgttcggccgtgcagtatgtcttccaggacccgatgagttcgctcgacccgcgcctgccgatctacgacatcctggccgagccgatgaaggtccagcactactccaaagagcagatccgcgaacgcatcggtgaactcatgcgtctggtggagctgaaccccgaccaggtggaccgcttccccacgcagttctccggcggtcagcgccagcgcatcgccatcgcgcgtgcgctgtcggtcaacccgaagctcgtgctgctcgacgagccggtctccgcactggacgtgtccatccaggccggcgtgatcaacctgcttgaggacctgcagaacaagctgggcgtggcctacctgttcgtggcccataacctgtcggtggtgcgccatatctccagccgcgtggcggtgatgtacctgggccgcatcgtggaatccggcgacaccgaagacgtgttcgagcacccgttgcacccgtacacccaggcgctcatcagcgccgtgccggtgccggacccgaaggcggaacgcacccgccagcgcatcgtgctgcagggcgaggtgcccagccccaccgagacgttcgaaggctgcccgttcatgggccgctgcccgctcatgcccaagctgagcgccgaacaacaggcccgctgccgcggcgaacgcccggcgctgcggccgtatgacacttcccgaccgagcggccatcaggttgcatgccatttcgcatgacggtcggaaccatatagaggaggaaataacaatgaacaagacacgtaagctgaccgcgctcgccgcggccactgcggcgcttgccatgctgcttgccggctgcggcgcgggcaatggcaacggttccagcaatgcctcgagcgccaccgaaccgccggccggcatcgattcgtcgtacaccggcgacctgcccatgccgaaggtcaccgagcgttacgacaaccaccagagccgtgacaacgtcaaggacggcggcacgctgaccctgtccatcgtcgaagtcggcccgaactggaactacctgtcttccgacggcaacaccggctacatgtccgagctgtggagctggtaccagcccagcctgctcatgaccgaccaggtcaatggctccccgattaaggtgaacccggacttcctgaccgacatgaagctcgtgagcaaggacccgatggtcgtgcagtacgacatcaacccgaaggccaagtggaacgacggctccgacatcgactggaccgccttcaaggccacgtgggaagccaacaacggctccaacccggactacaacccgccgagcaccgacggcttcgaccgtatcgctagcgttgagcagggcgacagcccgaagcaggtcaaggtgacctacaagaccccgtactacccgtggcaggaagtcttcggcgctctggtgaacccgaaggccgccgacccgaagaccttcacccagggctgggtgaagaacccgcacaacgagtgggccgccggtccgtacaaggtcgactccttctccgactcccaggtcaccttcgtgccgaacgagaagtggtggggcaacaagccgaagctggacaagatcgtctacaagcagatggccgacaccgcctccctcaacgccttccagaacggcgagatcgacgccgtggaggccaacaccaaggacgacatcaaggccatccgttccgtcaaggacgcccagctgcgcatcggctacagcaccaagacccgcgtgctggagtacaacagcaagtccaagccgcttgacgacctgcaggtgcgtaaggccatcactcaggccttcgacgtgaacacctacaacaacgtgcagttccagggcctgaactggaaggccgagcagccgggctccgagctgctgctgccgttccagaagggctacgagaacaacctgcccgccgaggccaagtacaacgtggacaacgccaagaaaacccttgaggccgacggctacaagatgggcaaggacggctactacgccaagggcggcaagacccttgagatctccttcactttcttcggtgacaacgccacccagcaggccctcgccaacgcctaccaggcgatgatgaagaaggccggcatcaaggtcaaggtcgtgaacgtggccgagtccaagttctccgacaccgtgtcttccggcaactaccaggtgctgccgatggcttggcaggctccgagcgccatgaccttcgtggtgtccgccccgcagctgtacacctccgacggcccgtccaacttctcctacgtgggcagcaagaagatcgacgagctcgtcaagaaggctggcagcctctccgactatgacgagcagaccaaggccgtcaacgccgccgagaaggaagccctcaagctgtacggcaccatcccggtctccaacccggcttcgtacctcggtgcgaagaagggtctggccaactacggcccgtccggcttcgccggcaacctgccgcaggacatcggctggcagaagtgatgacgtctgactgacgtctgacatggccaccgcgccgggaacggccggccgcacgcatcgactgcaaggctttcgatgccggacgcggcctgcggcaggttcccggcggggtgtgaccgcggcagcatatgccttactctccttatttctgcatatgatgctgcggttgggaagcctcccatttgcgcgcttatgcgtcgcgcgcgaatgggaggcttttgcatacttgccgcgattccatcccggcaacgatttgtccaccttgctgcccgcgcggctgaaaccgtatccaccttcctcttcccggatttgtgacgctgacggttgccgagcgtcacaaatccgggagatagtcgcccttacttgttgtcagaacttggtgagcccggatttgcggatatggtcctcccagccatccggcttaggcagtgtgaccagttccctcattgtcacggcagggatcgcggccgccacgatgcacaagcccaaagccacggacgtgactgagtaaccccagtgttgcatggcgatgccggacagaaatgtgatcaccggggcagcaatcgtctcaatcatgcccatgccggcgaatacgcggcccatatgctccttgttgatgagcaatgattggaatccgttgattaccgcattgccggccggtagggccagcagcgaaattgccagaaacgccatacgcgcaagaatccacggagccagcgctgcgccgagcgcgccgatgctcatcagcacgtagaacgatacggcgactatgccgccgcgcacatgctgaaccagcacggaagagatgagcgagccaacgatgacgcccacagacacagaaacgttcatgaaactggctgacaccacatgtgatgggtcggagccgatcgagagcaccgtaatcagcaggaacgagttgaagcacgcgaacgccagcgcgctcgacaaaatcaggcgacgttcgaatcgctcgctaagaagccagcggaatccggaaaacatctcacgccaatactgtgacgcggatgatgtcgtggtcgttgcctgctcgtcagcggcctgagtgatgttggccgcatcgccattctcatcggcctcatcgtcggcaagggcgcggccctccgtattggtccgcccgccacgatgccagtattttgtgatccgcatcgccgccgcggtttccaatagattcagcagcgcgctgactgcgaatggcagccatagaccgccgccgatcaatacgccacctactggtgcgccggcgagttcgagggcggcatcgcggccatcattgaggcttgacgccttgggcagcaattgatcgggaacgatgcctcgtagcatcgtgttgctcgtggttcctaggaggcctgagcgtatgccgaggcatatcgcaagtaccatcagcaccgggtatatgagtaatcccgcccatcctagggccgcgcatatgccgaacagtgcgaaaccaatcaggccaaacgcaatcataagttttttgcggtcgtacttatcttgtaccacgccacctggcagccgcaataccgacgatatcatggtcatgattgaatccagcagcgtcgcctgtgccggtgagcccgtgacggtctgcgcgatgagtggcattgcgaaaccttggatacttgatgacagcgacgtgcatgaatccgctacgaaccatttgccataatccgtgccgcgccatagcgactcggtggtgttgctatgtgaattgtgaccgttgggctgtgttgaagattggttgttgactgttccgatgtaatcagccattgtgatcatctccgtattcatcgatgcttgagatattctattatgttcgtcttcaagcgccgcaccggactcacccccggccaataccgcgacgccttccccgcccgcctttacaacaccgtgtgattagggaaggtcagggtactaaccctgggaaaagtgcagtattctgcattactaaccctaggaaaaatgcaattttggacaattgcaaccctaggaaaaatgtagaatacgcgaattgcaaccctaggaaaagtgtgtattgcggtataaatttatttttggccacatcgctcgtggcgctcgggcggcgcaatatgaatccgcgattcagcagattgtcgattctggtcttgcgttgcgggtgtatcgcgtcgaaaaacctgcggcaccattgccgtcataccgtgatgattccgcgttcaaactgtatctccatgatgttgggctgctggcagcggccctggatctgactcccgcaagcgtggtccttggtgatgacgggctgaccgaattccgtggtgcgttaacggaacagtatgtttgccagcaattagtggccgccggcatcacaccgatgtactggtcgaatgcgaacagtacgggagaagttgattttgtctttgcaggtaatggcgcaatcattccgttggaggccaaagctggtaccgagcgtcataagcgtagcttgaagtggctgtgcgacaaatacgggatttgcggttaccgtacgtcgatgcggaattacaaggagcaggattggctgaccaatgtcccactgtggatagtcgggagctgcttccgcccgtggttggcgagtgattatgagccggatggcggagctgatttaggaccgctaccgaatactgatgatgaaggatgactgaagccgcgagatatggttcggccggttgctgacttgggatatggtccgcgaccggccggcggtcgaatccgtcatgccgcggtgcgcaccaccgtcacgccgtacggctccagcaccagatccctgcccagtaccgtgccgtcaagcaccgactcgcatccggcgaacggcgtatcctgccacgccgtggccgtatccgcatggttgatcacgaacgtcaacgactccccgcgtgacgggtaccgccgcgtaaccacctccaccggctccggcgagacgatgccggtaacgccggcccggcgcaccacgtcgccgaccacggcgtccatgccggcctcgtccagcaccgcaccggcgaaatacgccgtgcccgcgccgaaatcgttcaccgtcaccgccggcgtaccccggtagaacacgtcgccggcgtaggccgccagcgggcgcgccccgccgtcgagcttgatcagcccggcaaccagcgagacccgggacccgtccgtgtccgcgtcctcgccctcgcccgaaccgaacacgacacgcacgtcgcggccgtccgggatcatgtccatctcctccatgcgcattccgcacacctcacggaacgcgcccgggtatccgccgaggatcacgttgtcatgctcgtcgtgcatgcctgccatcaccgtcgccaggaacgtgccgccggcgcgcacgaacccctcgaccagctcacgaacgcccggcttggccatcatgagcgccggcgcgaccagcacgcgatagcccgccagccgcccggcgtcaatgtcttccggcaccacatccaccgcgatgttgcggtggtggaacggcgcataccagcgccgcacctgatccggatagtcgaagcccttcggcagcaacgagatgttctcggtcgaccaatacgaatcccagtcgaacatcagcgcgaccggcgcctcggtcagaccgcccacgaaccgcgcgccgtgcgccgccagctcgccgccgagcgcacgcacctcgccgtacacgcgctcgtcctcgcgcccgccgtgcgagatcaccgcgccatggtacttctcgaacccgccgcgtgactgcttgagctggaaatactgcacggtatccgcgccatgcgcgaccgcctgatagctttccgcacgcatccgcccgggcgcgcgcagtacgttgcactcctgccagttcgtctggttcggcgtcgactccatgagcatgaacggcctgccgtcgcccacgccgcgcatcagatcgtgcttgaacgcattgtcggaaggcgtggtgtgcgggaacggataatcgtcccagctgatcacgtccatctcgcgcccccaacggaaataatcggcaccctcgtaggtgtccatgaggttcgtggtgatcggatgcatcgcgtcgaacgcgcggatcgcgtcgcgctcggtgacgtaggtgcccagcagcgagtcggactggaaccgcttgtagtcgatgctgcaggcggacagagtggcgcgctcgccgtccagtccgtcgctgatcgcgttcggcggtaggatctgggcgaaatcggcgtaggtatggctccagaagttcgcgttccacgcgcggttcaacgcctcgatcgaaccgtacttgcgttcgagccagacgcggaaggcggcggcgcagttgtcgcagtagcagcggccgccgagctcgttggagatgtgccaggcgatcagatggtcgttggcgccgtagcgttcggcgagcttgccggccagcgcgccggccaggcgcaggaagttcggcgaattcgggcaggcgttgtgccgcacgccgaagcggtggcgacggccttcgtagtcggtgcgcgtggcgtcggggtagcgttgcgcgatccatgcgggtagcgcgccggtggacgtggccaggacgaagccgaagtcgtgcgcgaccagcaggtcgacgatgcggtcgagcatggcgaagtcgtagcggctctcgtccggctggatcagcgcccaggagaacacgttgatggtggcctcgttgatgccggcgcgttcgagtttggcgatgtcgtccgcccaggtggattcgtcccactgctcggggttccagtcgccgccgaagacgaagcggccgcccggtgcggtgatggtcggtgcaggcgatgcgggtgatgcgggtgatgcgggttgggtgtgtgccatggtgtcggtcatgatgcgtactcctttgcgatgacgatgatgcggcctgcggccggtctcggcgttgtggccggcgtgcggcggactcgcgttggggtggttcggcgtcgcgccgtcgggagcggcggtccctgtgtgtggtgacgttgccccttcagcgttaaaccgatttaattcctggtggccattatgtacgtcgaggttgtcttcgtcaaatggatgattgaaggtgtcggcagctgctcggtgagatgctgaaaagcccataaatacctaaggaggacgccatggcggtgacgatgcgtgatgtcgcgaaggcggcgggtgtctctcctgcgtccgtgtcgttcgccctgcgcggcgatcccagaattaaacaagaaacggcacggcacatcatcgacgtggccaatcggatgaactattcggtcaacatcactgccaagagcctgcgttcggggcgaaccggcgtgatcgaggccgccgttttccagcttgaccggccgttctacgcgcagctgctcgccggcgtgtcgaatgcggcgttcgaccgcggcatccaggccgtggcgcagcagatctcgaccggcaaggtcggccatgagaaaagcatcctcgagaaggtcgccaacaagttctgcgacggcgtgatcctgagcgcgggcggcctgagcgacgccgagatcattgagctaagcaggggcaagccggtggtgctgctcgatgaccagtcgtaccaagggccgttcgactcggtgttcacgccgtgcgagaacggcgccgaggccgcggtgacgcacctgttcgagatagggtgcgagcgcgtcgggctggtcggtacggacttcatgccggccgaccaggcgcgccggtcgatgcacgtgggcgatcgacgtctgatcggctgccatcgcgcgttcgagcggcatgagcgcacgctgaccaaggccgacacgatccagctgttcgactgggacaccgacgacgcgtaccgcgcggtttcgcggcgcatcgaggagggggacttcccgttcgacgggctgttctgcatgaccgacgcgatcgctttcggcacgttgcgcgcgttgcgcgagcatggcatcggcgtgccggacgacgtggcggtgatcggcttcgacggcgtgcgcgagggatcgtacagcgcgccgacgctgagcacgatcgcggtggacatcgacaagcttgcccgcgaggccgtcgacatcctgtgcgagcgcatcgaggaggggcgttacggcgcgccggccatgcccaagcatgtcacggtgggttatgaggtgctggtgcgcgagtcgtccaaccgcacgcgctgaccggtcgtccggcggctgttcgcggtggatcgccgatcggtgggacaactcgcggcgttttttgtttaattatttttcgttgtccggtgcgattccgcgcgttccacagcccttgtgtttaaaaggttttgtaacgagttgacgccgtttgagcggagtgctataaatacaactacaagattaaatcggtttaaaaccgggctcttgcacggaagacaatgtggttttttcggcatacaacatggcgtatgccaccgacacaaaggagagttgcaatgtcaatgaagatctggggcaaacgaatgctcgctttggcctgcgcgggagcgatgctggtcccgctggccgcctgcggctcggacgccgacgccggcaagatccggctcagctacctgagctgggacaacgagcagacgtccaagccgtacatcgacgagttcgagaaggaaaacccggacatcaagatcgatttcagctacgcgccgccgaccagcgagtacatctccacgctgcagacccgtctcgtcggcaaccaggccccggacgtgttcatcatcacctccgagaatcgcgacgacctcatcgacaacggctacgccaaggacctgaccgacgagtcgttcatgaagaacatctcccaggccaacaaggacttcgtcggccgcgacggcaagacctacggcatgtcgatcatctcgtgggtctccggcatcgcctacaataaggatctgctcaagcaggtcggctacgacgagccgccggcgaactgggacgacttcctcaagctgtgcaagaagctcaagaacgccggcatcgagccgttcctcgagccgaacgccgacgagccgagccgcttcatcgacgccttccagggatccatcctcgagaagaagggcgtcgacccgaccacgctgtccacgcaggacaaccagacgccgggcaccgacgagcttgaggccgtcaaggaatacatccgcctgtacgatgagggtggcgtgacccgtgacacggtcggcatcagcggcgacgacatgaagacgcagttcaccaacggacaggtcgcgatgatcgtcgacggcgcgtgggactttgccaccttcgaacaggccggcatgaactgggacttcgccccgatgcccaagctcggcgacgactacacgcagtacgcgcagggctccgcctccccggcgtgggcgatctacgcgaagctcgacggcgacaagctcaaggccgccgagaagttcctcaccttcctgtcaagcaagtgggcgctgcagaagcataacgacgccggcgacgctgtcactgtcgacgggttcgacgctacggtgatgacgcagtaccagaaggtctacgatcaggacatcaagaccggcaagtactacctgcacaccaacttctattcgaagccggacattctcaagagcgaactcaaggcgcagaaccagcagctggtgcaggggcagatcacgcccgaccagtatgccaagaacatcgacgccaaggtcgcggccgcgcagtgacccgcaacggatcgcacataatcacacatagataactacaatctccggttcgtcatgaaccgtgcgcatggtaatggggcggcctgtcggctgcggctggtcgcccttcgcatgcccgcaatcggatttcggtcataagccaatgtcaaaggaggatggcatatgagcgcaacaatgcaaggctcggcggtcggcaacctgccgccgttggacgaagacctgtatcgtcggcgtcgtcgtgcgcgtggcctgcatgaggacgtgacgtcgttctggttcctgctgccgatcctggcggtgttcgtggttctgttcctggtgccgttggcacagaccgcgtacttctcgttcaccgacttcaacggttacagcatggacatgaactgggtcggtctggacaattacaagaaggtgtttacggatccgtccaccctgcagggcctgggcttcacgatcctgtacgcgatcgtggtgatggtcggggtgaccgtgatcgccattccgctggcggtcatcctcaaccgcaagttcgtcggccgtgatttcgtgcgctctgtgttcttcttcttctcggtgccgtcgctggccatcatgggcatggtgtggaagtacatcttctccccgatgaagaccggcgtggtcaacagcgtgctcgcggcgttcggtttgggaccggtgccgtggctgtcgaacaactctctggcgaagttctgcgtgatcttcatcgcgatctgggcgcagatcggctggcatgcgaccctttacttggcgttcctgcaggcgatccccgcggacctgtacgagcaggcgaccgtggacggtgcgaacaagtggcagcagttcgcgcatatcaccctgccgcagctgatgccgggcatcgtgacctcgacgttcctgctcatgtcgggcggcctgaaggtgtacgacctgccgttcacgatgaccaagggcggcccgggctattcgacgtacacggtcacgcagtcgatcatccagcagggcatcggccagtcgcagtacggcatcggttccgcgctggcggtcctgttcttcatcgccacgggcgtcgtggtgttccttcagatgggcatttccaacctgatctcgaggaggttcgagtaaatcatgggcaacaaggcttcttccgtcacggccgcgccgaagggcatgaacttcacgacgcgcaagaggatcggttcggcggtcaccagcgtggtgatgatcctgatcgcgctggtatgcgcggttccactgtggtacatcctgatcaacacgttcaagacgattccggacatgtccgccaacccgctcggcctgccgaaggaatggacgatcaagaactacatcaacgcgttcgagacggtcccggtgttccgctccctgctgaacacgttgatcgtcacgttcttcgcggtcgtgatccaggtgctcgtcggagccctggccgcatacggcatgatcctgcgcaagtccacgttcaccgccgcggtcggcgcgatcctgatggtcgcgttcgtcgtgccggcgcagacgacgctgatccccctgtaccgcatggaggcgaacgcgcacctggtcaacaccttggccggactggtgattatctacctgggcggagcggtgttctgctacttcctgatcgtcgggtacatgcgcagcctgccgttcgaactgatcgaggcggcacgcatcgacggcgccggcccgctgcgcatcttctggtcgatcgtgatgccgctgatccgcccgatcctgacgaccgtggtcgtgttccagacgatgggcacgtggaacgacttcatgaacgcgaatgtgttcctctccagctcggaactgcgcacaatcgtgctgcaggtgtacaacgcggtgggccagttctcgaccgattggccgagcttcatgaccatcaccgtgctcgccctgctgcccgtgttcgtgttcttcattttctgccagaagtggatcgtctccggcctcgtcgccggttcggtcaagggctgatcggctgatcgactagtcggctggctgatcacggtattaattccggctccccactacgctcatatcatctccttccgcggcgtgtggggagccatgttcttcaccagataggaatttcccatgggtactgttggcactgtgctacaaacaccgccaaaaccgagagccgtgcctcgtgacggccttcctcatcgcgtgaataacgcggtactgaccactaatccgctgcgcaggtattgcgccgacccgaatcttgccattttcgatggccgatatttcctgtactgcaccgatgacggtgtggataattgggacactaccgcgttcagtgtgtatgtgtccgacgacttggccacatgggagcgatatccggcgctcgacttgcgcgacgtgccgtggtgggatggctcggatggtgcttgggcgccttccgtggtacagcgcgcggacggcaaatacgtgttctacttcgtggccggttcccagatcggcgccgctgtgggcgaatccccgtgcgggccgttcgtgcctgagcccgaaccaatcgtgcgcgaaggtacgttcgattgccacaccattgaccccggcgtatacgtggaggatgatggcacccggtacttcctgtggggcaacggcatagcttgggccgcgccgctcaatgaggactgtctgtcgttcgacgaatcgcgcgctttcagctgggtgccgggcgatttccgtgaagccatctggattcacaagcgcaacggcatctactacgccagctggtcggagaacgacgcccgagagccggaatactgcgtcaagtacgcgatggccgaatcgctgcatgggccctggagcgaaccgcgcgtgctgatcgaacaagacccggcgcgcaagctgtatgccaccggtcaccataacatcgtgaatattcccggcaccgacgaatggattatcgcgtatcaccggttcgcctacaatccggccggtcgctgggctggaggcgatggctgtcatcgcgaagtggtattcgcgccgcttgactacaatcctgacggctcgctggttcccgtccgcccgcaagttggttcctacgtgcgttcgctgacgttctgacctgtaggctgtctgtctctgtctgttcgttgtcttcgccttgcttgcgtttttgtacgttttatctgtttcgtgagtttcgtgcgttctgcggatttcacgcgtttcgcgcagtgccgtacgctgatcaccattcagcgtgcggcacttttgcatatctcacgtgttgcgggagatgccgattccgtcgcacaatacgtaaaacgtgaatgaaccattcactattcttgtgttttttgtgactcaaagtgcgttttgcatatgtaaaaacgtgaatgctaagatgatatcagtatgtgattgtgtgatgacctgcgtgttttcagtcattctctacaaaagaggagggaaatatgctcaagcgccatgcatatgaccggttgctgacttggaagaaccgtaaaaccaagtagggcttattggtcacgggtgcccggcaggtgggcaagaccacgctgattgggcagttcggtgcagaccattatgagcatgtggctgaggtgaatttcatcgaaatgcctcaggcggtcgaaacggtaagcaaggccaaggacaccgaagacctgatactgcggttatcggtactttccggcgcggaaattacgccgggcaagactctgctgtttcttgacgagatacaagcgtgtgaggacatgcctacgtgttccatgatggcaacgcggagactgttggacgagtcgaatacctgcccatatacatgctgggttgtttgagcgtgatatgacatgcgccactttcccgggaatgtgtcacggattgggtctgttgcccggtctagcggttcggtccattgacccagcctgttacttcacccttaccgtccgcaatggagtgaaccgactaatccatatccgcaaaatcgacaagcgtcactgtaccgtcttgcgccgcgcgggcggcgacatgctcgtcgaagcctgatttggagaacagcatgtaatggctggtttcggggtgcagcagtctggcgcgattgcgcagcacttccaactgctgcagaccggatggcacgctgcgccatttgcattcgcagaataggagagttttcggttgttctcctgaagccacgatgtcaatttcctcctgactgcgggtggtcggattggcgccccaccaacgtccggcatcaagcatgaggaaaggcaatgcctcggtaccgttatgggaccatatccactgaacgcagatgtcttcgaacacctgccccataaagtcggagatagtgcgcataacacggtcggcggcgagatcggcatgaccggattgaatgagggacatgttgttcggcacatatcggtaccagaatcggaagaacgagtcctcgatacggtagatcgtcttgcgaggagcgtcctcgccgaaaggtgtctccttgcgaacgattcccagatcgatgagattgcgcaaataggtggcgcatgaggacgattccatatggcatgcggtggcgatggtgttcgaccgagatgccccggaggcaatggcctggattacggcgttgtactcggccggactgcgcagctcctgcttcagcaagttgtctggctcctcaaacagatagcagcttggatcgaggatgttccaacggatgttgtctcggatgctgatgccgtcgtccagttgccgaagatactgcgggataccgtcggtaagtccgtaagcaatggcggcgtcctcgttgctgtatcttggcaagaacttgcggacatcggcgtagccgaatggctccactttgatttgagcggtgcgtctgccgtacagggggttctcatacccaagcacctggcgctccatgaacgacatggaagagccgcataacaccatcatgagctgactgtcatccttatggcggtcgatggcatgctgcaggaccgaattgatggtccggtctgctttagccagatatgggtactcgtcgatgacgaaggcgatgcgttgctttgcggccagcgcgaacaccgcttccagtgcggattcaaagctgcggtatacgggcgttgtctcgaacgcctctgagcccttttcatacagagcaatgctgcggcttaacgattcgagattcttggaagcgctggattcgattgccgaaaagaaaatcgtggggcgatcttcgaggaagcggttgatgagtgtggtcttgcccacgcggcgacggccgtagaccacgacgcactcgaactgctgtgagctccagcggcgttccagtgccgaaagctccttatctcgcccgacgaacatggcccttgtctccttgctttgctgtctgccctggcacacatgcgcaaattatagaatcgtaatttacttaattatgattctataatttggtcgactggtatgcaacaggtctcgagcgtgcattgccgcatgcgcaacgtttcgcgcgacacattccggggaatgttgcgcttagcgggccgtgccgcgttgctaatgcggggaacacgcagagttgtgggctgttgcgattggacgcaggccgtctagactagtacgcgtttgcgaaagtcgaacgtgcttcgaccgatgaaggagagctccggtcgtgcggccaatgacaggcgcagtgcgaagcacggctgatcgtgaatcgtggcggcagcgattgccgcgtgcggcgcaggagcatgccgcaccataccataagcaaacaatccccaagaaacggtgatcccctcacatgtacgtcgatccgggaatcaataccagcgcaagcaacctcaaatgggtgctgccatactgcaaaccagacctgccccgcgtggcaggcgcgctcctactgttcatcgccaataacacgatggccctgaccattccgattctgtccggtatcatcgtggaccgcgtcatcgtcggcggacatgccgacgaactgccacgtctgtgtggactgatgatcctcatgaccatcatccgcgtgggcgcgcgatacggctaccagatgtggatggagcgtttcggccagaactcggtctaccgcctcgtctccgacgaatacgagaagctgcacgagctcgacttcacgtacttcaaccacacacgcaccggcgacatcatgagccgcctgacctccgacactgacgcgatccgccactgcctgagttgggtgagctatcagatcgccgactgcgtggtcatgttcatcggtgccctgtgcgtgatgttcgccatcgattggcgactcgcgctcgtcctggcctgcgtcacgccgttcatttttgtgctcacgcgcggcctgtccacgcacgcccacccgctgttcttcgccatccgcaactcgctggcctccctcaactccatggtcgaagagaacatcgagggcaaccgtgtggtcaaggcattcgtgcgcgaaccgtacgagaccgaaaagttcgacgagcacaacgacgactacatgcagcgcaacatggccctggcctacaactcgcgcaggtacatgccctggctggacggcctcggcttctcgctgcagctcatcacgctcggcctcggcggctttctggtcatcaagggctacatgaccctcggcaatctggtgagtttcaactccttcctgtggatgatcgacggcccggtgcgccagtccggctggctcatcaacgactggcagcgattcaacgccagctgcatcaagatccgcaagctgctcaacgaacagccgcgcatcgtggagaagcccgacgcggtcgaagccgtcaagcaggcggtcacgatcgtcgagcaagtcaagcacgatgatgaggctaccggagcgcccggggcttccggaacatccggtgcccagcagtccgccgaacgcaagtcctgcccgctgcacatcaagggcgacatccgcttcgaccacgtcagcttcgccttcccggacgacccggagaccccgatcctcaaggacctcgacttcaccgtgcccgccggctccaagctcggcatcctcggcgaaaccggcgcgggcaagtccacgctcgtcagccttatctcccgcttctacgacccgaccgtgggccatgtgctcatcgacggcatcgacgcacgcgactggccgctgaccaccttgcgctcgcaggtgtgcatcgtggcgcaggatacgttcctgttctccgacaccatcggcggcaacatcggttttggtgccagcgatgatagcgacgaccgatatatccagaaaatggcccagatcgccggcgcggacaatttcatcaggtcgatgccgcagggttatgacaccgtcgtgggcgaacgcggcgtgggcctgtccggcgggcagaagcagcgcctgtcgctggcccgcgcgctcgcggacaatccgtcgatcctgattatggacgatacgacctcggccgtcgatatggagaccgaggcggagatccagaagcacctcaaggagatggacggcggcaagaccatcgtcgccatcgcccaccgcatctcgtcggtcaaggattccgacctgattctggtgctcgagcacggacgtatcgtcgaacgcggcacccacgccgaactcgtggccgcacacggccgctactgggacatctaccacaagcagctcggactccagtccggcgccgcacaggggttttagaagaggacttatggcacaacgcaatacattccgcgaggatgaggagctggaggagtccatcaacctccacgacatcgctcgcgtcggcaaatatctcaaaccgtatatggcacaggtggcgcgcattctcgtcgtcgtcatctcgatgagctgcatcgtcgtcgccgtgccgtacctgaccaagatcatgatcgacgaggcgatcccgaacaaggacctcggcaagctcggcatcctcgccgtaatcctcgccgcgctgatcgtgctgtacgagttcgggctgcgctaccgcacggtggcgatcacgcgcgtcggccagctcatgctcaaggacatgcgccgcgatatcttcacgcatatccagacgctgcccttcagctacttcgattcgcgcccgcacggcaagatcctgatccgcgtggtcaactatgtgaacacgctttcggacacgctgagctccggtctgatcaacgtgatctccgacgtgttcaccttcgtgatcactctgatcgtgatgttcgtgatcgactggcagctggccctgtggagcttgatcctgttcccggtgctcatcatctgggtgcgcgtgctgcagatcttccagcggcgcgccttccagaagctctccaacaagcagagcaacctgaacgcctacatccacgagtcgatcgccggcgtgaagaccacgcagaccttcgcgcaggagcaggcccagttcaggaccttccaggagcagcagggcgaggtgcgttccgcgtggatgcacgccgtgcacatccagttcctcatgtggccgggcgtgcagaccatctccgtgatgaccatctcgttcatctacttcgtcggcgtgatgggcttcgggggcgtgaacgtgaccaccggcgtgctcatcgcgttcgtcggctacgcgaacaacttctggaatccggtgatcaacatcggcaacttctacaaccagctcatcacctgctcggcgtacctcgagcgcatcttcgagacgctcgacgtcacgccggagatccgcaacaagcccgacgcggcggacctgccgcagattcgcgggcgcgtcgacttcaacgacgtggtgttccgctacgagaaggacggccgcaacatcctcaacctcgtggacttccacgtcgaaccggggcgcacgatcgcgctggtcggcccgacgggcgccggcaagacgacgatcatcaacctgctgtcgcgcttctacgacgtgtccgagggctcggtgacgatcgacggccacgacgtgcgcgacgtgacgctcgcatcgctgcgccggcagatgggcgtgatgctacaggacaccttcatcttctccggcaacgtgcgcgagaacatccgctacggcaagctcgacgccaccgacgaggaaatcgaggcggcggcgaaggccgtgcacgcgcacgagttcatcatggaactgcccgacgggtacgacacggtggtggaggagcgcggatcgaccctgtcggccggccagcgccagctcatcgccttcgcgcgcgtgctgctcgccgacccgcgtatcctaatcctggacgaggcgacgagcaacatcgacacgcgcaccgaggaggcgatgcaggccggcctgcagcatctgctcaaggggcgcacgagcttcatcatcgcgcaccgcctgtcgacgatcgagaacgcggacgagatcttctacatcgatcacggccagatcgtcgagcacggctcgcacgcgcagctgctcgccgccaagggcgcgtactaccgcctctacgagtcccagtacgcgatgattcgcgtggccagcggagcgccggaagagtgacgagatgttgcgcacaaggatgcgtttagcggcgtttcacatagcgggtgctgcgaccggcaccgattttgatgatcgtaccggagtccaacagtgatttcagcgtgcgctcaatggtggtggtgctggtatcgggcatgcgagcgagaatatcggccttggagagtggaactagggatcgatcaagcagtgcttcaatccgcattcccttggtggctactcgcggtgctccctgcgctctgccgcctgccgtgagattgatgcgttcgtcgaattccttgcacgcggacagtatgatgccaagcaggtagttcgtgaatggcgcataatcattggcgttgtcgtcccatccttgggtgcttgcggccagcgcctcataataagtgcttttactttgctcgataaggtgttcgatactgatgtatttgccgaccatatagccattgcggtacagcatcaggagcgtgagtagccgactcatgcggccgttgccgtcattgaacggatgtatgcaggtgaaatcgagaatgaacatggcgatggcaagcaatggatcggtatgttcatctcggattgcttgcgtgtaggcggaacacgcgcgttcgatcagtattcgatgtagtcgaatgatctcatactgcctcattttctgcatcatacgaacttttctgcatcatattttatcaaaatgaggtagaaaatgggctgatgaggcagaaaaggcggcaggatggtggccatctcgcttgccggttgcgctactttcccgggaatgttgcgctcgtggcaagagacggcaagttcaggcggccgagattggcgatacccgtcgtgtagtcgaacgtcttaccggactgccttacgagcgttgctgacggtagcctacactgagaaacagcctacactgagaaaccatgagcaagcaccaccatcgcgaccgtagctgggccccggcacctgaagcattgccggacgacgcccagaccatcgacaaccacactcacgtggcctccgtaatccctttcgcgcgcgctatgagccatgaggcgcaggagaaggggcagcccgaagtcccggtgtacgacgtcgaccaattgctggcgcaggcacaatctgtcggcattgggggtatcatcgactgcggttgcgagctgccgcacctgatgaccgccgtccagatggccctcgatcatccaggtaacgtgcacgcggcgctcgcaatacaccccaatgagtccgtgctccacgggcatcgcggtgtgccggggccggatggtctgcccctcaaatacaagccttaccatgacacgtctttcgaggacgcgctcgccgaagtacatcgcctcgccaccacataccccgagcaagtggtggctatcggcgagaccggcatggacctcttccgcaccggcgaaggtgccaaggaactgcagcgcgaggctttccgcgcgcatattgccctggccaaggaactgggcctgcccatgcagattcacgaccgcgactcccatcgcgaggtcatcgaaaccctgctggccgacggcgcgcccgaacgcaccgtattccactcgtattccggcgaccgtgagatggccgagattgcgcgcgaacatggctggtacctgagcttctccggcaccgtgagctacaaaggcaatgacggtatccgcgaatcgctgcggattgtgggtctgggccatgcgatggtcgaaaccgacgcgccgtatctgacgcccatgccgtaccgtggccgcaccaacgcgccgtacatgatcccctacaccttgcgggccatggccgatacgctcgacctgtccatcgcggatgtggcgcgcggcacccgcgataccgcccgcgccgtatacggactgtgagggccgggtgtgcggccgtcgcggcgatgtgttgacttgtaaaatttgtcagaattgtgaacgaggtctaccatgatgtacctgacataagcgagggggatgatctccacctcaatggaggactgaacgtatggctgagtcgaaccaaaggaccgcacgcgcccaaaaagcctcaaaggcccagacagcccaggctggcgccgccaaagccaaggcccgacaggaagaagaagcactgctgagggccgacacctttaccaacgctcccaaggtgtcccgccgcactctcaccaaggaggagcgcgaggcactcgccaagcagagggaagccgaaaccaaggaagccgagaaaatcgccagcgcatggtcgaaaggcggcctcggccgatggtgggcccgcttgcaatccagcccagacaaggttacctggggcatggcgatcgtggcgctcggcgtggtgtacggcgacatcggcacctcgcccctctacaccgcgcagaccttccttgccggtcagggagggcttggcagcgtaaaccgagaggccgtgctcggcatgctgtcgctggtcttctggtcgattacgctgatcaccaccgtcaaatatgtgctcatcgccatgcgcatcgacaacaatggcgaaggcggcatcttcgcactgtactcgttgattcgcaagtacggcgcatggctcgcgattcccgccatgctcggcggcgcggcattccttgcggattcggtacttaccccggcggtttccatcagttccgcagtcgaaggcttgcagaccctgccgccattggaagggttgttcgacgaaaacccaagcctgaccctgatgattaccgtcgtgatcatcgtgattctcttctccgtgcagtcgcgcggcaccgaaagcatcggcaaagtattcggctcgatggtgctggtctggttcagcttcctcgccatcgtaggcgtcacgaatctctctaacgactggtctgtgttcgcggccctgaacccggtgtacggcatcaaattcctgttcagcccggacaatgctgccggcatcgccctgatgggcaccgtgttcctctcgaccaccggtgccgaggcgctgtactccgacatgggccacgtggggcgcggcaacatctacttcacctggccattcatcaaggttgcgctggtgctcaactacttcggccaaggcgcgtggatgttggccaatagcgataacccgcaatacaccgcgatgaagtcgctcaacccgttcttccagatgatgaccccgaacgtgcggtacctggccgtgattctgtctgtttcggccggcgtgatcgcctcccaggccctgatcacgggcgcgttcaccatggtttccgaggccacccgcctcaactggatgccccatctgcaggtgcgttacccggcccgtacgcgcggccagctgtacattccggtggtcaacggcgtgttgtgcgtggccacgctcgccgtgctcgccatcttcaaggattccgaacacatctccgccgcgtacggcctggcgttgaccattacgatgatcaccaccaccgtgttgctcggcgtctacttatggcattccggcaagcgggtcggtgccatcgtgttcaccgtgctgttcttggcgattcaggctatgttcttcatcgcgtctatggccaaattcctgcacggtggttggttcaccatgttgctgaccgccgcgattctgttcgtcatgtacacgtggaatgagggcaccaagctcgaacgtgcgcaacgccgtcacatgcggcccaacgacttcctacccgcgctcgacaagctgcacggtgatttccgcatcccgtattttgcggacaacatcgtgtacctgacctccgactcggaaaccaagcgactcgacacggacatcttcttctccatcttcgccgaccaccccaagcgtgcccgtgcttggtgggcagtcagcgtggaaaccaccgacgagccgttcacccgtgaatactcggtggaggacttcggcacgaactacatctaccgcgtgcgcttccgtttgggcttcaaggtttcgcagtccatcccggcgtacatccaccagatcatgcacgacctgtccaaaaccggcgaactgcctaagcagaagtcgatttaccccaaggtcgacgccgatccggacatcggcaccatccgttacgtgctgattcacaaggccctgatgccggaatccaaggtttccgcacgcggtgccctgtcgttgcaagccaagtacgcaatccgccgcatggccggctcgccggttaagtggttcggtctggcaccttacaacccgctggtcgaggtgcagccgctgttcgtctccacccgccgcccaccgcgtctgaagcgcaccgatacggccaagaccatcacgacgcccacgccgactcgtgcagtggccgacccggccgccgtccccgacccgatggacaccacgtccgggctcgggcgattggtacaggagctcgatgccgccgtatcggccgaggagcggaagatcgctgagaccgctgccgccgctgcggtcgctgagcagggcgataagggcaaggccaagaacggcaaacccgccgccaagcctcagcgctcctccaaacagaagcgataacataccagtttgcagcggcgctgatgcgctctataaagaatggctataacggtcgccgcacgtcgccgcacggtttcggtaagttgaaataccatgtgcagattactgggatacgcgacggcaggtttcaacctgagtctcaacgccgtgttggggcaagacaatgtcgaggatttccgtgaactgtctgaaatccacaatgatggctggggtgtagcccagctttccgatcccgccgaagcgccgcacgtgcgcgacggtggcgcacccaccccggaaaccggcacccgaatctacaagtcgaccatcgcggcccgtcatgacagcacgtttgaggcgctggccgacgaaccgtctcgcggtgccatctggcacctgcgcttggcaagctccaatctgccgctcatcatggagaaccagcacccgttctatgcgaacggcctgagcttcatccacaacggcgatatctcggacgccaatggccgcaacatcgtcaccaaccgctcatacccggtgaaccacagcgtgctcctctccaccggcggccgttccgactccgctatcttcttcgcggtgattctggaatacatcggtttcggcttcccgctcgacgaggccgtggcccaggccgtgcgcgaactgcgccaagcctacccgaagtccagctacaactgcatgattcagtccgaggaccagctcatcgccctgtgcgccgccggtcgtgagaagaccagcccgcgcatcgtggaaatctacgatgagtacggccgtggcgagcaggccgccgactaccgtgtgatgcgctaccgtgagctgcgcgacgacaacggcgactccgccggtgtggtggtctcctcttccggctatgagcaggaaggctggaacgtgctggagaacgaccagatgatcatcgcctccaaccgcaacggcacctaccgtctccgttccatctgaaatagcttcataagccgtctctgacgaggggccttgagcctcaaatcatccgcatcccatacttctccgccaacgccggaatatccggcacgccatacttggccaccagatccagccatcgttgtttgttctctccgccaaatcgctcggctcgggccgtatacgcctcgacctgcaggaacttcggcggcactgacttgctatggaacttgtcggcgtacatcaccacttcctgctcgagattcatcggcacatagtcggctggtggcaatggcagctcctggcgcaccacatcctcgcgcgtaagtcccacgccggtatggttgcggcagaactgggcgatggactcgtccacgccctcgtcgagcagatactcgtagcccttaagaccgtgcagaatgtagcgtttcttgctgaatttgagcggttcgtcgtcagagccgtcatgcttgaacacgcggtaggtgccgatgtcatgcagcagtccgccgatgagtactaaatgctcgtcgagcagacgcggcggcacatggccgccggtgacgcctgcggtgggcggtacctccgcgtccttcggtaatgtgcagcggcgcgtgaacagcgcgttctgccggcgcacgatctggcagccgatggtcgccacaatcacgcaatgcgtgtgcaccagctcgtacgccgccttggacggcgcgattttgcggtgcaactcgtcgatctgctccagtgtgggaatatatccggtcatgattatcaggtttcgcctcgtacggtcagatttatcctcagattagcgcggcaatgagccgcatcaggattgtcaggagctgattcggacatctcgacatgcctatctccgtttcaaggggctgattcggcatcctcctgaggtctacttccgtttcaaggggctggtgcccaagtatacgcggcgtaaaaacggcggaatgacgttggcatgaagccgtttatactcggggtttggcggatgaccagccccttgaaacggaagtagacctcccggaacacgcaaatcagcccctcgaaatcgaaaaagctcacgatgtttggtatgtatccgaacatcgtgagcttcaagagcctgtgctggtgtgtctggtgtgtattgctgccggacagatcagatcttgaagagtgtgtcggctgcttcggcgatctcgcgtgatgcggtgagcacgataacgcaatgcttcgggtcgccggtgtgcgccagcttggccagcgcggcgaacacggtcacctcgtcatccgcgttcagccctcgtgtcggctcgtcgaggatcagcacttcggcctcggtgctgattgcacgggcgatggccaccaaacgctgctgcaccaaaggcaacgtgccgacggccacgccgctggtggcctcggagaagccgaccttggccagcagttcgcgggcgatcaccggcttgggcttcaggaagttgcggttggacgcatccatggcgtacagcacgttttgttcggcgtcgagattcggctgcacggcgtgcagctgcggtacgatgcccagacggtggccgcgcagttccacgggctcgagctcaacaatgttggcgctcttgttcatcaccgtgccagacaccggcgtggccaaaccgctcatcacgcccatcagcgcgcgacgtttggcgtcggcggtgatgcccgaatcggggtcgtcgctgatcagcagcgcgtatgcgtgtccggagtagcagaagaaattcgcgccatcgaggatgttgaccttgcccttggggccggcgaccgtcaccttgttcagggcaaaggtcgggtaggtcttgagcagaatgtcgtcggaaccgccgcccaccaacacgcgatcgatacgcgaggccagcgtcatggtgggatcggccgctttgccctgaggctccgcatgctcggccaatgcgtctttgtgatcggttttggccagtcggagtgtttcgttgacgcgggcggcattgcgctcggtcacttcggcggatgcgttgaccgaagcgatggcgtctgcttcggcctcactggtctcatcggtttctccggtttcggcagatgccagtgcgctgtaaataccatcgtcaacagtgccttcgtcatcaacgtcatcgaaggtcacgctgaactgcacggagtcagctggaacagattcaatggcgtcgttcgtctcagtctcagaagtcacttcgtcagccgttgcgtcagtggtcttctcgagttcctgatcgttgttcttgtcgctcatgcctgtgcctccgcatcgtcggttgtggtggtcgtcttattggcctcgccggcatcatgagcggtggcctcagcagcttcatcggtctcagcagcgccagtggtttcggccgtttcaatcgcctcagtctcgctcacggtgccccagtcgccatcggcggcgaacagcttgttcgcgctgaagaacgcaaggcgcagggcggcaagaatcgccaggatcaggattgaacccaggccataccagaccatggtccaaatcaggtccgatgtcaccgggatggtatggccggatgccagagcaggtccgatcggcttggcggcgaacgcgcctccgaccagaccaattacgtagaagggcagggtgacgatgaacacttccagcatgaactgccatcccaaacgcccgcgagtgacgccggacaccagtgccatgccgatcttgtcgtcacgcttgggcgcccacacgcctgacagcacgaggatgagcaacagcacgccgcccacggcaaccaacgcaatggtgccggtcttcgcgcgcgaggatagcgtatccagcggctccagagaagcgttgtaggattccagcgaaggggaagacacctcgtatcccttggcgggcagcttggacttcttgagggtggataccaaggacttgtatgtagcgggatcaccggtgtcgaacaccacgtccagatccggcaccgcccagccggaggcggtcttgtcgttggactgtgggtcgagtccggccttggcgaaggtctgatagttggtgaagatcgcgttctcgcggttgcgggcggccgtcaccggattggcgacggcggattcggatgtgtacttgtagatgccgcgcaccttgagcttggccgtggtctgggcgtccgaggcggccgccaccttgagcgtatcgcccaccttcaggttgttggcggaggcaaacgcttcagagaccagtgcgccggtggtgttcgggttggaggacttgttgtcgtagcttaggtccttgccgtccacgatttcgaaggtaccgaggtcgctggccttggcggcatcctcggtccagaaggctcgccaaatgagctggccgccggtctcatcatcggaggccgagcccagcgatccgccgtccagggccttcaaatcaccgctcacgcgggccggcacggtttcggtaaccgtaaagttcaacgagttggtggccgaccggacgagcgtggcgtattcggtgtatgaggtccacgtcatgtaatgcttggtggaagccgagtccgtagcggagaccttcttccacgtagccgcagtcgggcgaatggccaacgtggccttctgctgatcgtacgcggtggtgtgtgcgttggtatcttcttgaatgatggccagtccggcgactgtgccgaaggtgaccgccaaggtgatgaacgcggtcagggccgtacgtcctttagaacgtgtcagggcccgccaggcgttgctgaggacgaacatctaattgcctctcccgttctcctaagccgaacaaatcaatacggctttaactattgttgcgtttagtgaccgttttcttgcgcaatactgttatactcctcaatgaagtctgagaacattctgacagcgatgtggtggtcatgcggggatttgcacccggtatgggataaaccctcggtctatttcggtggcatcggtacactggcatgagatatgcgtggcgtcacgtgtgctccggcatgtctgcgattccggattcacccggagtccggcatccggaagcgtggcctcgcgccgctggataagagtatgagctgagcagattttcgggcaggataagtatgcgattcacttcagggcattcgagccataaggctgtggggcgtaggagaagccgtcatgccggtaacggaaaatccaatcgctccgcatctacgaatagcgctgcaaatcatcagacgggtcccgtaaacctgaagactccccagcacgtgggtggcgacggccgttcgctgatcagccgtacaccgatatgggcgcgagtggtggttgtactgctgctgacgttgctggccagcgtcacctgtgtgggcacgctctacgcggcatccgtctcgagaatggccacggatgcgcagcgtgtgctgacatccgccgaaagtctggccaattcggcacttggctgcggcagcgataagagtctgtcggacatctcccaagagttggtcaatgccaccaatgatctcaacgaggagctgaacggcccgcagtgggacttcttccgcgaccattcgcgatttggcagcgacatcaccgctgcccgcgaaatgctggcttccgtggatacgctggtcaacggtccgttcactgatctgctgaacctgtccaaacgattgcagggcttctccctgaagaatggctcggtggacgtcagcgccctgatggatatgccggatatcgtcaagcaggcgcataaggatatctcgcagcagctcaccaagctcaacaaggtgccgactccgagcgtcgccaaggtggccaccgtgctcgaatccgaaaaggctgcgctcaagaccgtggattcgatgctcagcgaatacgatggcctcattaacttgctaccgcaactgcttggcgaggacggcaagcgcacgtatctggtgatggtgcagaacccggccgagctgcgttcggcgggcggcatggtgggcaccatcgccgcaatcacggcagataagggcacgattaccatcggtgatttcgccaccacttctggttgggacattcctgagaagccaatggatgctacggtgctgaaggagcgccaggtatttggcgacacttttgaccagtacccggctaccacgaccatcgaccccgaattccagcgtgtggcacagatgaacaaatacatgtggctgtatcagaaaggcaacgaagacgagaacgtagcgggtgtattgtcattcgatcccgtattcctccaggcattgctgggagccacaggcaaggtcaagctttcggacggccgagtgctggatggcaccaccacggtgccgttcttcgcttcagacctgtacacggattacccggacttcgagcagcagaacaacttcgtttccgaagcggctcaagcaattatgaaccacgtgcttggtaacgcgaatgcttccaccgcatccccgctgttgaaggcaatcagagataccagcgctagcggtcatttcaagctatggatggctgatccggatgagcaggaggcgctgattgccaccggacttatcgacgataaggccagtggcgagttgtctgctgacagtcaggtacctgaaaccggcatctatctttcggagctgcagcaaggcaagcaggattggtatctgaagacctccaccacggtcacaaaaacctgcggcgacgcctcggccagccagaatgccctgtattctggcgtgctggataagcgcatcacgacagccgtgcgtaacacgcagctgggtcagtttacggaagatcagctcggtgacgaatacacggtcaccttcaccatgaagaacacgctgactaaggctaaggccgaatcgttgcctgatttcgttaatggcggctcggagaattcagtgctcggtggcatgctgtaccgcgtggtgcttaccgccccgtacggtggcgaaatcaccgctgtgcaggctgatatagattcatggggtaccaacaccgcgagcctgtatgaccgtcagtacattatgttcaaccagcagtggatcgagcccggaaaagaattgacgattgcctataccgttcgggtcagcagcgatgccacacatccactgaacgtggtaaccacgccggtggtgaatgcggatggcgtcgagacgggctccaacggtaaggtgacggatgagtgcccggccgatacgaacggcgccgatggtgcgaacggcgccgatggtgcgaacggcggcaagaacgacgcgcataagggcgcgtcctccgatccctcggccggcctggacaccttggacaagctgaagagccagatcagctgcccggtcgatctgaagtccctgacgggatccatgtgatgaccatgcccgattccgtttccggcgtcgccgtttccgacgccaccgtttccggcgtcgccggcaggccgcgcgacgtgaactacgatctgctgcgcgtggtggcgatgtgcctggtcatcggcgtccacgtgatcaacaactacatgcccgtcaagatggccctcgccggcagcgcggaaacggtgcgatccgtgctgttcgcgttgttcatggtctgcaatccgctgttcattatggtgtcgggccggttcaacctgacattcgatgccgaccggccggtgagcacccactcagcgggccgtctgccgggctctggctctgatgcccggacaggcggcggtgccggccaagccgatcccggtagcctcgcgccgtacgtgcgctactactacaaacgtttcgtctcgctgattgtgccgtatctgctgtatgcgggcggcatgggattcgtcgcctacctggtgatcgatcatcgttcggttggcggcgctgtgtctggaacgttgttcgatctgttctccgggtatgacgattccgtctattggttcgtattcatgctcgccggtttcgtgctggcgacgccgtttctggccgcgatgatgcgcgcgataggccggtcgggtgcctggctgctgatcggtctggccgccgccgtggccgccgccgagcagatctgcaatcttgccggatacccgttgacgttcctgcagtcgttcccctggcggggactgctggtctactatctgttgggattcgtgttggaatactatccgccgtccacgcgggcgcggcgcggcttgtatgcgttggcgccgttcgccctggcttggaccgttgccacgccatatctgttcgccggccagcagatgcaggtcggccgcacgctcacggtctccttcgcggtggtggtggccgcggtgttcctgttcttccggtacgacgtgcatccggcgtcggcgcggctgcgcagggcgatcacctggctggcgggatactcctacacgatctatctggtgcattcgccgctgtccaaggtgctgatcggcccgcggattcccgcgcccacggacggatggtcgta

SEQ ID NO: 3160 - DNA, 13009 bp, Unknown
  R53_2m  MAG No. k141_562
cggcgagcaccagcacttggccgaggcgaatcatgaccgggtccttgaatcgcatggtcaggaagccggaaagcgcacgacccacagtgatgcctacgtagaatagaccggcccagctggcggcagtgatcttgtcgatgccaccgtgcatcaccatatagctggaggcccacaggcccgccgtggattcgatggcgcagtagcagaagaacatcacaaggatttccttggcaccgcgaatggcgagcacgccggccatgccgagcggtttgcgttcagcaacagacgccccttcagcattaccacatccctcggcattgccgtcagatgatgcggcaccatcggtcgattcgccgcccccagtcgtgccacgtttcttccacagcggcaggctcagcaccaggatgacggtcagcatcacctgcaggatcgcgatgtaccgatagccccacggccagccttggccttgagacagcgcatagcccatgatataggggccgaccgatgcgccgacgccccacatgcagtgcagccagctcatatgccggctttcgtagtgaatggctacgtagttattgagcgccgcatccacgccgcccgcgccaaggccgtacggtatggcgatgaccaacagcacccagtaattcggggcaatggagaaaccggccaagaccgccgcagtcaacgccaccgaaacggcggtgaccttaccggccccgaatttcaatgtcattcggtccgaaagcagcgccgaaacaatcgtgaacatggaaatcactgcggagatgccgccagcccacgccaccggcacgttcagattctggctcatggtgggccatgcggacccgagtagcgaatccggcaaccccagactgataaacgccacatagatgacggcaagcaacagactggccatgttccatctcccattcacagtgcggcaccggttgtgataacgatgtcatcagtctatcgagtaactcatgggcaacacgcataaaacatatgacaacgtgctcacctcaaacgtcaattacgaaaattctcggtaagcacgatgtcattatcagcgacgtcttcgatcaggtatcgatcttggagcgatcgaaatcgtcggcgttgtcgacgatgaactgcttgcgcggcggcacatcgtcgcccatcagcaggctgaaaatctcggatgcctgggcggcgtcctccatacggatgcggcgcagcatgcgcgtgcgcgggtccatggtggtgtccgccagctggtcggcgtccatctcgcccagacccttgtatcgctggatgtcgtcgttgtatccgatgtgcttcttgtcgaggtcggccagtttgccggccagctcgtcatcggaatacgtgtagatgtattcgcccttgtgcgagccggtcaacgcgatgcggtgcagcggcggcactgcggcatacacgtagccgtgttcgatgagcggacgcatgtatcggtagaacagcgtcagcaacaggatacggatatgagcaccatccacatcggcatcggtcatcatgatgatcttgtggtagcgcgactgttcgatgtcaaagctctggccggagccggcgcccaccacctggatgatggctgcgcactccttgttggagagcatctgcgtgatcgacgccttctgcacgttcaggatcttgcctcgaatcggcagcagtgcctggaaaccggcgttgcgtgcggccttggcggtaccgagtgcggaatcaccctcgacgatgaacagttcggccacgtcgtcattgcccggctggcagtcggagagtttggccggcatcgaggcggattcgagcgcgttcttgcggcgcgtgacctctttggccttgcgcgactggatgcgtgcgtgcatttcgccgacgattttctccagcacgcggccggattgttccttgtacccgcgcttggagccggtgatcatctcaccgaattgcttgtcggtgagccgggtgacgatcggcttgacctgcgcggtgccgagtacatccttggtctggccttggaactgaggttcggccacgcgtgcggtgaccacggccacgagtccggcttggatatcgtcgcgctccaccttcatggcggagtccttcatgttcaccttgagcttgcgggcgttgtcttccaccgccttgcgaatctgcttggtgatggcgttcatgaaaccgtccacgtgagtaccgccgccgggcgtctccacgatgttcacgaagctcatgattgtggtgtcatagccgttgacccatcgcagggcgatgtccaagccgcaggtgcgttcgatttcctgggcgtgcagttcgccgccctcacccacggcctgggtctcctccttataggtgccctcgccttggatgcgccagatgtcggagatcggctcgcctttggacaggaagtcgacgaagtccttgacgccgccggtgtgcaggaattccacgacgcgcgggtgcgcgggctgttcgccgaacgcgccgtcgacgacctggtcgctggccgtcagtgagaaattctcctcggtcaggctcccggtactgtcgacttgggcttcggtggagtcgtcgaagagttcggcatcgttggacgagacgtccaaagccggcacctgctcttgcacgggttcgactgtggcggtatcagcggcctcgacggtgtcagtcgccgccgtttcgggtacgttttcgtcgatgatggtgattttgaggccgggcaccaggaagctggtctgacgcacgcggtcgatgagctgttcgtatgagaactcggcggttttgttgaagatctccggatcataccagtagcgaatacgggtaccagtggttttgggagataccttgccgatgatttccagctcggtgggtcggttcttgcgagtgcgcttgaacggggaatcgggagacggattggccgggtcggcatccgtgtatacgccagggtgaccttggtggaaggtcatgtggtgcgtcttgccgtcacgatccacttcgacgtccagtcgggagctcagggcattgaccacggaggaacccacgccgtgcaggccaccgacggcgttataagacgaattgccgaacttggcaccggcgtgcagtttggtcagtacgacctccacgccggacaggccggttttcggttccttatccaccggaatgcctcggccattgtccgcaacttccacggaaccgtcggtgtgcaaggtgactacgatatcgttgcagaagccggccaaggcctcatccacggagttgtcgatgatctcccacaagcagtgcataagcccctgcgagtcggtggtgccgatgtacatgcccggacgcttgcgtaccgcatccaagccctcaagaacagctaggtccttggcgccatattcttctttgggcatacagtcctatttttctcttcaaatgcttggctcccctcacagaggggagccagatgatcattgatccaggaagtcgcgcagggtctgcgaacgggacgggtggcgcagcttggacatggtcttggactcgatctgacggattcgttcacgggtcacgccatacacacggccgatgtcgtccagcgtcttcggctggccgtcttccaggccatagcgcatcttgatgacgccggcctcacgcggagacagggtttccagcacctgcttgaactgttcctgcagtagggagaaggccacggcgtcggacggagcgatggcgtcggtatcctcaatgaggtcaccgaactcggaatcgccatcctcgccaagcggggtgtgcagggaaatcggctcgcgcccgtacttctgcacttcctgcaccttctcaaccggcatgtccagctcgcgggccagctcgtccggcgtaggttcacgccccagatcctgcagcatctggcgctgtacacgggacagcttgttgatcacttcaaccatgtgcacaggcacgcgaatggtgcgggcttgatcggccatggcacgggtgatggcctgacgaatccaccacgtggcgtaggtggagaacttgaagcccttcttccagtcgaacttctcgacggcacgaatcagaccaaggttgccttcctggatcaaatcaaggaagagcatgccgcgacccgtgtagcgcttggcgagcgagaccacaagtcgtaggttggcttccagcagatggtccttagccttcttgccgtcggcggcggcccacttgagttcacgcttgcgcttgaactccatgccttcgctttcggtgtcgagcaggtgctgggcgtacaggccggcctcgatgcgctcggacaggtcgacttcctgctcggcgttcagcaggctcacgcggccgatctgcttcaggtagtccttgaccgggtcggcggttgcgccggccgcaatcacacgacgcttcggattgcccgaagggatgatgttttcttcctcatcatccgtgtcggagaccacgtaggcacccttttccttgggctgctcgggtgccgtggacttggcttcttcctcgtcctcgtcctcgtcgtcttccacatcgtcgtcgtcggcatcgtcttcgtcaacgtcgtcaagatcctcgtcgagatcgtcaacgtccaaatcgtcgtcgttgacctcggcatcgtcatcaagcccgtcatcgacctgagtgtcctcgtctttgacgagttcatcgtccttggccttcttcgcggttttcttcgcggcggacttgcgcgtggtcttttccgagggctctgcggacttggacttcttggcggaagtcttgcgtgcggtggtcgtagagctggccttcttctcggtctcctcgctggactcggctgtctgcttggttgccgtcgtttccttcgtggccaaaactgctccttctgatctctcgccgtgaagcgcatataccacatgggcccacttctggcaagggcaaatcgtcaactatgtgagtaaaccaccctccacggacgattattcccacatcgttgcccgacgtgttgccgatcaccacacgctttccttccgcgcatcgcgcgtaaaacctcggagatccgccgtttctgttcactcagcccgagcaccatgccggcgccacgcctcgatcggcggctgagaatatcatcgccgccagcgaacaatcctcatcgagcagcaggcatcgcaaggcgaacaccattgctcgtggatcgcccagccaccataaggtgtaagcgatcacggccaatggctgtatgcagtacggcaccggtgaggcttccgcgatatcgagcaacataccgatgccggcatggcaacgctccttatccggcatcatgccttcatcctcgaatgcgcaggtcagcagctcgcccattcgtgttctcgtacgtgccagatgcggtcgcgccgcgaattccatgagccatgacttggggcaacggctttcatcaataaccaacgagagaatcagcgcatcacgaatcgataaggtctcgcgcatgcccaccgcaaacgcggccatcgtctctcggcctaggtcggtgttcccggcatcgagacaagacagccattcgtccaatggttcggccacccagtcggcattagcctgttgcgcgcctcgaagtcggcgatcattgcgaaattcctgtgatctcgtctccaactcgtcaaagccaaagggctccgtctgctcggcggcgtgccgtttggcgtgccggctcttacgcggcttgtgcggcgtgttgttgttcatcatgtcctccttgactaatggtgtgcaatctattggtgttgtggtgcgcgccgagccggatagctcatgcgccgagggggtgtgtgcccactatggctgaaaacgccgtatggcgcaggaaaaaacgaccattgtggttctagcttcaaaacccttgattcccaacgttcttgtgttcttcaaaccctgtggataagttattaggcatgtgcacaactgctaacaaccgcgaaatcatcgagccacgcatcattcagttggtgcgggaactgactgccgcccccgccaccgacgaggttgccgacgccctgaaaccggtgatggaacaggttgtggaccaagcctcctcctccagccaaggaggcaaacgactgcgtgcgctgctcgcattggacgccttcgatattcttgccggcgacgtgacgcctgatcggcgtgacgccatgatcgacctggcctgcgccattgaagtgtttcagacggccgcactggtgcatgacgacatcattgacgaatccgatctgcgccggggcaggccttccgcacatcgtgccttggaacaggccgtacacagcggtgccataggccgtggcttgggcctgatgctcggcgacattctggccactgcctgcattgaaatcacacgccggtccgccagccgtcttcccaacaccgatgccctgaacgaggcgtttcttaccatgcagcgtgaggtggaaatcggccaggtactggacttggccgtcgagatgaccccactgtccaatcccgaagctctggcgaacgcctcattgaacgtattccgctggaagacagccagttacaccaccatcgctccactgctgcttgcactgctggccgcaggagagagcccggatcaggccaggcattgcgcgttggccgtcggccggccgctcggactggcgttccaactggcggatgacctgttggatgtcgtcggatcaagccgcaataccggaaaaccagttggcggagacatccgagaaggcaaacgcacagtgctgttggctgatgctctgtctgcggcagatacggaggataaggccgatctgattgccatcttcgaagaagattgtcgcaatgacaaccaggtggcccgcaccattgaactgttcacgtcgaccggtgctcttgatcgatcccgcgagcgcatcgctgccctatggggtgagtcccgtaaggcgattgccggtcttgagctgaattccgaagcgcagcgccgtctgaccgaggcttgtgcgcgattcgtccccgaatccttgcgatagtccacaatgcgagccgccgggtcatgagaccatgaacaccggtgaaaactatgcgccgatgctccggccgcgtaaccggggccatgtacactgaacatgtttagtcgtgattaaaggaaccgtacgatacaacatgagtgagaacgagcccgcgcagatgattgagggacgctaccgcatcgtgcgcaatatcgccgagggtggtatggccaccgtgtatgaggccatcgatgagcgtctggggcgcaccgtggcgattaaggtcatgcacacacaactcgccaaaggcccgcatcgggagcagttcgtcgaacggttccgccgcgaggccaattcggccgcgtccatcgccaacccgcacatcgttcaggtgtatgacaccggcgagttcaatggacttgattttctggtcatggaatatgtgcatggcgtcaatctgcggcatgagatgaacgcccaaggcacattctccgtgcgtgagacgctgcgcgtggtcgcggagacgctggatggtctggcttccgcacatcgcgccggcgtggttcaccgtgacatcaagcccgagaacattttgatcaatgatcgcggccatgtgcagatcactgatttcggtctggccaaggccgccagccaggccacattgagctccaccggcatgctattgggcaccgccgcttatctggctcccgaaatgatcgagaacaatcaggccaccgcgcaaggcgacctgtattcggtgggcatcatggcatgggagatgctgaccggcaaggtgccgttcgattcggataatccggtgacgcttgttttcaagcatgttcatgaggacgtgccgtccgtggccacggtctgtcagggcattgatccgtccgtggcggcgttcatcgcccatctgaccgcgcgtcaggtggatgcccgccccgccgatggcgcggcagcagctgaggaattgagccagttggccgccaaattgccgctggaggcgtggcaataccgtttgcatgccgaacccatcggaggtgatcataccgatgccaccgctgcagcgctggtaggcaatatcgccgagcaggccccgctgaccggcgtacctgccggtgcagcaacgttcaagccgtccgtaccagcgtttttggccgatgatgtcgcaagcaataccgtcgataccggtggcgccgcagacgtcaatcctccggctcctccggtcgcccccaccacggcacttgattcgtcgacgctagccgatgcttcggctccccataagacgcaaatcatggcacagtccggcagcgagacacaagtgctgcctcaggccggcgatgccttcacccgagcgcttgccctttccgatgagccggacgtcgcttccaacggcaccgggccaaagaagcagcgcagcaaaaaaccgctcatcatcgtactggtgatcgtgctggtactggctgcaatcggcggaaccgccggctggtggtggtttgccggaccgggcagctattggagtgtgcccaagccggatgacgtgacctgcgatgcgaatgcaggcaccgaatgctcgttggccggcgcggattgggccacgtatgagagcacgttgaaggctctcggcatcccctacaagacgcacaaggaatacagcgacgacgtggcggaaggcaagatcatctcttcttccgtgaacaagaccaaggccgttgtgaacagccgcataagcaagcgagccaatcaggagcttacggtggtggtgtccaagggcgtgcggatgaccaccatcccgaaggatattctcgacgcgaattcggccaatggcaaggacccgttgaacgcgctcaagaaggccggcttcgataatgtcaagcatgacgagtcgaaggatgagtattcgatggacacgccgcagggtgtggcattgacgatctcccctgatcccggtaccacggccaagcacaacgatgaggtgacgattactttgagcaagggaccgatgccggtgaccatgcctgacatcgtcggtaagacccaggatgagatgcaagccgcgctcggcgagttgaagctcacggccaatgtcaccgaacagtacgatgacaaggtcgaggccggtcaagtcatttccgcgtctcaggaagccggagcccagctgaagtggggcgatagcgtggacgtggtgatttccaagggtccggagatggcgacgataccgtccggccttgtcggcaaacaggaaagcgccgtaaccaagacacttgaaggtctcgggttcaaggtgaaaaccgacaaggtgctcggtggcctgttcggcacggtacgtaccgtgaaaagtggcgatacggacctatccaacggcggcaagattcgcttgcgcgacgccaatggcaaccccaccgtcatcaccctcaccatcgtgtgagagtaatcgactggctcccctcgctgaggggagccaacacacattattcggcttcttcagcggcctgccgggccttgagctcggccttgaccttctgggcgtattcgttcacgaattcctgaccgctcattttctggattgcggtggaaacacgatcggtcagcgaacgcaaatcatcatgtgtaatttcatcagccggcttcttcgcaacctcaatcggcttgccatacaacaccttggtcttgcccttcttgggaatcgacgtgccaatcggctgcagcttgtccgagccgatgatggcggtcggcacaatcgggcaaccggtctcgagcgcaagtcgtgcggcaccggtgtgtcccttgtacagtcgaccgtctgggctgcgcgtgccttcaatgtggataccgaacaggtgcccatcctcgataatctcgcgtgcatgctcgagtgcgccaagcgacttgctgccaccggaacgatcaaccgggaacacgcccacggacgtgaaccaccacttcttgaacttgcccttcaatcccttgccctcgaagtattcggctttgcccatgaagtgcaccatgcgcgggcaggtaatcggaatcaaagcatcgtcaatcaccgccagatggttggctgcgataatcgcgccaccctctcgaggcacgttattcagtccgctgacagcagggctcaaacgatgatgagcaatagggccgagacctttgacgaagaaccagtagagcacttggcattcctcccgcagacgaactagccattggccggtcgcctgattagagtgacagttatgactgagaaccagaatagcaatgccgacggagagcggccaacccccacgccgggcaacggacaggattccgatacttcgtccaagtcgtcgactcccggtgccgccggaccggccacgaatggtgccgatacaccgcaatcgcatgacgcgaacgatttggatgcggcgtgggccgcgttcgaagccgagcatcaggccgacttgcatgacgtggcttcctccaggcaggccaaaaagttcgagaagcaggccaagaaacgcgagaaggaagcactgctttccgtagatgacttggatatcggctcgttcaccgatgatgctcgcccgagccgtggcggcaaaaaaggcaagcagtcaggcccccgtgatttcaccggctccagctggctggataccgataatgtgatggacgcctatgatgatggcggcttcactcccccgaaccctgatcttggtccggtcaaagcatctacggtactgctgacggcgttgctcatcatcggtctcgcaggcgaaacggtgatgatattcgttcccggcttgaacgcgattcctctcttaggcgcgctgctcaatattctcttcgggctgggcgtcattttgggtctgggcggattggtggccaaaatcctcaaccgcaaagaccgccccggtgatcagggtggctattacgacgacggcgcgcgggtctaacgcttggactgggcggtttcgatccacttgttgaacagggcttcagccttgccggagtcgacagcatcctcggccagcttgtaggcctcggcgaagcgctcggccagtgtgccgttgccgaccagattgccgtcagccacgatggcggaggcagcgttgagcagcgcggtggtgcgggacgtaatgtccttgccggccaggaagtccttaaatgcgttggcgttgacgtccggcacgccgcccttgagctggtcgacggtaatcttggcgagacccagatccacggtcgggtcgaactcggtttcggtgaccttgccgtcgcgaatctcccagacggaaaccgggccggtgggggcgagctcatccatgccctcatgcgaagtgtagaccaagccggactgaccacggctggcgtagacggcagccatgatcgggctcaccttgcggttggcgcagccgatggccacgtgtgccgggttggcggggttggtcaacggtcccaggatgttgaagacgcacggaatgccgagcgcggcacgaatcgggcccacgaagcgcatggccgggtggaaggtgcgggcgaacgcgaaggtgatgcccacctcgtcgcccacttcgccgacggcctccggcttcaaatccagcggcaggccgaggtcttcgagcacatcggcggcaccgcacttcgaggatgcagcgcggttgccgtgcttgacgatcttcacgccggctgcagcggcggccacggagcccatggtggacaggttcacggtggcgaagccgtcaccaccggtgcccacgatgtcggtggtcccaccggaaacgttcagcggcacggcgtgggagaccatggccttggcggcaccacgcacctcgtcggcggtcagtcccagctgctgctgcatagcgagcgcggcacccacggcggccggattggcgttaccttgcatcaggtcgtccacgaaccactccgattcctcagcagtaaggtggtctcccccgaccagcttggtgagaatcgacttccatgtgatctcggccatgatgccctccttggcgtttcctacgccgtgtgatgtatgttcgccgctcattgtaatggttcgtcatttcaaggccctgaatcttccatattgcaaaatatggcgctattgctgttttcgtggatgtcggttcgtcgtcgagccgttggtttcgtaagcgtgaggggcgttcccgcgtattctgtcttccgaccaaagaaatgaatcacgaagaacgcctgggcaaaagcccattcaccggattgccgaacgtcaaaggcacggttgcagaggatgcgcggatcacggattcgccgccgcgttccgaacccgtgctcgagatccgggtgcgtccacgtgcgggtatgctccgatgctcccgatgcggaaggaggcgccgcgggcatgaccagggcggtggcgtgcggcgtcgtggtcgcttccgtgccgtgggccgagccgggcagccggtccacacgcgatttcgaatcggaacgcgcgtggccgatgagcgtcgcgaaccagaagaccgtaagcggttttccgcacgtcgcgtggcgcgccgccggaagacgccgcccatagggtcgccgaacggttgaaagcgtcgatgccgtctccgttcggcgacctcacgtcgatcggcgtggacgagaccggctaccgcaaaggccacacgtgcatcaccgtggtcgtcgaccacgaacggcatcgggcgatatgggcgcacgacgggtacggcagggacgtgttcggcctgttcttccaaacgttgacgcccgaacagcgcgcctccatcagggtcgtcgccggggacggggcccggtggatcgactcatgcgtgcatgagtggtgcccgaacgccgaacgcgcgcccgacgggttccacatcgtcagttggacgagcgacgcgcccgacaaagtcaggagacacccgtggaaccaggcgcaccgcgacggggacgagaaatccgtcaagcgcatgcgcggcgtcagatacaccgtcctgaagaaccccggcaagctgaccgacagacggtccgaggcgtccgggaacctgcgggacacggac

SEQ ID NO: 3161 - DNA, 3662 bp, Unknown
  R53_2m  MAG No. k141_582
gaatggccgtgacaggggaggggtattgggcaagcttcgggcgccgcgttcggcgcgtggccgtgtgatggcggcggccggcatggtgatggtggggtcgttgggtatccagacgtcgtcgtccctgtcggcgtcgttgttcggcgcgttgggaccaattccggtcagttcgatgcgcatgctggtcgccgcgatcgtcattctcgcactcacccgcccgaaactggctggccggtcgaaaggcgaatggctgggcatcgtaatctacgggcttgcgatggcggcgatgaacgtctgcctgtactcggccatcgaccgcattccgatgggcgtggccgtcaccctggaattcctcggaccctgcgtggtcgccctggccggttcgcatcactggcgcgagggcctgtgcgcggtggtcgcgctggtgggtgtgggcttgatctcgtttacgccgggcggctacttcaatccggccggctacctgttcgcgctgggctcggccgtgtgcttcggcctgtacacgctcttcgccgaccgggtcggcaaggcaggcaccgggctcgacgggctcgccctgtcggtcacggttgcggcgctggccacttcgccggtatccatcactcgcgcgccgcatgtgtcggccgcccagtggggcgtcatcgcagcctcggcggtgctgggagttgcgattccctacacgatggacacgttgtccgggcgtatcacgtcggcgcgcgtggtcggcacgctgttctccatcgaccccgccatgagcgtgattatcgccgcgctgatattgcgacagaccatcaccgcggtggccgtgatcggcgtcatcgtcgtctccctcgcgggtgccctgctggtgtggtcatccggcggcgatgccgtaaacggatgattcttgtcatacgattgcttgacagcatgttgtgaatgcttgagccccgctcataccattcaaatataatggtttttcgcatgattcgttagcgttgacggatcccccaataaggaggtaatcatgtcagatcctcgcgttgaaggcggaagattgtcggtcgcgcccgaggccgtatatacgggtgctctggtgatgttcttcagcaatctcgctatgccggacaccgatccgcagggcaggcccatagtgctgtggttcaacggtatcatcgccgtctgcgccctgatctggggattggcggagacgatgcgcgtccgtaaggaatacccgtggcggtgggcgcgcacgctgttctacgacgtcctgattctcgtcgggctgctcatccgtaattccgattggacccggctcgtcgtgctggtcgcactggtgctatacgcgattgttacggagaaaacggcggcggaaccgcgccggtcctgactgcaagacgatgatgaaccgtcagcgtcacaggattctcgcggtatgcgcacggtggtcgacatcgacacggccgccggcagcgggcgcatgattatttcacgtcgcagacggtgaaggcgaagctggtgagggtgccggtggatttgccgtcggcgaggagctgattgatgtcgggcaggtccttgttgtcgctggtctggttgagggcgtattgggtgccgtcgggcgcggtgaagcgcatgacgggatcgcctttgctgttgtgcgtgcagctgacggtgccgtggtcgacggtgaggggccatgtgtggccgagctggtcggcgctgatgtcctgtgggttgctggtcgcggtgattttcttgctgccgttggtagggtagttttcggggtgttcgatgccgtccatgcaggcggtcagtcccagggccatgatggcggcgaggccggtggcggtgatggtttggatggcgtgtgtcgtgttggtcatgctggtttcctttgtcgtgttcggtggtggtcggggtgcttgttcgtctgccgtcaatgctggtcggggtgttcctcgatgaggaccatgtagccgtcctccaatgtggggtccatgggatgcgcgtcggcgggcggggtgtcggtgatgacgcggtagcgtacgccgcgtgcggtggtgacggcgttggcgacgatcatgccggccggtggcggggtgttggatggctgggtgagccagacacggcccgtggcgtgttcggtgaggtgttcggtcggcccgtcgtagcggatgcggccttggcgcaggacgaacacgtatgggcaagtctgggcgatgtcgtcgaggatgtgggtggacaggatcacggtgcggtcgccgccgaggccggcgagcagcgtgcggaaacgcatgcgttcctcggggtcgagtccggcggtgggttcgtccacgatgatgagccggggatccgccatgagggcctgggcgatgccgacgcggcggcgcatgcctccggagaagccgccgatgcgccggtcggccacgtccgtgagcccgacccgttcgatgagctcgtgcgcctggcgcatgcgctttcgcgtgtcgtcgatgcctttgaggacgcccacgtagtcgaggaattcgagcggggtgagctgcgggtagggttcgatgtcctgcggcaggtagccgagcgtgcgtttgagcgcacggcgggtcctctcgtccttcagatcgtggccgtccatgagtacctggcccgatgtggggcggatgatgccggcgaggatgcgcatgagcgtggtcttgcctgcgccgttcggcccgatcagaccgaccatgccgtgcggcaggtcgcaggtcacgtcgtccagcgcgcggggcttcctcaggaagtccttggtcaggtggttgatggagatgaacatgacgtcttctttccgtgtgatgttttttcggtgggggttccgccggtgccgttcagcgcgttgtgcgcgggtgtgccgagcaccatccacccaacgccatgagcagcatggcgacggcgagctgcgcgatcagggatatggccgcgttggcgggcgtgccggtgaccgcgaggatgcctcccgtggccgggtagacggggccgagcccgaaccatccggcgccgacggcgtcgccgatcacgttgaggatggtgccgttgacggtcggcacgggcagcatcggcgaggagaacacgagcgcgaaccatgcgagcacgccggtgatgcgcgcgacgatcatgggcaggatcgcgccgagcagcgaggacaggctcatcgcggtcagcacggccggcccggtgatcgcgagtccggcggccaatgcctgtggtatggcccgccacgagccgtgcagggtctggacgacgccggcgcactccagcagcaggagcgacggggtgatgaggatcagaaacgcgccgagcgtgcgagccgcggccagcatgggcgcggggatgggcgtggaatcctccaattgaccaatgccaagtcgggagtgccgcgtgtggaagtcggtgaacgcggccatgtaggcgatcggcatgaacatggccatcgccttggccatgaacgccaaatcgcccgcaccgtggtcatgcggtcctgccggggagatcacgcccagcagaaccgcgagcaaggccagcgggacagccgcgacccataatgaacgttgccgccacacgatgatcatgtggacgcgggtcagatgccggaaaccggtgcaaggactcatatgcttctccttgcgagc

SEQ ID NO: 3162 - DNA, 6661 bp, Unknown
  R53_2m  MAG No. k141_701
cgccacggaccgcatcttgcggttcaggcggacgggccttatgggagggatgggaacgggagatcagttcttaataactgcctgcgcctcatcaccggcggcctcgacggcctccacgacctgcgcctcatcgtcgacgatctcgccggaagcgagcttggcttcgagctcctcaacgatctgcgcatgcatcttctcatcgatcttgaccttgaaccagaacacgacgaggctgaggatgatgagaacaagcgggacgtagaaggcgaaggtcttgaacgtggcgatgttggacgcggtcatgtcggctgccgtggcatgaccggtcatgccagccgcgagggcaacggcaccgaccgcaccgttggacatcgcgccgccgatcttgtcgagcatgggacgcaccgacaaggtgaccgcctcgttgcgcctgccgttcttcagctggccgtactcgatggagtcggtcagcgacagaatcgcggtcatctggatgaactgcgcaggcacatagaagaagatcagggcgacgatgacgaccggcaggttgctggagaacagggcgagcatcgtgtagccgataatcatggagaccatgccgccggtgaacaggtagcgacggggaatccagcggttgagaatcgggtacagcggcgccatgatgaatccggcgatcagcgggatgatgccggtgatggagaaggcggcaggctcgtcaagcacgaacacgaagaggtagtacatcacaccggtcgtgatgacgtttgcgatggcgtacagcaggtaggacagggcgacccacagcagctggtcgttctggaacagcgccttgaacgcctcgaacgggttgccgttcttctgggccttggcacgcagcgcgctggtgctttccttggtgccaaaggcgacggtccaggcggtaatcaggccgaggagcgcgacgatgaagccgaaggaggtccatccggcctggccctgacccttggcgccggtgaacgtccaggtgaagtagctgacgatcgggatgacgatgacggtgatgccgttgtagccgatagagccggtgaaggtgccaagggcggtgtaggtggaacgttcgtgggagtcggaggacaacgccgggatcatgccccagtaggagatgtcacgcagggaatagaacacgtcaagcacgatgaacgtgatgacgaacagcacgatgaacagcgtggtgttcacgttgaccagtccgaacatgccggagaagatgagcatgatcagcacggaggagaccagtccgccgatgaactgccacgggcggaaacggccccacttggtggtggtgttatccacgaggttgcccagcagcggatcgatgaagatctcggcgatgcggataacgacgatcaggccggtgatgacggcgatcatttgggcggcgagagccttgctgtagctgacgaacaggcagctggtgacgtacgtgacgaagtacgtgctcattgcgttgtagaaggcagcctgccccaagttgccgcacgcgtaggcgatgcgctggccgagcccacccttcctgtggacgtcgccgaccgcggcattttcgttgctcattagtctcctccttaagaatccggagcatggatttatctatctattagataatcacttgccgacaggtgacacgccgccggttccggccccactgccggaaccgacatgggtatgttcatgaccgccgaccgcaggaacgaacaggcccgtccgccacggaccgcatcttgcggttcaggcggacgggccttatgggagggatgggaacgggagatcagttcttaataactgcctgcgcctcatcaccggcggctgcggcggcttcggcggccgccacgggctgcgcctcatcgtcgacgatctcgccggaagcgagcttggcttcaagctcgtcaacgatctgcgcgtgcatcttctcggtgatcttgaccttggagacgaacaccaccaggctgagcacgatcaggatgagcggggcatagaacgcgcagatcttgaagacgtggatattcgtcggggtcatatcggcggcggttgcgtcacccgtcatgccggccgcaagggcgatgaagccgacgatgccgttcgacagagcgccaccaatcttatcgagcatcgggcggatggaaagcgtaacggcctcgttgcgcttgccgttcttcagctggccgtactcgatggagtcggtcagggagaggatgaccgtcatcatgatgagcgtgccgggaacgtagaagagcaccagcgcgatgaagaccaggacgatgttgctggagaacagggcgagcatcacataagccacgatcatggagaccatgccgccgatgtacaggtagcggcgcggaatgtacctgttcagaatcgggtacagcggggacatgaccaggcccgcgatcatggcgatgacaccggtcgcggagaaagcggcctgattgtcaaggacgaacttgaacaggaagagaagcacaccggtggtggtcacgttcgcgatggcgtacagcaggtaggacagggcgacccacagcagctggtcgttctggaacacggccttgaacgcctgcaacggaccaccgttgtcttcggcgttggcgcgaagggcgctttggttttccctggtgccgaaggcgacggtccaggcggtcatgatgccgagcaccgcgacgatgatgccgaaagcggtccaacccgactggtgctcggcgttctcgccggtgaacacccagctgaaataggtgacgaccggaatcacgaggatggtgatggcgttgccgccgatagagccggtgaaggagccaagggcagtgtaggtggaacgttcgtgggagtcggaggacaacgccgggatcatgccccagtaggagatgtcacgcagggagtagaacacgtcaagcacgatgaacgtgatgacgaacagcacgatgaacaatgtggagttaacgttcaccaggccaaacatgccgctgaaaaccacggcaagcagcacggaggagaccagtccgccgaagaactgccacgggcggaaacggccccacttggtggtggtgttgtccacgaggttgcccagcagcggatcgacgaagatctcggcgatgcggatgatcaccacgaggctggtgatgacgccgatcagcttggccgcaagcgccttgtcaacgcccgagaacaggcagctggtgacatacacgatgaagtacgtgctcatcgcgttgtagaaggcggcctgaccgaggttgccgaacgcgtaggcgatgcgctggcctaacccactcttcctgcggacgtcaccgtccgcggcattttcgttgctcattaatcttctccttaagaacccagagcatggaatcactcattgattttgtaaagtaagcatacaagttttatcaccaaaagtaaaaagcattagtaaacaaggagataaacagcgtgtcgcaaggatgggataacatgggctgaaccgagacattgcatggacgcggcgtagcgtcgacggcaagcagtgccagtgatttggaagcggtaaacaggatttgcgttttatataaaaactgtttattcttttcggtaaaggaggccccgacctcctccataatatcattcacaacgaggtaatgacagaaagcaggagagcatgacagacgtcacacatgtcgatcgcgcatcgcaggcttggctgaccgacccgacggtgttcgaggtgaaccggactccggcccattccagccacaagtggtacgcccgcgacccccagagcggacaatggtccgatctcaagcagagccttgacggcgagtggcgggtcgaggtcgttcaggccgccgacatcaacctcgaagaggaacccgcgacggccgagtcgttcgacgactcctcgttcgagcgtatccaggttccgggccacctgcagacggccggtctgatgaaccacaagtacgtgaacgtccagtatccgtgggacggccacgagaacccgttggaaccgaacatcccggagaacaatcacgtcgcgctctaccgcaggaagttcaccgtctccgcccccgtagcaaacgccaagcaggccggcggatcggtgtcgatcgtgttccacggcatggccacggcgatctacgtgtgggtcaacggcgcgttcgtcggctatggcgaggacggcttcacgcccaatgagttcgacatcaccgaactgctgcacgacggggagaacgtcgtggccgtcgcctgctacgaatactccagcgcctcctggcttgaggatcaggacttctggcgtctgcacggcctgttccgctccgtcgaactcgccgcccgcccgcacgtgcacatcgagaacacgcaaatcgaagccgattgggatcccgaggccggcaccgcctccctcgatgccgcgctgaccgtgctcaacgcggccgacgcggccacggtccgcgcgaccctgaaggacgccgacggcaacacggtgtggcagacgacgggcgacgcggaggcgcagaccgcgatctccagcgggccgctgcagggcatcgaaccctggagcgccgaaagcccgacgctgtacgaacttgacgtcgacgtcatcgaccaagcgggcgacgtcatcgaatgcacgtcccagaaggtcggtttccgccgcttccgcatcgaggacggcatcctgaccatcaacggcaagcgcatcgtgttcaagggcgccgaccgccacgagttcgacgccgaacgcggccgcgccatcaccgagcaggacatgatcgatgacgtggtcttctgcaagcgccacaacatcaactccatccgcacctcgcactacccgaaccaggaacgctggtacgaactgtgcgacgagtacggcatctacctgatcgacgaagccaacctcgaagcccacggcagctggtccctgcccggagacgtcctcaccgaggacaccatcgtgccgggcagcaagcgcgaatgggaaggcgcctgcgtcgaccgcgtcaacagcatgatgcgccgtgactacaaccacccgagcgtgctgatctggtcgctgggcaacgaatcctacgtgggcgacgtgttccgcgccatgtacaagcacgtgcacgacatcgacccgaaccgtccggtgcactacgagggcgtgacccacaaccgtgactacgatgacgtcaccgacatcgagacccgtatgtactcgcatgccgacgagatcgagaagtacctgaaggacgacccgaagaagccgtacctctcctgcgaatacatgcacgccatgggcaactccgtgggcaacatggacgaatacacggcgctcgaacgctacccgaagtatcagggcggcttcatctgggacttcatcgaccaggccatctacgccacccagcccgacggcaccaggagcctgcgctacggcggagacttcggcgaccgtccgtccgactacgagttctccggcgacggcctgctgttcgccgaccgcaagccgtcccccaaggcccaggaagtcaagcagctgtactcgaacgtccacatcgacgtgacgaaggactcggtgtccgtcaagaacgacaacctgttcaccgccaccagcgactacgtgttcgtcctgagcgttctcgccgacggcaagccggtctggcagtccacccggcgtttcgacgtgccggccggtgagacccgcacgttcgatgtcgcatggccggtggcggcgtaccgcgccgacgcccgcgaactggtgctgcaggtttcgcagcgtctcgccaaggcgaccgattgggccgagagcggctacgagcttgccttcggacaggcggtggtgcccgcggacgccaccgcgacgcccgacgcgaagccggccgatgggaccatcaccgtgggccgttggaacgccggcgtgcgaggcgccggacgcgaggtcctgctgtcgcgcacccagggcggcatggtctcctacaccttcgccggcaacgagttcgtgctgcgccgtcccgcaatcaccaccttccgtccgctgaccgacaacgatcgcggtgccggtcatggcttcgagcgcgtccagtggctgggcgccggccgctacgcccgctgcgtggacaacgtgctcgagcagatcgacgacagcacactcaagggcacgtacacgtacgagctcgccaccgcgcagcgcaccaaggtgaccgtctcctacacggcccacaccgatggccgcgtgaacctgcacgtcgaataccctggagagcagggtgacctgcccaccatcccggcgttcggcatcgaatggacgctgcctgtgcagtacacgaacctgaggttcttcggcaccggcccggaggagacgtacctggaccgcaaacacgccaagctcggcgtgtggagcaccaacgccttcgccgatcatgcgccgtacctcatgccgcaggagacgggcaaccatgaggatgtgcgttgggccgagattaccgacgatcacggccacggcatgcgcgtcagccgcgccgatggtgccgcgccgttcgcggtaagcctgttgccgtactccagcttcatgcttgaggaggctcagcaccaggacgagctgccgaagccgaagcacatgttcctgcgcgtccttgccgcacagatgggcgttggcggcgatgattcctggatgtcgccg

SEQ ID NO: 3163 - DNA, 8592 bp, Unknown
  R53_2m  MAG No. k141_873
cataagccgatcgatatcggccaatgcctgattgatatgttccgccttgcgtgcaagttggccccgacgatccgccaactcgcgtattacctcactcggcttggcatcgagcagctgcttgatacgcggcacgggtatgccgagctccctgtacagcagcagcctacgcagtcgtctgagatccgaatcggaatacagccggtatccattccagtcgcgttgcggagacaccagacccatttcgtcccaatgccgcagcatgcgaatactgatgttcgtcagccgcgacacatcccctacgttgagatgggaaatacgctccgccggagtgtccatgtcgtgtgattgccggtcattcatggttacaggctaaagtatgacatcatgtgagggtcaaatcagcatggcgacgcgaacacagacatcgatttcagttcacggtatccacggctggagtaaaaatccgattatactgaatcgcacatcacactaacggctaaaaccaaccgtctccgacaatccatagggagaacacatggatgacatgaacccacgctgcggctggtgcaatctcagcaatcccgtctatgttgcctatcacgatgccgaatgggcggttccgtcgcatgatgaccaccacctctttgagatgctggtgctcgagaccttccaagccggactgtcatgggagacgatactgaacaaacgcgagcgtttccgtcaggcgttcgatgggttcgacatcgaacggatccggcgctatgacgagaacaagatcgccgaactcatgaacgatccgggcatcatccgcaaccgtcgcaaaatcgtcgcgacggtcggcaatgccaacgcattccgggatatccagacgtcgtacggcagtttcgacgactatatttggcggttcaccggccgtcacgtcatctacgagacaggcatgactacatcccctctgtccgacgccatcgcagtggatctcaagacgtacggcatgcgattcatcggcaccaccatcgtctacgcctatctgcaatccatcggcgtcatcaatgcacatgagcctggatgcttcctgcaccgggaaaggtgacccgcgcaaggatttataaggtcgctcgggcagaatctctccgagaggaaccagtgcttctagttattttgcttatcgagttcttggtagcgctctttgaccacggtgaggattccggcagattgttcgcgctactgcgcggtgagcgcttcgagcagttcgccgaaagtcaacccaccttcactaccggatgacggatgatggttttgagattttccggtttggctcggcgcgggtcggataggtagatctcgtgatggcggcgggtgtcggagaagtcgagcccgtagccttgcgaacgcgcgtagccgtccagaatcgtcacggttgcgggctcgtcgtcgtacgggcctttgtgcatgacctgcgcgaccacgccttcatcgaagtcgaagagatatgcacgattgatgtcgacttcgggatgcttggaggcaaacgatgccttggcccacgcaaagacctcatcggtcacgaattccggcagacgaatcatcgaagtccaatggaagtcggctttgtgcgcgtaatcgacgccgggcacaccctcccccatgctccataagccctccagcggaggcacggtgtagtcgaagtacccgtcgatatgctcggccgggttctttgacttcttgctcattttgatggtgaacgaaatgccgtaaagcagttgcatcgccttggcgtagtcgccgccttcttcgttcggatctcctacaccgtccaccgcgacgaaccgcatcgccggtaccatgacgatggccggcatggtcttcggctgatacaggtccttatactccttcttataatcgaacgccatcgctcattccccttccgccaccgcatcgatctcgtcctgacgccgccaccgcttgaggtttggcaacagcgccgacatgcagtcctcggcctgttcgacgctgatatggcaggattccgccatcatcggcgcgcatgcggcgaccaattcatcgctattggcatagtcctgaagaaaaacgccgtcttcatagcagtagttgcaataatctccgtttcgcgttccatccggttcggtgccgtgatcttccgggcggtaaaacggcatggcacaactttggcaaaaaccattgtccggcatttccataagcctcgccatcggcacctcaaaacgggtgctgatcagccgaatcatgtcgatgctcggctctgccgttcccttctcccagcgggaaagcgcctgttgggtgacgaacagctcgtgcgcgaactgcgactgcgtaagacctcgctcctcgcgcacgactttgataacctgaccgatcgacatgactacctcccgacatcggaaaacgattcgcgcgtctcgctgtgcgcttgctgattccagtctaagggcatgtcccgttcgccaagcgcgggtacaacaaaccgttgttcgcgcttgtatcccggaggaagaaacagctcggtcgaacctatttcctctccacccccttcaatgctcccggttcctctgactcctttgcgagcgccgcggatgggatgagcacgcttacgtatggggttgcgccagacaggacgtcgtcgtagaagcgctgtttggcgtcgatgaagtcgatggaatcctggatttccgcgagctgctcgaccagccgcgcccgcttgccggcgagcatctacttgcgttcggggatgctcggctcgtggaggagcgtaaggggcgcgagtaggggttcgcggctttgctgcggtctctccctcacccggctataccgggagctccctcgtcagagggagcttaaattcggtctggttataggcccatgggcttcttgggctttttgtcgctcatgagcatgaggaagctgcgggactgggcggtgatcatgaagcccgcctcatagctcagttccggcccattcgggttgtgcgtatccacgaccagctgccatttgcggccgtatcgctcatccggcagggtgaacataatcggctcgtaatgcgcgttgaagatcaggatgaagtcattgtcgaccatccggttgccgtaccagtctacctccggaatatccgaaccgttcagatagatcatcatggagaacgcatgcgtgttctgccagtcgtccatatccatgatcgaaccggtgtggtcgaaccattcgacctgcggaatcatgttcgaatcgtcgccgggctcacggcctgtgaagaagcgacggcggtgcaacaccggatgatccaaacgcagatggatgagtttggaaacgaaggcgagcagttccttgcgtcccttgtcaagatgccagttggtccaggagatctcgttgtcctgacagtaggcgttgttgttgccctgctgggtgcgggccacttcgtcgccaccgcaaatcatcgggataccctggctgaacagcaacgtggcgaacatgttgcgcatctgacgctgacgcaagtcgttgacgtccggaatattggtcgggccttcaacgccgcaattccaagagcgattgttgctctcgccgtcgcgattgccctcgccattggcttcgttgtgcttttcgttgtagctgaccaggtcgttcattgtgaaaccgtcatgcgcggtgatgaagttcacggacgccaccggtcgacggccgttgacctgatacagatcggaactgcccatcaggcgcgaggcgaattcgggcagcgtggagggctgcgagcgccagaagtcgcgcacggtgtcgcggtagcggccattccattcggaccagctggacgggaagccgcccacctgatagccgccggagcccagatcccacggttcggcaatcagcttcacgcgcgagatgatcgggtcctgctccacgatgtcgaagaacgcggacagcttgtcgacctcctggaactggcgtgccagcgtggcggccagatcgaagcggaagccgtcgacgtgcatttcggtaacccagtagcgcagcgaatcggtaatcaactgcagcgcgtgcggcgagcgcataagcagcgagttgccggtaccggtggtgtcgaagtagtgctgctggtcgccttccaccagccggtagtaggaggcgttgtcgatgcccttgaagctcagggtggggcccatatggttgccttcggcggtgtggttgtacaccacgtcgaggatgacctccatgccggcgtgatggtaggccttgaccatggacttgaattcgttgacctgctcgccgcgctctccggaggaggagtaggcgttgtgcggcgcgaagaagccgatggtgttgtagccccagtagttcgacaggcccttctcctgcaggaaggagtcgttgacgaactggtggatcggcatgagttcgatggcggtgacgccgagcttcttcaggtattcgatgacgctcggataggccagaccggcgtaggtgccgcggatgtccggcggtacgtccatgttgaggttggtcatgccgcgcacgtgcgcctcgtagatcaccgaatcgtggtacgagatgtaggggtgctggtcgttgccccagtcgaaatacggattgatgacggccgacttcatggtgtgggcggccgagtcaaggtcgttcatcgccgaggtgtcgtccgggcttttgaaccagtaggagaacaggctttcgtcgccgtcgatgttgccttcgatggccttggcatacgggtcaagcagcagtttgttggggttgcatctgaggccgtgcatcgggtcatagggaccgtagacgcggtagccgtagcgttggccgggctggaggccggggatgtagttatgccatacgtatgagttctgttcggtcatttcgatgcgcgtttccgcatcgtgctcgtcgaacaggcatagctcgactttctgcgcaacctgtgagtacagcgcgaagttcacaccggcgccgtcatagctggcgcccagcggatacattgatccaggtctgatctgcatagttttcagtatcccactttcttgtgtcactgatgtgccggggagttgaacgtcaggagaacagcgacggcttgtctttgtcggagttcctggcgatgagtctgcgtaacgcctcatgctggatggcgatcatcgaattggatgaggtgatgcgcgtggcggcaaggtcgctccacggaatccacgcggattccacgtgctcgtccgcgtcgaaatggcgctgctcccgcctgaacgggcccaaatgcaacaccatgatgtgggccagttcgtcggtcatgccttcggacgagtagaaatcgcccacgaagtcaacacccatggtgtcacggtccggcaccacgccggtttcctcggccagttccctcagggccgcatccatgatgtcctcgccctcgtccatgagaccggcgggaagcccgtaggcgaacatgtccgatccggcacggtattcgcgttcgatgaggtaacggtcggtggacatgtcgtgcacgagcatgaccacacagggggcgtgacgcagcacctggcggccgatctcgtgttccttgccctgcttgtcggtcagagcgatgcgcatgtcgtccacgtggaagatgcgcccggtataaacggtttcgctactgatcactttggcgggcacgtccatgtcgatgccgtccgaggaggcgttcagcttatggtcgagccgatgctccagttgttcctgcttgcttcccccaaacatgtcatctcctcggaaaaaacgttttcgccacgtcactatagcgccttaatcccgatgcgcggtaatggacagcgtccatggatcggtcgtgtcgtggaaccactcgacttcaggccttgctccggtcgcttgttcgatggcggccggcacgtcatcgatcgcgtagttgaaccacatggattcgatggcggcatgaggggtgttgatgaagcagggacgcacatggctctcccccgccattccatggccgagcatgatgccttgggccctcatacgggcttcataccgggcttgttcgatggcgtcggtcaccgggtggtgacgcaaatcgctggttacgtacacgtccgcaccggtggcacgcacctcgttgaacagggagtcaccggagccaggcagaatggccacatactgaacaaaagtgtccgaatcgccgcatacctggatgccgagcgcggtggtcatgccatgatcggacacttcgtcgaatacacgctgagcgaaatccttcagggcaacaggcttcggcaaacgacccacacgccccaagccgaccggatgagaggcgtttgcatcgtcaatcggcacgagtggtttctggtcgatgagtccgaagtagtcggccgcagcctgccccacgccgcgatacgcagcgtcagcattggtgtgccctacccacagcccgcagccttgctggtagagcctgcggacgatgtcgccccggaaaccgagtccgctcgtctcgtgtacggaacggaagaacaacgggtgatgggtgatgagcaggtccgcgccagtagcgatggccttgtcaatgatggcggaggtcgggtcggcggcgaacacgatgcggtgcacgtcgtggctcagatcgccgacgatgagacccggctcatcccattcctcggcgtagcgcaatgggtacagggtctcgagaacgtcgatgacttgcttgagattcggcatatgtcccattgtagtgggctattgcagcaagggactcattctgcaattgcggacaagccatgctcgtgctcttcattgctcgactatcggctcgccttcgcctacaaacaatccactggactgtttgctcaacggctcagcctcctcacccgaggggagctagaaattgtcagtgtgcggcgagctgccagtcggaaccgatgccgcacgatacgtccagcggcacggcaaggtcgacggcgtgttccatggcgttgcgcaccagttcggtgacctggtcgccttctcccggcgcgatttccactaccagttcatcgtgaatctgcagaatgatacggctcttgacgtgggcctctgccaaggtctgctcggcgcgaatcatcgcgatcttcatgatgtcggcggcagatccctgaatcggtgcgttgagtgccgcacgttcggcggcctcacgcgcaacacgattggtcgaatgcagggccgggaagtagcgacgccgtccgaaaatagtttccgtataccccttctctcgggcattggccaccagcgattcaaggtaatcgtgcaccttgccgaaggtatcgaaataccggtttttcaacgcttccgcttcacgtggcgcgatcttgagctgctgggcgagaccatacgtgctcagaccataggccaatccgtagctcatggcttttacgtggctgcgctggtcgccggtgatctggtcgaccggcagcttgtagaccatcgaggccacgtatttgtggaagtcggctccggagcggaacgcttcgatcagcgcctcatcaccggacagatcggccatgatgcgcagctcgacctgtgagtaatcgcagctcatcagggcctcgtacccctcccccggcacgaacacgccgcgaatctcacggccggcggcgttccggttggggatgttctgcaggttcgggtccacggagctcaatcggccggtggccgcgacggtttgctcgaaagtggtgtggatgcgctcatctgatgtgttggtggcatcgatcagcgtttggacgatctgcttgagcttgttgatctctcggtggcgcagcaacgccccgaggaaaccgttggcccgctcattgtccactgatttgacatacagatcctgcaatgcggccgcattcgtggtgtatgagccggacttggtgcgtttggtgggtttcaaacccatatcttcgaacagcaccttctgcagctgcttggggctttgcaggttgatttcggtgccggcatactcccaagccatttcctgtgcttggcgagcctcggcggcaaactggtcacgcatggaaacgagtcgaacgctatcgactttggctcctgtgtgctccatgccgtgcagcacgcgggaaacaggaagttcaatcgcgcgcatcagccagcattgttcacgctcgtcgataatcggcccgagcgtgacggcgaggctgcggataatggccaaatcgcgcagacgatgttcgttcggatcttcttcgacctgatcgtcatcgaagtccaacgtgccttgcgaaggctgttcggtttcggtgaagtggatgtcgaggaagtgctcggccgcctgcttgaggctatcggcgtggaaatccggttgggccagatacccggcaagcttggtgtcgaacatcggcaggtccatgtcaagatctaccgcgcccagaagatgcagcaattctttatacccatgcacgatggtgcgggagtgctcgctttccaggaaccgcgcaagctgtgctcgcagggtatcggtgattggaaggggcactatggccgctgatgttgccgtggcaacggcaatggcttgtgccgtggcacgccccggcctttcgtcgccccatgcgg

SEQ ID NO: 3164 - DNA, 81177 bp, Unknown
  R53_2m  MAG No. k141_880
agacgatttgaacatcgacttcagtgccattgaacagaaccccgagccggtggaggagccggaagaagaccgtgtggcagagactcctcgcggcggtaagggcggcaagaagaggaccaagggcattatcatttcggtgattgttgcgctggtggtgattgcagcgatcattggtggtgtatggtactggcgtttcagcgagcagcgtcaggaaagccatcagctgcatcaggatgcgttgacagcatgtactgaggccgtggaccagaattccaccgctcagaaggcgctgaccaaggcgttggttgataccaagagtgctcaaagcattacagctgatcaagtggctgacggtgcgaccgtggatgcgctgaagaaggcaatcgccgcggtaaagaacgtggaagcggtggagtgcaagacttcagcttccacgtcggacctcaaggaatatgccaagacggccactagccagaccaagaccgccaagaagaacgccactgcgattactgccgcggcaaaggccgtgacggacagcaagaacgctaaggatcaggctaacgctcagcaggcgttgcagggcaagatagccgaggctcagactttactggacaacagcctgtatgcagtcgacgataattcaacgcgcgtgacactggaaagcgacatcgccaacgccaataccgtgctgtcccagcagggcactgacgtaaaggccatgcaggatgccgtcaacacgctgactgcgtccatggatgcagtcaacacgtccatggccaactacagcgcagctgttgaggctcagcaagaagcagcgcggcagaaagctctgaatgattattatgcacgattaaggcagcagcagttgttgcagcagcgacagcaaacacagccagacggtacagacgatccggggacaggtggccaggcggctgatcaggggacgaaaccgaaagatgatccggaaccgaaagatgatccggaaccgaaagatgagtcgaagtagtaagttatcgtgctctagcctaaattgtcaaaggaaccgcgaataacagtagtgcgcatttccaccatttgctgttgcaaaccagctcaatatacgcgtgctttgtgccgctatgccgtcacggattcgcataatcagttgtggagggcacttcatatgacacggtaaaagtggcctctagggcgttgcataatgcgaggattcggctgataaggcgcagaaatgccgatgccggtccccgatgattgggaaccggcatcatgtgcatgagttcgctcggcgtttgggccgggtttcactcagccttcttacggccgcggcgcttcatggtgcctgcagtggcgttggcggcgtcgaagatcacggtcttgctgtctgggtaggcggtgccgttcacggactgataggagacttcgccttcgggggattccaccaaggtgaagtctccttgcggcgcggaacttgttgtgtacgtgttgatttggctggcttagtagctcttgtgcgcctgccaatacgcgtacgcgccggaaatcgagccataatggtcgttgcaataattcacaaaccacttgaactgggtctggtagttggtctgccagtctgcacctgcggaagccatcttgctgcccggcagcgcctgcggcaggccataagcacctgaagacgggttcgtggcggtggggctccagccggattcgtggctgatgatgaagttggcggcggtgaagtcggcctcggagtagccgttggaaatcaggtagtcatgcgcccaggactgaatctcgccggccggcgtggtggtgccgaggctggcggcgctgggcgaagacacggtggcggtgcccaccagaatcaccttatcgaccggagccttcttgacccaggaggtgaacacattggaggaaacgacctgatctccggagcgggttaccagagacgtggtctccagcacgcccttctcgccttcggtctcgaccttctcctggcccttgggcaggctcgaggtctccttgcgcacttcattgaaggcgatttcggtgtcggtggtctccaccgtggtgttggcgcggttgatggaaatgactgtggactcgctgaccttggcatccaggctcggagtcacgctgtcttccggatcgaggacgatatcgccggtttccagcacatccttgacggtggtcatgttggctttttcgccgagaaccacgcgagacttgccattgaccttgactgtcacgtaggtggtgctcttgagcgcgccgcgggatgccgaacgggaagccgcaccatcagtggcggagaatgaggttggggtgatggaaggtgtagcggtgctcgactgatagaagtcgcgggatataacgcctgcagtggcaatgagacccactgcggccacggccgccgcgatcttcgcccactggccccgagacagggttttgacgaatgaggtccgctcagcgtgcttcgacattgcgctccttggttgggtacacactgctttccatcataggacgttgagtggatgaataaaaaaaccgtggtgggtgttcgacccgccacggatggcatatgtagtagttagcagtgcaaggaagcgctatatatgggcttttccgcgcttccgttgccgcagtgtgataaggcttactgctgctcctgcgctgcctgctgtgctttggcggcggccagatccagcgccttggcctgggcgatgaggtcgtccagatcggaggcctgcagcgcgccggcctgctggaagatgacctcgccctgcttggcaatcatcagcgtaggcacagcttgaatgccggcggcctgggccagatcctggttggcgtcgatatccaccttgacgaaggcgatgttcgcgttctccggctcgttggaggccgcctcgaaaatcgggccgaacgcgcggcacgggccgcaccaggtggcccagaagtcaacgaacacgatttcgttgtcggtaatggtcttctcaaactcagctgaagtgatggcggtggtggccattgaagttccttcctcaaacacagtgcttgatgctgtgtaccagtttcccagcaacacccaacatttcggcaaaagtttgtgccccaagctgaatggattgcgggcgcatggaggcgatgaggcgctttgctgagaattcacagacaatttttcggtgaattgtgcccatgttcatcaatgcgcgcgataatgagaccatgccagtcatgaatgatgaagtgcccgacgagggcgattatgatgccggccgtggccgcggcgaattcgacaacatcacgcccgaggacttcatccacgggggcggttccggccacggcaacccgccgggctggctgggaccggccgacatcaaccgggcgcgtcatcagatgcccatcgcatacgtggagatcgtgcccgtgcgcaccgatgagatgggccgcatctcccaggtgggctcgctgctgcgcgtcgccgaagacgggtcgatcgagcgtacgctgatcaccggccgtgtgctgtaccacgagacgctgcgcgaggccatcgcccgcaatgtggccaaggatttgggcgatatcgccctgccgctgctgccggtcgggctccagccgttcaccgtggccgaattcttccctacgccgggactgagcgaatactacgatccgcgccagcacgccatcgcactgtgctacgtggtgcccatcgccggcgactgcaagccacaggacgagacgctggatgtggaatgggtggatcccaagagcgacgtaatgaacacgttcgtgacgcagatggtcaacggccacgggcgcatcgtgcggcaggcgttggcctgggccggaatctgacagttgttttgcttcccgctggtggggatggcgcgtggcgacggagggcggtccgcgttgaaaccgctcccagccgactgagccgacagctccgccagtggggtgtgaatgtgaaggagtaattcatggcaatcgaattggccaatcatatctatcgcgatggcgaaggcgtgccggtggtgctgatgaacgcctacccggtggaccaccgcatgtgggacgtgtgcgcgaaggcgctcgccgacttcgccgacctgaacgatgtgccggacttcccgatttgggcgccggatatggccggctccggcgcatccccggtgccgagcgatgccgattccggcccgcgtatggccaacggcgcgtacagcgaggcgctggatcgcctggccggagcctacgtggacctgatcaaggccgccggctacgagcaggcgatctgggtcggactgtcgatgggcggctacgtggcgatggacatccagcgcctgtaccccgaaacggtggccggactggccttgtgtgacacgatggccgcgtccgacggcgtgggcggagagaaccgactgaagatggcggacgccgccgaacagacgaactcggtcgaaccggtcatgcacttcgcgcaaccggccgatggcgattccaccgtcaagaagactcctgaattcatcgcgaccatgaccgactggatcaacgaacagaacccggctggtctggcctggcgtcagcgcatgacctatggccggcccgaactgggggcggtgccggaaacgatcagcgcaccgagcctggtggtgtccggcgaactggacccctccagcaatccgagtgtgatgcgtccgctcgccgagcgaatcgccggcgccgaattcatcgacattccggactgcggccatttcagtgccgtcgaacatccggataccgtggcgcgagcactgctctcgctcgtcaggcgcgtgcagaacgcgcagaagaacgcataggagacctcgatgggcactgacattcatttttcgcccctggcgctgacccatgcgctgccgttcctgccgctcgcgcaaggtgacatcgactatcaggtggaccggcgcggtgaacccggtctgatcgacgagctgttggccgagccgaccaccaaagtcgtgcttacgcgcggcggacttgtcgccgtaccgcgcggccaaggcgagctcgtggactatgagaacgtgaaaatgcggctcgccacgttgccgggctcctatgtgtccgccgaactggcacgctaccccgaagcggtcgccatgttccttggctcctatgtcggggcgcgcggcgaatccgtggtcgccgtggatatcacgcgcgtgccggaagccggcgttcccggtgttggcgggattgctggtgtttccggtgctgccggcggcgtgctcggcacccaggattccggcaccgtggacggcgcgctgggcaagaacggcatcagcggaggtgctgccgccggaatacggcagccgggaaacgccaagggcaatggtggcgtaaccacagccaagatttccgggccgctcggtgtgccggattcggcagggcaaggtgcggacgatgccttcgatgattcggtcggcgcgcccgtacagcccttggccccgaagcccacgctgctgcaacaggccgtgacccggttcgactgggtggacctgcgcggattcgcccctcacgccaacgcgcgcgaggctgggcaagccaccagtgccatcaccttaagcatctggcacagccgccagcggttctgccccacctgtggcgcggcggtccggccggcgctcgccggatgggcgcagcgatgcaccaacgaggcggacggcaaccgtgtgctgttcccacgcgtggagccggcggtcatcaccgccatcgtggacgggcgcgatcgtctgctgctgcaacacaacgcggcatggaaggattcgaggctgtattcggtgtccgccggatttgtggaggcgggggagaaccttgaacacgcctgccgccgcgaggccatggaagagaccggcatcaagctcggcgaggtacggtacctgggctcgcagccgtggccgttcccggcttcgctgatgatggcgttcaaggcacatgcgatcaccaccgacgtgcatgtggacggcgaggagaccatgaccgcgcgatgggtcacacgcgacgaatacacggccgagctcatcgccggccgtatggcggcgccgggccgcgccaccatcgcccgctacatgattgaggaatggctcggtcgcgagctgtgacggaccgcgaagataggttaggcttatgactatgagtgatgacaacgaaaacgaacagccgctgaacctcgacattcccgaccacctcgaatactccgaggagcatgcttgggtggaccgttcggtcgaccccgcaatcatcggcataaccgaatacgccgccgaccagcttggcgaacttgtgttcgtggatttgcctgagcctggcgcccgtgtggaggccggcgacgagatcgtggagcttgaatcctccaaggccgtccagccgttgatcagccccgtggcgggtacggtcaagtatgtgaaccgtgacgtggcggacgacccgtccgtggtcaacggcgatccgtacggcgaaggctggctgctgaaggtcgagcttgacgacgatgagccggagctgctgagcgccgacgaatacgcgaaggtcgtgcggtagttccacccatggctcccctccctgaggggagccagtatgtggcatcaaacctatatgcatcgtgcctcttatggaggggagccaagaaaatgaggcgtatggcctatattggtgtctatgagaagcccacgcgaggattttgaggcggcaggcaagcgactgccttgggatgctgctgctcgcaatgcagcgctgtccgccaccgcgccagtctctgacgtcaaggcatccgccaatggcgccgacaatgccagcaatgccagcaatgctgaacattccgatgacatgcccaccgtgccgattcccgcacgcaaggctgccacgacgttcgacaccccctccaagcgtgagcgcatcgaggtcaagccgccgatcacccgcttcatacgtcgtgccatcacccgcgtgttcggcgtatggtcacacatctccactcaggtggtgcgccaatggggctggtatccgcgagtggaaccctatgtgggttatggcaccggcgattactcgcgcctgatctgccgcacggtatacgcccccaagcatgcgcaatccggcgaactgatccgcggcatccgcggcatgcttgccgtgcccgcgccgcgcacccacgtgcaggccagcattgatgacacgccgctcaacaccgtgcagatcggcgtctccgaggtctatgacaaggtggaccgcacgcgcgatctcggcagcgaatacgccatctccgattccgccggatacctcgacctcgtggccgagcatcgtctggtgcccggcatccatcgcgtctcctacagcgtggccaaccgcaaacccgtgagcgccaacctgtacaccatccccgccagtgccaaagtcggcatcatctccgatgtggacgacaccatcatgatcacacaggccccggtgccatggaaggccgcgtacaacctgctgttcctcgaccccaagaagaaagcctccgtgccgggcatgagcgtgctgttcacccgcatcgccgacttgttccccggcgcaccgttcttctatctttcgacatcgccctggaatgtggagagttcgattcgcaacttcatcactgaccatggttttcccgaaggcccgctgctgctgcgcgacctcgacccgaggcccaagaccttcgtgcccaccggcccccagcacaaacttgagtttgccgaacaacttatggccgacttcccggacatgaagttcattctggtgggcgatgacgggcagaaggacccgaccacgtacgccaccatcgcccgcagatatcccggacgtgtactggctatcgtcattcgtgagttgagcccgcgcgaatcaaccggattggcgtcggtgacgggactcacctcgacccagccgactccggtaaccgatgtaccagtattcaccggcaccaccggctcgaacattctgaagaccatgctgccgtatctgaagacggtgttgcgataagcgcggcgtgatgaacgccgaatgcgtcctggtgtggtgcctcgcctataatcgcgtggtatgactgacgagagcacaaacgccgcggccgcgatgccgccttacgccaagcgcgagccgaagcgccgcgaattccacggtgacgttttcgaagacgattacgagtggatgcgagacaaagactccgatgatgtgcgcagctacgtagctgccgaaaaccagtactgcgagcgtcgcatggcgcatctggcggatttccggcatacgttgtttgaagagctgaaatcgcatgtggaagagaccgatatgtctgttcctacgcgcgtcaatgattactggtacttcacccgcacgcagcagggcaaacagtatggcgtgcaatgccgcatccccgtgcgcgatgccgatgactgggacccgccggtcgtggatccgcaaggcgcgcccggctccatgcccggtgaacaggtcgtttttgatgcgaacaaggaatccgaggggcatgacttcttccggctcggcggcttggatctgagcaaggacggccgttggatgctgtacggcgtggatgttgcgggagacgaacgatatgatttccgcattcgcgaccttgccgggctggagaccggggagccggtcagcgaactgcccgaacagttcaccggcattggcagcgcatgcttcacgccggacggccaatgggtgttctgggtggaattggacgattcctggcggccgctcgccgtgtggcggcatcgtgttggcacggcggtcgaatcggatgtgtgcgtgtaccgagaaaccgatgaacggttctgggtgggcgtcggcatcagttttgatgagcgcaatatcgtgatcggcaccggttccaaaaccaccaccgaagtgctgatgctgccggtggccacgcctgaaggcgaattccaagccttcattccacgtcagaacgatattgaatatgatgtgagctttgcctgttttgaaggcgcgggggagaacggtgcggatgtgccgctcgccgtggtctaccacaacgccgccaatccgaatttcgaaatcgacgtcattgacatgcgtggccatgagccgccgtaccgactcggcgaaggcgtgtgcatcgccgccgggtcgccgtacggctgcgaacatggtgagccggataagccgattaccgaggcatacttcaacgccgccaatccggcgatattgcagggtgcccacggtctgggcatcgaaggcatcgcgttgcatcgcaactttgtgtccctgagctaccgtgccgacggccagccgcacgtggcatacatgaccaagagcgcggccgccgccgacttcctggccggacggccgtggcggtttacggaactgctgccgcctgccctggaggacgactgggacatggtcgccgccgatcgcgaaaacttcaccggcgatcatggcgaaatcttgtggaccgaagatgaggcccccacggatcacacgtcatcttccgatggtgccagcgacgaccacctgcccggtgagacccggcgcttgtacaccatcggcgtcggcggcaacccctcgtatgaggcgccgcgcatgcgctactcgttcgccagctacacccgcccgggcgagctgcacgaaatcgatcccgccaccggcgaagatgcgctgctgaaacgagccaccgtgctgggcgacttcaatccacgcgattacatggaacgccgtgtgtggattaccgcgcgcgacggcgaacgcattcctgtttccctcgtctggcaccgcgattgcccggcgcaggattcgccgatgttcattaccggatatggtgcatacgagatttcctccgatccggggttctcggtctctcgtctgagcatgttggatcgcggtgtgctgtacgccgtgccgcacattcgcggtggcggcgaaatgggacgcgcctggtatgaacaggggcgcagactgaacaagaagcattcctttgaggacttcgtggacgccacgcgcgcgctgcagaaggcgcatttggctgatgcttggcgcaccgtggccaatggcggatccgctggcggcctgctgatgggcgcgattgccaatatggcgcccgaatgctacgccggtgttgaggcggatgtgccgttcgtggacgcgttgacctccattcttgacccggacttgccgttgaccgtcaccgaatgggacgaatggggagacccgttgcatgaccctgaggtgtatcagtacatgaagtcgtacacgccatacgagaatgtgccggtcaccgtgctcgagggcggcgacgacgaggctgccggtgacggcagtgctgatggggctgccgccggcgcgctcgccgccgcgcaattcccgagaatcttcatcaccacctcgatgaacgacacccgcgtgctgtacgtcgagccgctcaagtggctggcccgtctgcagtccgccggcgtggacgcggtggccaagattgaggtcgaggccggtcacggcggtctatccgggcgttacaaacaatgggaagaggtttcctatgagaacgcttggtgcatggatgtgatggggctcgctcattaggtcatttcgtcgttcattaggtcggtgtcctcttctatgtgagactgaaatgccgccatttcagtccctgaaatgaacccacaccgacctaatgaacactaaaatgacctaatgaatgtctcgacacgatacgcatgttggttgtgtccactagctgagcgggttcgggccggcaggtggtcgcgcgagtaggctccttgaactatggcaaagacatataaaatcgccgttattcccggcgacggtattggcaaggaagtcactccgtgggctcagaaggctttggaaaaggccgctgaaggcgtagctgacttcgagtatgagaacttcgacttgggtgccgagcgttatctgcgcgatggtgcgatcctgcccgaggacgaagaggagcgcatcaaggccaacgacgcgattctgctcggcgccgtgggcgatccgcgcatcaaggccggcattctggaacgcggcctgctgctgaagctgcgcttcgacctcgaccagtacgtgaacctgcgcccctccaagctgtacaagggcgtcacctcgccgctcgccaaccccggcgacatcgacttcgtggtggtgcgtgaaggcaccgaaggtctgtactgcggcgccggcggcgcggtgcgccgcaacaccccgcaggaggtggccaccgaggtgtccatcaacaccgcatacggtgtggagcgtgtggtgcgttacgccttcaagcttgctatgaagcgcaagaagcacgtcaccctggtgcacaagaagaacgtgctcgtcaacgccggtgatatgtggcagcgcatcgtcgacaaggtcggcgaggaataccctgaggtcacccacgactaccagcacatcgatgcggccaccatcttcctggtctccgacccgagccgtttcgatgtgattctcacagacaacctcttcggcgacattctgaccgatgaggccggctccgtggtgggcggcgtgggctactccgcctccggctgcatcaacgcctccgacgagttcccgtccatgttcgagccgattcacggttccgctccggacatcgccggtcagaacaaggccaacccgaccgccgccatcctctccgccgccatgctgctcgagcatctcggctttgatgatgcggccaagaagattcacaccgccgtcgaagcggacatcgaggagctcggctccaccgtgcgctccaccgaccaggtcggcaaggacattctggcccgcatgtgatgtcccacttggctcccctccagaggggagccaagtttatactgagttgcatgcaaatgcgacatggggaatgcaaaaccgttggcggcaaactagtcgccgtgaccgtatccgtcgatgatgacggcaccgcacagtcatgccatatcagcggtgatttctttattgaatcagtttcggatgccgaatctcatgctttgttgcgtgacctggaacaggctctaattagcgatgattcattgcggtccgtattggacgctcaccctagttgccgaattatcggcacagatgaaattgccatcaaaaccgcatacagccgagccgtaagcagcaacttgcccccgctggcgggggctcctgcgcagcgggtgggggtggtcagccccgatgcatcgaacaccccggcatccatcaatacacaaaccaagcagcccgacaaaagctctgaataccgggagcgctggaacgccctcagacctcaactcaccgtgatccacgaccatccgcgtactccggacgagcaaatggccattgacgagacctgggcgcgtgaagtcgcagcaggaacacgacagccgaccatacggttctgggagtgggcgggcccggctgtggtcatcggccgtttccaatcggcccaggacgaggtgaatctggacattgccgagcagctcggtttcgacgtggtgcgccgttgcacgggtggtggcgcgatgtttatcgaaccgggcaacaccattacctattctctgtatgcaccgctcgatttcgttcagggcgtaagcatcgaagaatcctaccggctctgtgactggtggctggtcgaagcgctgcgcgaacttggcttggatgtgcggttcgcgggcctcaatgatatcgcctcgcagtacggcaagatcgggggagcggcgcaacggcgcttccccgtaggctcaggcggcgcggtgctgcaccatgtgaccatggcatatgacatcgatgcggccaagatgagccgtgtgctcaacaccagtcgcgagaagatgtcagacaaagcggtgaaatcagcagtcaaacgcgtggacccgatgaaaagccagacgggtctcagccgcgaacacatcgtcgaacaccttattgactggtttgcggcgtgatttcaccgatggccgtatacgattttgctggtggccgtgcgtggttttgtcatgggcgagcgcggtaaccgcgacagtgccgtttttcgcggtaacacattcgtcagcatgtcgtacggctatcggatcgcgccacacatgaagtgacgaatgatggcatgcttctgacgaaacctgtggggcgcgttacaatatgacggatggccgacgacggtcgtaggacaataaggatggtgcgatgagcttggaaacgccaaacgcttttgctgacgaggagaacatcctgctgcatacggcattgttcaagcaggtatcgccagccgaagccgaggagctgctgccgcatttgaagcgtgcgaccttcgataagggcgactatatcttctccgaaggcgataccgatcagcgcatgtatctactggagcaggggcgcgtcaagctgattcgcacttcttccgatgaccgcgtgcagctgctgtccatccacgcgccgggcgaagtgcttggcgagattccggtattcgaccctcatggtggcccgcgcaccgcgtccgcggtgtccatgagccatggcacgcgcgtggtctggctggagcatgatgccctgttcgcatggcttgatgagcatccgcgtgtggccatcgacatgttgcaggtcatggccaaccgccagcgcggcaacaacgaacgcatctccgacttggtattcatggatgtgccggcgcgtctggccaagacattgctcaacttgggctcacgtttcggcgagccggtggaacagggcctcaaagtgccgcatgacctgactcaggaagagctggcccaactggtgggctccagtcgtgagaccgtgaacaaggcgttgatggacttttccaaccgcggatggatcgcacgtgacggtcgatcgatcatcatcttccagccaggcatgctgattcgacgctcgcggcgctgaccgttcggctgacttccagccaatgttacgctagtgcggttcttgtgatgatatgttcacggaagctgactgcgagcccggttggtagggcaccccatttagaatggggcccatgcccaaaaagaagtccctcactctccaacgtgtgcttgttctcctcttggcctatatcatgcttgccgtctgcggtggcgtggcggccagcgtgttgtttgtaccgggtgtggtcggtgccaataaagccgccaaagcggtgattccgtcgctcaaggtagaaaacgtggacttcgacgtgaccggtctgccccagaagtcgacgatgtacgcgcgagacggttccaccgttatcgcgacgttctacaaccaaaaccgtatcgtcgtgccgctgaagaagatttccaaaaccatgcagcaggcagtggtggcgcgcgaggaccgtcgattctggactcacgccggcgtcgacgtgcaaggcgtgatgcgtgcgttcgtgcagacctacctcgtcaaaggctcccagcagggtggttcgtcgctgacccagcagtacgtcaagaacgtgctgctcatgcaggcgatcgaggacgacgacccgatcgcccagtaccatgccaccgaagacaccgtcgcccgtaagattcgcgagatgctgatctccgtgcagatggagaagaagtattccaaggccgagattctgcagggctatctgaacatcgcccagttcggcaacaacctgtatggcgtggaaaccgcagcccagcgctacttcagcgtgtccgccgccgatttgaacgtggtgcagtccgccaccatcgcggctatcaccaagaacccgagccagtacgatccgctggtcgaggagaaccagaaggaaagcgagaaccagcgcaacatcgtgctcaagctgatgctgcaggaggggtacatcacccagaagcagtacaccgaagccgtgaacacgccgctgaaggacacgctgaaggtgcaggccgtgaacgtcggctgccaggacaccggcgactacgcatacttctgtgatttcgtggtgcatcgcatccagaactccgaagaattcggcaagactcgtgcggagcgtaacaagctgctgcaggagggtggcctgaagatcgtcaccacgttggatgtggaagcgaattccacgatgatggagaccgcgcgtaataccattccaccggacgatcccagcggcatggaaatagccatggccgcagtcaaaccgggaaccggcgaggtgctgagctttggcctgaatcgttactatgacgccactccggcagccgcgaacgatccgaccaagtcgggccagaactatgccgtcgatctggtggacggcggcggctccggttggaccattggttcgtcttggaagccgatcaacctgattgcgtggatggaggcgggtcattcgatcaacgacaacctacagaccaccacgacgtaccccacgaccgacttcgcctgcaacaactacaagggcggtgccgattcgtggaacgtgtcgaacgccatgggcgccggcacggtgaacccggaaagcccgttcctcggtctggtgcgatcgcacaacaccacccaggcctccatgggcgccatcctcaaactgtgcaaggtggcggacaccgcgaccaaactgggataccatgacgccgccacgggtgagaccatcgacaaaacccaggtgtatacaccatccatgatgatcggctcggtgaatgtgtccccgctgaccatggcgagcatcttcgccgtatacgcctcgaatggtgtgcaatgcaacccgattgccatcagcaaggtgaccgataaggacggcaacgatctcaaggttccatccgcgaactgccatcaggcggtggataaggacatcatccaaacactcgcttataccctgaaccaaggtacggtgcggccggatggtgccggttggtcattcagattggctgacgggcgtaagtcgtttggtaagaccggtaccagtgaggatcttgcggtgtccggtggatcgttcattcctaatcagattgcggcgttcgctgtggtcggcgatgcacagaacccgtacaccaaccgtatttccaacattgccatcaacggccggtacaacagctattgggatggttcgacaatcgcagctccggccgttaccaacttcttcaatagctacatttccaagaagaaaataccgattgacaacgattacggccagcccgtctcgaagtacaccacgactggcaagtacctgggcattggcggacgaacgttcagcgtgccgcagaccactacgaatggcaacagccaatcgcagacgaccaccaatggtcaatcccagtcgcagtctcagtcgcagaacactgggcaaaacaacacccaaacccagggcaccaattcagagcggtcgaatgatggccagtgattggtgattggcgtttgacatttggtgattgcaggccggctgagtctacgtaacatagtcgactgcgatgcccaaattacgtagtttgcgggcgttacctgtttcaggtgacgcccgttttacaatacttaatgacaacgccagcgcgttcatcgaatattcgccatgaacgcgcattggaaaggggaacgatgagcaacgacgatctgacgcatgagaattttgattttcgtggattcgacgtgccggatctcaaagcggtgacgctggcttcgtcttcggacggcgaacagtccaagcagccgaagaccaagcacgaggatgcatcgaggaaccgtaggcacggtaagaagaagtcaaaatccgacgcacggtccaagaagcgggccggcgcgggcaagacgagcgaatcgttcgatgattatgaggattatgaggaaagggaagctgtgagcaaggcagataagaaagccagcaaggaccgtccgggactgtttgcgccaatgacgctgcgcgaagtgaccgtgcgtaatcgtatttggttgccgccgatgtgcacgtattcgtcgttcgcctgcgatggtaggcccacgccgttccactaccagcattacgtgtctcgtgcgttcggcggattcggcatggtgatcgtcgaatccaccgccgtggctcctgaagggcgtatcacgccgtgcgatctgggcctgtgggaagacgggcagattgatgcttggcgctggatcgtggacggtattcgcgaggcgggtgcggtgcctgccatccagctcaaccatgcggggcgtaaggcttcgaccggttgcttcgccgttggttacgacggtcagagtgtgccggaggaggcgggcggctggcccaccatggcaccgtctgaaatcgcgttcggcgggctgcgtacgccgcgcgcgctgtccgtggatgagattcatggtctggtcggtgcgttcgccgcggcggcgggccgtgcggtggccgccggcttccaggctattcagattcatgctgcgcatggctatctgatttctcagttccttgacccgctgagcaatgagcgtgatgacgaatatggtggcgatttgaccggtcgctctcgtttcctggtcgaggttgtggatgccgtgcgcggggccgtccccgagggcgtgccggttctggtgcgcatttcggccacggattgggccgctggcggttgggatttggatcagaccattgcactatccaaggtgctgaaggagcatggcgtcgatgtgatggacgtgtccactggcggcatcatgtcgggagtgtcgattccggtcaagccgaactatcaggtgccgttcgccgagcaggtcaagtccaaggccgatattccggtgaccgcggtgggtcttatcaccaagccgaagcaggcggccaagattttggcccgtggcgaagccgatgccgtggaaattggccgcgccgcattgcgcgatccgtactggccgttgcgtgcggccaacaagctgggcataccgtccacagaggtcccctacgccccgcaatacgtggccggtgcgtactgaatcctcatggggcggtgactttcccatggggcggtaaaaccctcatggggcggtaacccaaaacggcggtattctgcggaatgtgaaatttggctaaccgccccatgggtaatagggcaggcaatatgtgagttcactccacgtccacgccgacggcgtcggagacgtgctcgaatccgtcgcggcgcagcagctgggccagaccgcgcttcaacacggtgatctgctgcgggcctcggtacatcagcgagctgatgaacatgaccaggctggagccggaacgaatcttcgcataggcttgctcgggggtaaagacgccaccgatgccggcgatggcgaaccggtcgccatactccttatacaccttgcgaatcagctcggtgctggcgttggtgcacgggccgccggacaggccgccctcccaatcgcgcggaatctcgaggccggtgcggtccttctgcagattggcgatggacagcccctgcacattgtgctcggccagcacatcgagcagctccttgtactcgccccacggcttgttcaacggcatcttgaccagcgtgggctgcgggcgttcgatcttgtcgagcgccgtaaacagacggtcgagcgcttccggagtcgcggtgaacggttcgccgacgtgcgtgttcgggcaggagacgttgacctccaccatcgcggtgcggccggcggcgcggcgcatcgaaatgcagtaatcctcaatgccttcgtccaaatcgccgcactggtcgtcgttggtgcgggcgatcgacacagacagctgcatctggcgggcctgagtccaagccttctcggcgcgctcgatgaccttgtccgaaccgatgttggcgaggccgacgtgcaccatcatcgaatcgtattcaggcagacggtggaaccacggcttggcgttgcccgggcagggacgcgaggtggtggagcctacggtttcaaaaccgaagccggcatggtccagcaccacgggcatgtcgcagttcttgtcgaggccggcggacaggccgaacgggttggtgaaatcgacgcccatcacattcgtttccagaatggggtcggtgtagtcgagcatcagctgctcggcgagcagcagcggcgggacgttcttgacgacgtggcagaactcgatcatctgatcgtgtgcctcatcggggcggtggttgaacacgaagttcggtttgatgatgtgcttgtagccgaaggtgaacagatcggtggtggctttgttgacggcgtcgtgccagaagctttcagaaacgtaagtcataccgcctattgtctcacgcttgggctggtgcggctaggcgattcctgcctaggcgaattggggaaggggctaccgcgtgtcgaggcgcacgcaggcgtcggctcggcagaagatacatgaatcgggatgcaccaggtatcaggcgtgactcgccgctgagcaacgcgctcgggagagtcgtcggtcgtgagtcatcgcgctagtggtcgctgcgagaatatcggttcgcacaatgtgcgattttgcgcggttttgtggaaatgaacacctgaattgcccggaattttcgagagattgtccccaaaacgctcaagccggtttggtttgtgagcttttgtgtgcgataatgttcacatgatttcgtcacaacgtcagcacctcatcttgagcaggttgcgcacgcgcggggcagtgcgcattacggcgctatcgaaggaactgggtgtgtcagcgatgaccatccgccgcgatatcgccgaacttgccgacaagggactgctgaagcgcgtccatggcggcgcggtgactaccagtaccttgctcagcgaacccctgttctctgtcaagtcccagatggatctcggcctgaaggacgccatcgcccaggaagccatcaaatatgtggctcccggcgatgtgatcgccatcggcggcggcaccacggcctatgtcttcgcccagcatctgctcgaatcgcagcagtccagcggcatcaccatcctcaccaattcgattcccgtggccgaactggtccaggccctcgaatccaaggacgtggaggtgatcgtcaccggcggcgtgatcacccgatcgaactcgcttgtcggtccgatcgcggacaaggtcgtcgcctcgctgcgtgtcaacaccgtattcctcggcacccactcggtgtcgattccccgtggcttcctgatgccgaattcgctggaagccgcaaccgatatggcgatgatggacatcgccgatcgtaccatagttttgaccgatcacaccaagtggagctgcacatcgctgtcgctgtttgcgcgcttcgaccaggtggacacggtcattactgacgacgggctcgatcccgactccgccgccaaaaccaaggatttggtaaaggaactcgtgctggcccaccagagcgagatcattgaggaaagtgagtaaacccatggctgatttcgccaactacacccccggggagtatgcgaaggagcacatccgcatcacgccgacgacgcttgccgacggtcgtgacttcttctacctggacgacgaccccgagttcgtctccggtgccaagacccgcgagctcaaggacccgcgcccgctggactaccgtttcgccccgcacctggacgccgacggcaacgaagtgccgtacgccgccccgcagatgcgccgcgacccgctgaccggcgactggatcccgatggccaccgcccgtatgaaccgcccgatcaccgccggccccggcgccaccgccaagggcaacccgctggccgcccgcaagcccggtgacccgtaccaggacggcgaagtgccggacaccgcctccaacgtcgtcgtgttcgagaaccgcttcccctccatggtgcgcgtgcccggcgtctccgaggacgtgacctacgttgacggcaacccgctgtgggagaagaagctcgccgccggccgctgcgaggtcatctgcttcgacccgaacgaggacggcctgccggccgatctgccggtctcccgcctgcgcaccgtggttgaggcctgggccttccgtaccgtcgaaatctccaagatggaaggcatcgagcagatcttcccgttcgagaaccacggccaggaaatcggcgtctccctcgcccacccgcatggccaggtctactgctacccgttcatcgccccgaagatggagaaggaactccagcacaccgaggcctaccacgagaagaccggcggcaacctgcttaaggacatcatgaacgccgagctcgaagccggcgaacgcatcgtgatgcgcaaccacagctgggtcgcctacgtgccggccgccgcccgttggcccctcgaggtccacgtggctccggtgcgcgacgtgctcaccctcgaccagctcaacgacgaagaacgctgggacctcgcctccatgtactcgcacctcctgaagcgcggcaacgccttcttcgacaagggcgacggcaagggcatggatctgccgtacatcgccgcctggcaccaggccccgatccacgacgcccgccgcgagaactaccgcctgaacctgcagttcttctccttccgtcgtgccgccaacaagatcaagtacctcgctggctccgaatccggcatggccgcctggatctccgacaccacgccggaactcatcgccaagcgcttccacgagctcggctccatcgacatcgccgactgatagaaagaaaacatcaatgactgctgttgaattcattgagccgctgacccatgaggaaggcgtctcgcaagccaccaagctgttcgtcgatacctacggcgctgcgcccgagggcgtgtgggctgctccgggccgtgtgaacctgatcggtgagcacaccgattacaacgccggcctgtgcctgccgatcgctctgccgcaccgcactttcatcgccctgaagccgcgcgaagacaccaaggttcgcgtcgtctccgacgtggctcccgacaaggtcgccgaagctgatctcgatggcctcaaggcccgtggcgtggacggctggtccgcctacccgaccggtgtggcctgggcgctgcgtcaggctggtttcgacaaggtcaagggctttgacgccgccttcgtctcctgcgtgccgctgggctccggcctgagctcctccgccgccatgacctgctccaccgctctggctctggacgacgtgtacggccttggctacggcgattccgacgccggccgtgtgaccctcatcaacgccgccatcaagtccgagaacgagatggccggtgcctccaccggcggtcttgaccagaacgcctccatgcgttgcaccgaaggccacgcgctgctgcttgactgccgcccggagctgaccccgctggagaacgtctcccagcaggagttcgacctcgacaagtacaacctcgagctgcttgtggtcgatacccaggctccgcaccagctcaacgatggtcagtacgctcagcgtcgcgccacctgcgaggaagccgccaagattctcggtgtggccaacctgcgtgtgaccgccgacggcatctccaaggccgatgaccagttccaggccctcaaggaaacgcttgacgccctgcctgacgagaccatgaagaagcgcgtgcgccacgtcgtcaccgaaatcgagcgcgtgcgttccttcgtgcgtgccttcgctcagggcgacatcaaggctgcgggccgtctgttcaacgcttcccacgattcgctggccgccgactacgaggtcaccgtccccgagctggacatcgccgtggacgtggcccgcaagaacggcgcctacggtgcgcgtatgaccggcggcggcttcggcggctccatcatcgctctggttgataagggccgttctcaggaagtcgctcagaagatcgccgacgaattcgaaaatcaaggcttccacgcaccgcgcgccctggccgcgtacgcagcgccgagcgcttcgcgcgaggcctaggacaagccggtgggttgtccggcggatgcggtcgaggtcgagccaataggcgaggccgaggtaatgctgggtcggccgtaggtcgtccgtaattgcaggaccgcgtgcgcagcgccgagcgctttgcgcgaggcctgagccattgcaagctccctctgacgagggagcttcgttttatcccgcaccaccaccatgcccgccggcgcatccggcaccacttattcccataacccccataacgctcctgaaaccaggcatttcgaccatccgcataaggtgatgctcggcctgtacatcggcgcattcctcggcatgctgtccgagacatccatgaacatcgccctgcccgatttgatggacgagttctccgtatcctccggtaccgcccagtggatggtcgtcggctgcatactggccattggcgtggtgatgaccgcgatcggcggcgcactgttctttaccatcggcgtcaactcgggcgttgtgctggtgttctccttcatgttcaagggcggcaaacgatacatgaatcggtaatgaacataatggcgggtgtcttccctataattgggtagtcacccgctttttgtatacgaccagggagttccatgaacaaggcaatcatcaccgtcgtcggtcaggatactgtcggcatcatcgcacgcgtctgcacatacctttccgaacatcaggtcaacgtgcttgacatttcccagaccatcatcgacggttacttcaacatgatgatgattgtcgactacgccaacgcggacaaggacttcggcgcgatggtcggcaaccttgaggacctcggcgacgacatcggtgtgcgcatccgctgccagcgtgaggaaatcttcaccaagatgcaccgtatttgaggcggcccgctcagcaggccgccgcacgcgaggaggcggaaagcccggtgggctttccgctgacggagccatccttatccctctgatgagggtgaccgccaaattagtcttcaaatatcctgtaaggaacaaaccatgctgaacatcatggaggtccacgagaccaatcagatgatcgagcaggagaagctcgacgtccgcaccatcaccatgggcatctcgttgctcgactgcgcctcggacgacgtcgacaagacctgcgacaacatctaccgcaagatcactacctatgccaaggacctcgtttccaccggcaaggccatcgaacgcgactacggcatcccgatcgtcaacaagcgcatcaccgtcaccccgatctcgctggtcggtgccagctcctgcaagacgagcgaggacttcgtcaagatcgcccacgcgcttgacaaggcggccaaggaggtcggcgtcgacctgatcggcggctactccgcactcgtctccaagtccatgaccccggccgaggagttgctcatccgctccctgccgcaagccctttccgagaccgacatcgtctgctcgtccgtgaacgtcggctccaccaagaccggcatcgacatgaacgcggtcgaactgctcggccacatcatcaaggacgttgccgagcgcaccgccgacaacgactcctacggctgcgtcaagttcgtggccttctgcaacgtgcctgacgacaacccgttcatggccggcggcttccacggcgtcaccgaaggcgacgcggtcatcaacgtcggcgtctccggccccggcgtggtctcccgcgcgctcgatgcggccaaaggcaaggacttcgaattcctgtgcgagaccatcaagcgcaccgcgttcaagatcacgcgcgtgggtcagcttgtggctcaggaggcttcccgccgcctcggcatcccgttcggcatcatcgacctgtcgctcgccccgaccccggccgtgggcgactccgtgggtgaagtgctggagaagatcggcctcgagcaggtcggcgctcccggcaccacagcggcgctcgccatgctcaacgaccaggtcaagaagggcggcatcatggcgtcctcctacgtgggcggcttgtccggcgcgttcatcccggtctccgaagacaagaacatgatcgacgcggcttcttccggttgcctgaccatcgagaagctcgaagccatgacctgcgtgtgctccgtcggcctcgacatgattgccattccgggagacaccaccgcagccaccatttccggcatcatcgccgacgaggccgcgatcggcatggtcaaccagaagaccaccgccgtgcgcgtgattccggtggaaggcaaaggcgtaggggagatggccaacttcggcggcctgatgggctatgcgccgatcattccggtgaaccagaccagctgcgaggccttcgtgacccgtggcggccgaatccctgcgccgattcacagcttcaagaattgattcggtagggtatctgctttcagagaggtacatttggcccctcgcggagagctatctgctttcaaagaggtacctatatgcggaaaccccgggtatgagcgttggaatatcaacactcatacccggggtttctcgattgcggtacctctttgaaggcagatagcattctgcaaacgctcgaatgtacctctttgaaggcagataccagctcgaattacctttctggaggtctattcccgtttcgaggggctgattccgacctttctggaggtctacttccgtttcgaggggctggtatatatgaagaccccgagtacaagcattgatatttcaacggccatactcggggtctcgtcctttgacagccccttgaagcggcagtagacctccggcggatgccaaatccgcccctcgaaacgcaggtagccttatattcagcgttcatcactgcgcgaagctcagtgtttccgctctcgcgcctgtcggcgttcgttcggcgtcgttactcgaaggcccaccgggccttctcctcacgctccgcccgcaaaattgagctggcgccaggcttcgtagatggcgatggatgcgcagttggtgaggtttagagaacgcagggacgggcgcatgggcagccgcacttgttcggccacatgagggccctccatgatgtccatcgggtcggggatgtcgccgggctcggggccgaacagcaggatgtcagtcggcttgtattccacctcggtgtagagcttggtggcgtgcgcggtgaacgcgatgatgcgcgaattgggcatcgactccaccagattgtcgaaattcgggtgcagcaccacgtgggccatgtcgtggtagtcgaggcctgctcggcgcagcttggtgtcgcgcaggttgaagcccagcggctccaccaaatgcagaatcgtgccggtcactgcgcacaggcggatggccgaaccggtgttgccgggaatacgcggtgagtaatagcacaggtgcggcgtcacggtttcggtggcggcggccttttcagccgagagcatcgcgtccaccacggagatggggttgccatgcgcgtcggtcaccagctcgtccggcccgtaattcgacttgcgatagccgtattcgaacattttctcgactttggtttcgggattggctggattcggtgtgctctgggggttgtgttttgcctcgttcgtcatagctgctaagaataagaacgatgaacgacacagcaatttctttgcgattgggagcatggtgggaggccaatgcgcgtgacttgccatggcgcttcggacgggccacgccgtggggcgtgctggtatccgaagtcatgagccagcagacgcagatgagccgtgtggtgccgtactggaccgactggatggaacgttggcccgacgcccgctcactcgccgaggcccccaaggccgaggtgatcaccgcatggggtcggctcggctatccacgccgtgcattgcgcttgcaggaatgtgcccgcgtggtggccgagcagtacgccgacaaactgccgcgtacgtatgacgaactcactgcattgcccggcatcggcgattacaccgcctccgcggtgctgagctttgcgttcggtgagcgcattgcggtgatcgatacgaatattcgccgcgtgctgagccgtgtgttccttggcgtcgaatcgcgcgggggagcggccagcccggccgaacgcgcgctggcgaaccgcatgctgcccaaagacgagattctcgggcgcgatgctgacgtcgccgataatgccggtagcgccgaacataccgtgaacggcactatccgtggcggcaaacgctcccgactgcatcgtggcgaacgcccatcggtcacatggaaccagtcggtaatggaactgggggcggtgatctgcacggccaaatcgccgttatgcgacacctgcccgattgccgacgattgcgcgttcctcaaggccggccgccccggactgggggagcgtcgcacccgcccacgccaacgattccaaggcacggatcgacaggtgcgcggtctggtgctcgccgcgctgcgcgagcttcccgctggagtcacgttgcccagggaagatgccgacaagctttggaaggaccagattcagcttgccgcctgcatcgccagccttgacgatgacggcctgatcgagattctggacggcggcctgcgattacccagctgacattgtgaaaatggcgggctccccaagcgtgtatgggtgtggtgaccgtagactggaagggttatggcagtgcagaggaacacatcaggcgcgagaacggcacgcggagccggcaccggggacaatgggccatccggcgggcccgcccgaaacgaccgttccggcaagccgcgcaagcgcaggatcagcaaaaagcagcaggccatctatcgtcgtcggcgtatcgtggccggcacggtgttgctgctgataatcgcgctgattgtattctgcgtgtacagccttggccggggtatcggtgccgtgaacacgatgattcaccatgacgaggtgtatgcgatttcccgcgacgccacgccggctccgaagaaagtcagcaacgtcaaggattgctcggccagtgatgtgacattgcagctttccgcggcctcccaatccgtgccggtaggaggatcgcttgatttcaccgcgaccatcgtgcacgaggggtcaggcaactgtttggtggacggggccgattccggccgtgtgctcaccattacttccggtcaggaaacgatttacaagtccgatgtgtgtccggcggattcacgtctgctgctgatgtccaagggtgataaggacgttcagaaggtcacgtggaataccaatgcgaacgccacgctcaccgaatgcacggatgagtcgggttgggccaaggtcaatgcgggaacgtacgtggcgcagctgagtttgaaggatcatccgaaggtgaagagcgatccggtgacgtttacggtggggtaggacctgcggttggtgtttggacgctgggtctctccctcagtctcgctccgctcgacagctccctcgtcagcgggagctaaaaatgtcctcgcatatcagtattctgttgactttgcatgaggtgtgtcatattgcgggcatgccgtcgacaatgaagcgtccgcataggcatatggtggccatgccggcgctcccaggggaattaccacatattagcgagcgataaggaacgtccattggctactgagtctacgacgaacaccaccaccatcatcgcacgcgccgaccagcatgacattgatctgcacaaggcgtcggatcgcgtgaacttcggttccatcaaggaacccatcgatgtgccctacctgctgggcgtacagaccgacagcttcgattggctgatcggttccgaccgctggaagaagcgtgtcgaagaggatgaggctaacggcaccaacaccgtggcccacacctccggtctcgacgaggtcttcaacgagatctccccgatcgagaactttgcacagaccatgtccctgaccttctcggacccgtacttcgaggagccgcgccacaccgtgcaggagtgcaaggagaaggattacacctactccgctccgctgtacgtgaacgccgaattcgagaacggcgacaccggcgagatcaagtcccagaccgtgttcatgggcgacttcccgctgcagaccccgcacggcaccttcatcatcggcggtaccgagcgagtcatcgtctcccagctcgtgcgttccccgggcgtctacttcgaccgccagcaggaccgcacctccgataaggaagtcttcggcgcgaagatcatcccgagccgcggtgcatggctcgagttcgagatcgacaagaaggaccagccgcaggtgcgcgtggaccgcaagcgcaagcagtccgccatcgtgttcctcatggccatcggcatgaccaagtccgagatcgcccaggccttcaaggactacccgctggtgctcgacgccctggagaaggaaaccctcgagacccaggacgaggccctcgtcgacctctaccgcaagattcgtccggccgacaccccgacccccgaggccggcaagaacctgctggactccttctacttcaacaccaagcgctacgatctggcccgcgtcggccgctacaagatcaaccgcaagctgggtgtcgaggccgatttcaacgatcgttccctccaccaggaagacatcatcgccacgatcaagtacctggtggccctgcacgacggtgcggcgaccttcccgggcaagcgcaacggcgaagacgttgacctgcgcgtggacgtcgacgatatcgaccacttcggcaaccgtcgcatccgtcaggtcggcgagctgatccagaaccagctgcgtaccggcctgtcccgcatggagcgcgtggtgcgcgagcgcatgaccactcaggacgccgaggccatcaccccgcagtccctgatcaacatccgcccggtgaacgccaccatcaaggagttcttcggcacttcccagctctcccagttcatggatcagaacaacccactgtccggtgtgacgaacaagcgtcgtctttccgcactgggccccggcggtctgtcccgcgaccgcgcctccatggaagtgcgcgacgtgcacccgtcccacttcggccgtatgtgcccgatcgagtctcctgaaggcccgaacatcggtctgatcggctccctagcaaccttcggccgcgtcaacccgttcggcttcatcgagaccccgtaccgcaaggtcgtcaacggccatgtgaccgacgaggtcgagtacatgaccgctgaccgcgatcttgaccacgtcatcgcccaggccaaccaggagctcgacgagaacggcaacttcgtctccaagtccgcccttgcccgagtcggcgaggaagaggcggtcgatgtgccggtgagctccgtggattacatggacgtctccccgcgtcagatggtctccctcggcgcctccctgatcccgttcctggaacatgatgagggccaccgtgcactgatgggtaccaacatgcagcgtcaggccgtgccgctgatcgaatccgagcgcccgctggtgggcaccggctccgaatggcgcgccgccaacgactccggcgacgtcatcaagtccgagaaggacggtgtggtcacctacgtgtccgccgacctgatccgcgtgatgaacgacgacggcaccaccagctcctacaagctggccaagttccagcgttccaaccagaccacctgctacaatcagcgcccgatcatccatgatggcgagcgtgtggaggccggctcggtgctggccgatggtcctgccatccagaagggcgacctggccctgggcaagaacctgctcatcgccttcatgccgtggaacggctacaactacgaggatgctgtgatcatctcccagcgcctcgtgcaggacgacaccctctcctccatccacatcgaggagtacgagatcgacgcccgcgaaaccaagctgggcgccgaagagatcacccgcgatctgccgaacgtcggcgaggacgccgtggccaacctcgacgagcgcggcatcatccgcatcggcgccgaggtcgaggccggcgacatcttggtcggtaaggtcaccccgaagggtgagaccgagctgaccccggaggagcgcctgctgcgcgccatcttcggcgagaagtcccgcgaggtgcgcgacacctccctgcgtgtgccccacggcgagaccggtaccgtcatcggcgtcaaggagatcacccgcgaggatgccgaggaggacggcgacgagctgcccaacggcgtcaaccagatgatccgcgtctacatcgcccagcaccgtaagatcacggtgggcgacaagctctccggccgccacggcaacaagggctgcatctcccgcatcctgccggaagaggacatgccgttcctggctgacggtactccggtcgacatcatgttgaacccgctgggtgtgccttcccgaatgaacctcggtcaggtgctcgaactgcaccttggctggatcgcccactccggttgggatatctcccttgacccgaacatggaagccgagtggaagaagctggttccgtccggtgccgagaaggccgagccgaacaccccggtcgccaccccggtgttcgacggtgtcaagcccgaggtcctgaagggcctgctgtccaccacgctgccgaaccgtgacggcgaccgtctggtcggccccgacggcaaggccaccctgttcgatggccgtaccggtgagccgtacaccaagccgatctccgttggctacatgtacatgttgaagctgcaccacctggtcgacgacaagattcacgctcgttccaccggcccgtactccatgatcacccagcagccgctcggtggtaaggcccagttcggtggccagcgcttcggcgagatggaggtgtgggcccttgaggcctacggtgccgcctacacgctgcacgagatgatgaccaccaagtccgatgacgtcgacggccgcgtgcgcgtctacggcgccatcgtcaagggcgacaacctgccgccggccggcatccccgaatcgttcaaggtgctcctgaaggaaatgcagtccctgtccctgaacgtcgaagtgctcaacgccgaaggcgtggccatcgacatgaaggatgaggatgacgatccggccagctccgctgacgacctcggcttcaacattggcgcccgccccgacgcggccgccaaggaagaccagaaggccgaagagcccgaataccagtgatccctcgggctgcatgcggtcaatacgccgcgtgtagccccgccaacgtgaaatagataacgtacagagacctttccggtttgcccctacccctcatcagtcagccttggctgacagctcccctgacaaggggagcttgggaaggtctcaagaacagaaacggattaacaagtgctggacgtcaacgcatttgacaagattcgcatcggccttgccaccgccgatgacatccgtggttggagccacggtgaggtcaagaagcctgaaaccatcaactaccgtacgctgaagcctgagaaggacggtctgttcggcgaacagatcttcggcccgacccgtgactgggagtgcgcctgcggcaagtacaagcgcgtgcgtttcaagggcatcgtctgcgagcgatgcggcgtcgaagtgacccgcagccgcgtgcgccgtgagcgcatgggccacatcgagctcgccgccccggtgacgcacatctggttcttcaaaggtgtgccttcccgcctcggctacctgctgaacgtcaccccgaaggatctggagcgcgtgatctacttcgcctcctacatggtcaccgaggtgaacgaggacgagcgccacaacgatctgcccggcctgcaggacgagttcgattccgagatcaagcgccttgagcagcgccgtgactccgacatcgaagctcgcgccaagaaggtcgaagaggatctcgccgcccttgaggaggccggcgaggccaagggcccggcccgcaccaagctgcgtaacggtgccgagcgcgatatggccgccatccgcacccgctacaacgaccagatcgcccgtgtggacgccgtcttcgacaagttcaagaagctcaagcccggcgacatggtcgacgacgtggacctgtggcgcgagatgcaggaccgctacggcgattacttcgacggctgcatgggcgccgaagccatcaagaagcgcctgcagtcccttgacctggagaccatctccaaggaactgcgcgaggagatcaaggacgcttccgaacagcgtaagaccaaggccctgaagcgtctcaaggtcgtcaacgccttcctgaccaccggcaacaagccggaggccatggtgctcgacgtgatcccggtcatcccgccggacctgcgcccgatggtccagctcgacggtggccgtttcgccacctccgacctcaacgacctgtaccgccgtgtgatcaaccgtaacaaccgtctgaagcgactgatcgagctcggcgcccctgaaatcatgctcaacaacgagaagcgcatgcttcaggaagccgtcgactccctgttcgacaacggccgtcgtggtcgcccggtcaccggtgcctccaaccgtccgctgaagtccctgtccgacatgctcaagggtaagcagggtcgtttccgtcagaacctgctcggtaagcgagtcgactactccggccgttccgtgatcgtggtcggcccgtccctgcgcatgcaccagtgtggtctgccgaagccgatggccctcgagctgttcaagccgttcgtcatcaagcgcctcgtggacctgaactacgcgcagaacatgaagtccgccaagcgtctcgtggaccgcggcgacgccgaagtgtggggcgtgctcgaggaggtcatctccgagcaccccgtgctgctcaaccgtgcacctacgctgcaccgtctgggtattcaggcattcgagccgatcctggtggaaggcaaggccatccacctgccgccgctggcctgcgccgccttcaacgccgacttcgatggtgaccagatggcagtccacctgcccctgtccgccgaggcccaggccgaggcccgctcgctgatgatggcttccgacaacatcctgaagccggctgacggtcacaccgtgaccatgccgtcccaggacatgatcctcggtctgtactacctgtccaccgtgctggaaggcgccaagggccagggccgcgtgttctcctcgctggaagaggccgaaatggccctcgaccgccacgagatcgacatgcaggccaaggtgctcatccgcctgcccgagagcttcgtactgccgaagaactgggagcccggcgaggtcaaggtgctcgacccgcgcgaaggtgaggacgaggtcgtcaaggaagagcgcttccacgacggcaccgtgctgttcgccacctcctacggccgcatcctgttcaacgagactctgccgaccgactacccgttcgtcaacgagcaggtggccaagggccgtctgtccaagattgtcgatgacatcgccatgcgttactccacccagcaggtggccgccacgctggatgccctgaaggatcttggcttcacccgtgcaccgtggtccggcgtgtccttcgcgttctccgacgtgaacgagccgcccgagcgcgacgagaagatcgccgagtacgaggccaaggccgacaaggtcaacgccaactacgagatgggtctgttgaccgaggaagctcgtcgtcaggaactcatcgacctgtggaccgagtgcaccgccgaggtgtccaaggaagtcgaggagaagttcgacccgacctccaacctggccatcatcgtgcagtctggtgcacgaggcaacatgatgcagatcaaccagatcgcaggtatgcgaggcctcgtggctaacccgaagggtgagatcattcctcgtcctgtgaagtccaactaccgcgacggcctgtccgtgctggagtacttcatctcccagcacggtgcacgtaagggtctggccgataccgcactgcgtaccgcagaatccggttacctgacccgtcgtctggtcgacgtctcccaggacgtcatcgtgcgcgaagaggactgcggcaccaaggccggtctgcccatccgtgtcgccgagcgcgacaacgacggcaacctggtgctcgtcaaggccgccgacggtggcccgtactcccgtctgctcgccgccgacgtcatcgacccggccgacggacagaccgtgctgtacaagcgcgacgacgccctgtccatggacgtgctcaacgacctcgtggcccacggtgtcgaggaagtcaagtgccgttccgtgctgacctgcgagtccaagcgcggcgtgtgcgccaagtgctacggctggtccctggccaccaacaagctggtcgatgtcggcgagaccgtcggtatcgtcgccgcccagtccatcggtgagcctggtacccagctgacgctgcgctccttccactccggcggtgtggccgcggcatccgatatcacccagggtcttccccgtgtcaccgagcttttcgaggcgcgtaccccgaagggcgaggcgccgatcaccgagttcgccggcagcatcaagatcgtggagaacgatcgcggtcgccagatcatcctgaccccggacgccgattccggcgcaccgaaggaagacggcgtgatcaagccgatcacctaccaggtctccaagcgcgtgccgctgaaggtcgccgacggcgaccacatcaaggtcggcacccagctggtcgaaggttccgtggatccgaagaagatcctcaccatcctcggcaagcgcgccgcccaggtcaacatcgtggaggaggtgcacaccgtgtaccgctcccagggcgtggacatccacgacaagcacatcgaggtcatcgtgcaccagatgacccgtcgcgtgaccatcatcgactccggcgacaccgacctgctgccgggtgagctggtggacaatgcccgcttccgcgagatcaaccgcaacatcgtcaagaacggtggccgtccggccgtcggtcgtccggcgcttatgggcatcaccaaggcgtctctggccaccgactcctggctgtccgccgcatccttccaggagaccacccgcgtgctcaccgaagccgccctctccgagaaggtagacgacctcaagggcctcaaggagaacgtcatcatcggtaagctcatcccggccggtacgggcctcgcccgctaccgcaacgccgtggtcgagcccgacaaggccatccgcgacaccatctaccccaacttcggtctgggcggcgatggcgatctcggcgacgcgaccttctccgacgccgacctgtccgacctgaacttctcgaacctcgaattcggcgatctgaagctcggcgacgacttcaaccccgatgacttctactccgatcagggcggtcagcctgacatcgaggagtaagcgagagggtcctagaaaggatgtcctttctaggactcagatcttgcgttaatcgcaataagatggcccggaactatatcagttccgggccatccgtatatttgccattgtgattttcctgttgaacaagagcaggcagccgtcgttgcttgattactcaggcctgtttttcggtgaactggaagaactggtcaccaatacgcaccgttgaaggtgcactgagcttgagcgttatgcccttggtgacttgggtctcctggccattggtgatgatgtaggtgccgttcaacgagccgtagtcctcgatccacagcgcgccatcggtgtcgatgctgatggcggcatggttgcgggacgtggtgcgggtcgggtcttcgatacgctccgccttggcaccttgcggcacatccatggaaggcttgcggcccagcaacgtgctcttatcgatcacaatggtctggccggtgacatcgttatgcatcaggtacgtcttcttcggtgccttggacgtgaacgaggaggagagcacggtgccgtcccaatcctcgatgtcgttttcggcggcgtgcggtgtggtgtctgccgaagcggtggcagcgggctcatcggcggcggtagcggcagtggcggcaggctctgccgcaaaagcggtattggccgcggtttccgcagagctgggctgcccatagtcgttctgcggttcggctgtgccaactgcggaatccggggtgccttccaccggatcgtcggaataccaacccagttcaggtgctggagggtagggaagtttggccatgatgatgccgtcctttcactgacgaaaagccagagcggcgttgattgccgggtcgccgagctggcccagccattcgatcagtgccggataggtgttgggattacgtgcgatgcaggcgcgtagttcaggcgcgtactgggcaatctgggcgatttgcatctggtcggtggtggtcagggcctgttcggcggtgaagccataaggattggtggccacaggctcctcgaatgccgcctgagctgcgggctgctgggccgcgtactggtcggcggcagtctggacggcggcagtctggacggcggcagtctggacggcggcagtctggacggcggcagtctggacggcggcagtctggacggcggcagtctggacggcggcagtctggtcggcggcagtctgctgagccgcggcgtactggtcggcggcgtaagcgtctgcaggctgctgctcggcagcctgctgggccgcctgttccggagcctcctgatcctgaaccgggccgccgaatgcgtcggcggtgaacccgtactgtgccagggtttcgcgggcacgctcatcgccgaattcggcgatccaacgcttcaagccggggtagcaacgcggatttacggcgacgtttgcgccgaattccggattctcgtaggcgatttttgccaacagaatcgggtccgcgttcggatcctgtacggcagcgaccgcagcatcataatcaaccatgggattacctccttatgttcgctcggttatgccgaacgtatggtccgtagtgtttgcaatgttgcgtcttcaatggcgtcaatgtcctcgccctcgtccagtctaaaagcgctgaacgcgtgatgttcgggttcggtcagtggcatatcggccacaatcacagtgatattgtcggttccgcccgcatcgagcgcggccgccaccaaggcgtccacggcttcctgcggactggaatgcgctgcggcgatggccgcaatctgttcgtctgacacttcaccgtgcaatccatccgaacagatgatgaaacggccggtcagatcggcaacatatacgtcgggcactatgccgtccggatcgcccaggcattgggtgatgatgttgcgtggaatggtcgcctccgcctcttccggcagcatctgaccggaatcgatagcctcctggcgttgggaatgatcccgcgtgatgcgggtcagcgaggaggcgtcccacacggggatgatatccgtggcgggggcatcggcatccggcagcgggctgagatggtaggttcgggaatcgccgacattgaccacataggtctggtccgagaaatccggggagtcggcgtcgccaaacggagctgcgctgtgggcattgatggcatctgcgtaaggctggggcaaaaccaggccggagcaggtcgtaccggccacgccgccgagacggtcacccaaatcgagaatgtcgtgctgagcctgtgccagggtgtcgtcgatgtcatggcgggtgcgcgagggcatggaagccagctgcgcgaaatgctgggcagccaactggcttgcctgctcgccgcctttgccgccgcccatgccgtcgcagaccatgaacacgccctgttgggcgaatccggtgtcttggttgttcttgcgcctaagacccgcgtcactggtcatcgcgatacggatggagcctgtggtcatgacgtcttccccttcttacgcttgtgcttgactcgcgctgtatacggctttgctgcgtgtctatttgccaatatagacacgcttttcagcgaaagccgtgtacatatcctcctgaaacgcggcaaagaagcgagcattgccttgcgcaaccggtcgactccattccaatatgtggtggcttggcccgatgcaatgtcttgccccgagaacgtggcgtagtcggcttcccgaccgagttgaatcagtgcctgatcgtccgtgccgagctgactggcgattgcgccggcctgatcgcgacgagtgcccttggctgtgatgccgctttgctcggcaagtatgtgtatggcattccaccccgctgccacacgggctttcggactgccgtgccgtcgtgcacgtgccagcaatgcagctttaaatatcaggattagtccgcaaacgatgagcagagtccacagggggcttccatagatggctaccgcacgagtaactcgccagaaccgcacccagaacaggttggtcggcgaatcatcggcgtcggcgccggccaatgagctttggcccctggcttgcgtctgatcgcgcagcggatcggtcaacggcaccggtggttgccggaccagcgtctgcggattcggcggcgtcaggttctggttttcatcaggcaccttggtttccttgggcgtcggatagaacgccacccatcccaggccctgcaatttgatttccacccaagcggtgacatcgttgccggtgaattcgattttggtgccattgcccgaggtcttctccgtgcgggcatcggtgatttcgccatccttgtttttcggcaggaagcccaggaccacacgggagggcagtcccagctcacgagccatcagtgccatggcggaggcatattgctcggagtcgcccaccatggccgtgcctgccagcagcttgttgatacggtagttgccatggccggcatcggagggataatcgccttcgagtccatgagagaaccatccggagtctttcaatgtgtcggccaacgccgtggctgcggcaccgcccgaggactgtccgccggcaatggacgtggccagtttgctggccgaatcgggaacatcctgggcttccggttgggtgatgcgggccgcggccgcactgctgatctgcttatcggtgggcttgcgggcgataatgccggattcggtataggtgaggcttttacgcgtgccggcgggaataatggcggaatcggtatccgtgttgtagtagaacgtgtcattgccgttgtcggcatcgttggcgaagctcacgccagtggccgctcccgccagcggcagccaggtgtcggtcaatccctgatcgacggtgaaggtcgcagtgaaggattcgccctgctcatccgccttgatcgtggtgcccacgcgatgataattcgaggagtccgtggcttcggaagaatcggacaggttccatactgtgccgtcgaatcgatccatcaccgcaagtttgactggtgttccggccggcagattatggacggtcagcaacacgtcttttttgtggtccttgatataggatcgcatgccgctgagcgggctggtgtaatcgtaggggcttaacggcggatcgtagcggtcacgcagcacgaaacggtcctgcggcaccagcaacgtgcctccgaaagcaaggccggcagcgagcacgacgatgatcagcgcggatatccagcgcccccattccagcagttcaagacgccaagacagccagataatcagcagcaaggcaaaggcaatgccgcagatggcacgttgccagccgctgtccgtacccagcagagcacatacggccacggccgccgcaaggggcagcactcccaccagagacaaccatgcgttggcattaatggcaaacacgccggtgaggaacgtaagccacaggccgatggtccataccgccagcagcacgccgtcttgcgtgcccagaggcggatcgacggaaataatgtacttgaacgagccaaacgtcatttcccaacctgaactcaaggtcttcaaggtgggaatcacgtaatgggacgtggtggaactcagcgttaccaccggaccgatgatgaattgggcaaacgccagaaacacgatttgccaccacagtcgcaacgccggcaacatgcccgccagagcgatgatcgcgcccagcaaggtggccggtacggcggcgatcgcccaagtggccacgccgccgtacacgtcgatgagattggcttgcgccagcaacatcatcgccgctatgagtacgaggctggcgattcgtttgccccacggctggcgactgaggcccatgccgcgaagcacattgcctctggtcatccagataaccgaatgtgtggagtcggcccaggagccggtggtggtggaggttccggtgtacgtgccggaggaagtgccggtgtatgtgccgctcgatccggcgtacgcagcggtattggtattggtgatactggactggtcgaaggtcatgcgagcacccccatgatcagtgggagatcatcgagttcgccgatggtggccaatgtgaagttggcgaatcttctgatgccgcgattggcgccggcgctggcctgcaataccacgcagctggccgatcggggcaaggccaaggtcatgcgcttgatttgctcgatgtctttcagcgatccaacagtgaaaaaatagaacgaagcatcaggactgtgcttcagcgtgccctcggcgagattcggattgtcctcacgatcaggctctatggcactggcgttgtcgaggaactccatggcgttgcgcggctggccgtgcgcgttgcccgcgtgacagaacagcgggcgattctgcagcaggcatttgacgccgatggaggagtggatggacaccgccatctcgaattcctcgccgttgacgtactcatccgggttcacgctgatggtcaccgaggtgtcggtgcggcgcgtggcttcatattggcgaatcatcaacgtgccggttttcgcggagctcagccagtggacgttacgcacgtcgtcgcccggctcgtattcgcgcaatccgtagaagtcgagatcatcatccacgatctggccggatggttggccttccagatcgcggggcacgccggcattcagggtatcgagacgcacggtacgagggtggatgaatacggtgatgcggtcggccagctccttttcgtgacgtaccaggccgaacgggtctcccttgcggatgcgcaacggtccgatgggcagtattgcgcgcgataccgtacggaactccacatcggtttgcttggattgcccgggagccagcatggggatgttgaatcgttcatgcgcatcgccgattggcagatatccgcgtgccgtggttgtcggcgttttgccggtgttgtcgatgccgacgataacggatatggtgtctcccacggtcacgcgatgatcggatacggcgatggacgcgtggaagcgtgtgttgccgagggaaagcgcgattgccgcgagcatcatcaccatcgccacgatgccgaatacgagcagctcataccagcccaaaggcaggaacgcaataagacatgcgatgcctgcgcccgttaccgcccagcccaagggcgagacgtaggatgcgaagaaccgtctgatgcgtcttaccgcgcgcttgaacatgcgttcagcgcgccggcgacggcgtaatgcggcggatgtagatgccatggtcggatacctttccaggccctatcaggaaccgatggtgggggagggaacgtcttcgagcacctgtgcgatcaggctttccggagtcgcgccatcgaaggtggcttccggagtcagcgtgatacggtgtgcgagcacggccactgcaaggtccttgacgtcatccggcaccacgtaggcacggccatcggccgcggcccagatacgggcgcatcgggtcagcgccaaagcgccgcgcatggaggaaccgactgtgatcttctcgttgtggcgggtcgcctcgacgagcctgacgatgtattcacgaatcgcatcatccacatagatttcagaggccacctgacgcagccgcatgacatcgtcaccgctcagcaccggggaaacggtctgcgcacggtcggtgatatcgacctgcttgaggatatcgacggacacatcatggcccgggtagccaatcgacgtcttgataaggaagcggtccatctgcgcctcaggcagcttataggtaccgagctgctcgatggggttctgggttgcgatcacgatgaacggctgcggtacatcatgggtgacgccgtcaacggtgactttctgctcttccataacctccagaagtgcggactgcgtcttcggcgatgcacggttgatttcatcggccagcacgatggaggcgaaaatcgggccctcgcggaactcgaattctccgcgcttctgatcgtagaaagtcacacccaccacatccgaaggcagtagatcaggcgtgaactgaatacgcttgaaaccggtggaaatggagttggccaagcctcgggccaactgggtcttaccggtgccggggttgtcttcaagcagaatatggccaccgaccatcagtgcggtgacgcattgcttgatgggaatggtcttgccgataaccaccttggagacattctcgaccagcgcattgaaggactgctggaaatcccggacctgagccgtgggctgggacagtagtccggaattgatgctggcgggcagtgccgatgcggctgcttgcgcggctttgctcgactgacgctgcggctgggattgcggctgggattgcgcggcggcctgctgattggctaccggcccgcgaccagccacggtttcggcgttggatgctgcggtcttgccggcggttgtggtcgtccattgacgggaggtctgggtggcgggggcagcattcgcagtagcggcctgcttgccggatttacgtccgaagtgcggaagcgcgactttgggcgtgctggtctttgccggcatgccgacctgctgcgggatggctggcgtcgcgtccttgcgcggcttgagcacggtgctgtcatcgcccgcaggaatggaggcggcatcagtagtaggagacggcttttctgacgacgcttgtgacggccgctgcggcaggttaggcaacgcaacgggttgctgtgccgtctcggtgttcggggtggtgccagtgtgcggttccgatgccagatgtgtggcatcggacaagtgcgtggcgtcggatagctgcgtgctgtcagacagctgcgtcgcgtcgtcgatgttctcgctcatggatgttctcctactgcttgtgaatggtggttgacgatattggggtattaccgaaaccaagaatccaagggttcttggccaaagtggtgacatcggtaccggatttgagcgactcggtcccctccgaggaatcagaggggcgtgtgcccgcgacgctgctgccgtccgccgtattgtcgagaccggagtatcccggcccgccggtgactttgacgctccacgtgtagttgccatcggcggccacggccaagtcggtgacgtccaatggctggccggggttccacgtgaacggttggccattgatgatgatttgtacggtggcctgcttgccatagacctcaaccgaaccgccggtgacgttaatgacgtgagcgttgtctgaccagcgcagctcctgcggtttgttgattacagccttcttctcataggtgtaaggagcgccattgtacgggcctccggtggcggcatcgctggtagcgccgttgaacacctgttgcaccgatgcggtattgcatttggcccaaggactcattcggaagtcgagtgagttccggttagtagctgtaccggaatcgatgccatcggcagtcacgttgtaggactgcgcatgcccctgcttggtccaatgcacggtgcatgtactgccggatccggtggtgtagacgtcagtgggcggctggaccttgtactgcgggacaaacctgctcttgcctgtgccggcggaagcatcgcgctgcggcaccacggtggccgttacggtgatttcccgggtgttcaaatcgttctcattgatatcgaacgtagcgccaccgtcactgcaatcgatggtgtccttgatgtctcctcccaaggaaattcgccggcagccggcattgcggttgttgccgagagtgactttcgccgttcctgtggtgtcgtcgttcgacagcgcaatggtcggcgcatccgggtctccccagatgtcctttggctgtgatgaggcggactcggcactccaattgattttgttatgggctttgacggtcgccgtaatggcggtgccatcggaaatgtcgttgttgttgaacgtaaacgacagctcggtggccgtattgccggtttccttggtctgcggagcacctgcaccggtgacggtcactgaatagttgtcgacggcgctgaaatcaccgctcggcgctttccacgtcactttggcggttttattgccacctgtgaccgtaacatcggtgggagcggacggcaccttgtccggtgtggcttcgacggtggtggacggtttggaccaaccgacgtcatttcgcgcggcgacggtgaaggaataggttttgccgttcttcagacccgtgacctggcatgaggtgacggcaccgcaatccttctctccagtggcggcgccggtccaactgaccttgtagttggtgatcgggctgccattggcggcaccgggcgtccatgtgaggctgaccgcgctgtcctgcggttccccggctacgggggagagcagtggcggctcgggcttgtcgatcacggacacggtaatcgatgcggtgacttcacgatccttggacttgctgccgtcttgcacggtgacgagcacggtgttcgtggaagcacccggatcggatgcgacggcgatggtgacgtttccggaggcatcgcatccggcgatagtgagtttggcggcgtcatccgccttgcagctgatgacggtcagcgaggaatcggggaacggattgtacgcgccggtaagcacgttcacggcatcgctggcaccggccttgatcttcagcgtcttgtcgccgacgcgtgccagcggacgggtggaagacactacgcgcacggtcacaccggcattcacggtgcccgcgccgtatgcgatttgcacgggaatggacgcggtggtgccaggagcggcatccttggtggcggaaacctgcaagctgccggaacgggacaggttagcggtgattcgcccggacgatgagcttccgccggaatacgtgtattgcttctcgtcgtcatacacgccggacggtgcatgggtgagcgccgtcagatcaacggtcttggggttcgcgcccgcctcgacatcaatagtggaggacgagaacgtgggcggcggcacatcgcggcctatcaccgtgatctggagagtgatcactgcggaattgatgatcttggtcttatccgatccctgcttgccatccacagcggtaaaggtaatggaggcggggcctgcgtagtcttttgccgcagtgaacttcagggtcttgtcgttcacgtagaaatcggagttggaagccttggtggcgctgacggaatcagcgctttcgatatacggttccttgccggcaccgacgcgaacatagtcattgatgttgatttcaatggtctcacgcgaattgaccttcaattccggtgccttgggacgcaacgtgggcggaaagacaccataggccggtacctggatgaacgcggtggaggtgatgttgtatttcgtattggtcaccgtgtaaggcacggctcgcgcctgtgacgtcaggtcgacggtgatggtggtcgaatgctcaccgcccttgacgtgagcgtgagcgctggcggagggatgcacgccgaccttgagctcattggctgtgccggaaggattggcgatccactgggaaacatccacatccacggacttcttatcgatggtggcggcggacggcacacgatagtcgtaggcggtaggcggctcgatggcggcattcggatccacgtttaccgtgagggtggccgtatcggacaagccggccttgtctttgaccgtgtaggcgatataggcggtggtggcgctgccgggcgtggtgaaggagatcatgttgtctttcgcgctcaccccgtcgagaccttggacctcgacatgcttgtcgacggtcagattggtgttgtcgccggagatgtcgttctgcgcgaccggcacggttgcggccgtattgggcctcaacgtgatttcgtcatccctggcgtatacgccggagtcggacgatccttggaatacgcccacgcggatctgcgcctgtgcgcgctgaccggtccaatcctccacggcataggagaaggtgtcggtgccggacgaatccggatacgcttcatagaccaagtagtcggaaccgacttcggatatgcggcccagcgtgggtgccttgttgcccagacccaacagctgatcgtcgtcgccatccgtgtctatgccggtcagtgtgatggggatgcggaccttctgtccggcggcaacctgcgcttcggcgtcatgcggggttggcgcggccttgctcgctgcgtcgctcttatgcacggtaatggtgatattggcggaagccacattacccagattgtcttcaaccgtataggtgatggggaagttgccggtctcgctggatgcttggtagcggaccgtgtctccagagacgaaggccagacccttgaacgtctccttgtcgtattgcaggttgttcttgagcttgaccgtggtgccatccgagtaggccacatggtcaagcacatccacggacacgatgccgccggtgcgcacctgggcattgatattgctggccttgggcactgaattcgaggtggtcagagccggtggctgcaacacgatggtgcccttggcggttccggaggcgttggccacggtgtaggtaagggcgacgggtttcgtgggcacctgacgcgcagtgatatacacgcgcttatggctgacgagaccaaccttgatgccggagtcggccggtgcgctcaccgtggtgacggacagcacgccgcccatcggatcgacgtcattggtgagcggctccacaatggcggtattatccgcgccaagcagggcgacatcgttggcggcaaccggtttggcggcctcgccggtggcgggctgtacctcgacgcgagccaatccggtggccggaatcgagccttgagtaatggtgtagggcacataataggtgccgggattggtggccttgaacgtcaacgacatatccgccgcattggtggtcgtcgaagcgccgttgggcgtatccacctgagtcagctgtgccggctgcaaggaagtgccatgcacgtaagaggacagcttgacgacggtatccgtgttgggaacggtggttttcgctaccgggtcgatgaccgcggccaaggtgttcgcgggcttgaccgagaaatacaccatgccggtgccggtcgccgtgccgtcggagacggtgacctcgacgcccacgcgtcccgacgccagcgcaccggtgttgaacgtaagctggccgtcggctcgggtggacacctgcacctggtcggtgttctgggccacagcggagaccagagtgagcgggtctccatccggatcgttgaagctgctcagcgcattggcggtataactggctccctgctccacatcgatctcgggaggagtgtcgaactgtacgggagcgtggttgcctccatcattcagggttacggtcaccgtggcggaagaggtctggccgcggccatcggaaatatcgtaagtaaaggtaacggtgcctgcggatgtggcggaggcatcgagttgcagataccggccgtcgtaaatcggcgaaatggtgacgtctttgttgtttggtgcgccaaccttggtgattttaagcacggaacaatcggtctgctcgtcattgcgcagcacgtcgagaatctgttccgaaccggctcgtgcgccgatttcatcatcctcggctttgatttggccggattgtgcggaacaggtcttggagaagtcgtggtggttgttggccgagtcgttgttctgctgttctttctcggtctgctcggcctgtattttgttccactgtattttgatgactttggtggaatcctcagggttccacacattgccgttaaccgtgtcgttgagcaccacaaggcgatggttggtgcggaacaccaattcggaagtagtattgacggattcgagggtttgcggcttgacgctggtatccgcgggggagcaggcgcgaatgtagttgctggccttctggctccaagccgagtacacgcagcccttggacgataccggtcgtgccggattcgccttgcccccgttggctatgaaattcgccttggcattggacttcaacgggataagcgtaaggcctctcggtgatgccgcggccacccaatcggactgtacgtcatcggtgggaggctcctgaagggtgagggtgccggtcgtgtcgacatcgacgcggccgcccttgaatatgacggttttgccggttgcgattaccggcgtgctcccgatgacggtaaagctttcaacggtctgctgcttgccgtcggtcagcgattcgagggttttggccttggcgctgctgggattgtcaagacgcagcaccataccgtcggatggacggtatccgtagaccttgccatcgtgggttactacgatgcgcccgccctcgcccagcttcattttcggatcggaagtggtgggggccacggaatcaaggttttccgacaagccggtccacacattgccggtcttctcgttgatcagggctacggtatccccgccgaccacagtggtggtgttggctttgatgtcggtcttgacaccggtgctgaccgtggatgccttgatggtggaggctttggtcgtttcggtcaggatggtgtcgccattatgctgcgcgatgtcgaatcgtggggcggaggaggagacgccggcgtcggcctccttgttctttacgttgaatcgtgcggccttctggttcttcagcgaagtgacccacacggtgccatcgtccagttgcacatggcggcgcgtgacggtgctcatgatcaccgcgccggcaacaagtcccagaagcagcaggagcgtgattacgggaaccgtccacgtatgccctccggagggcataaggcggcgcaaagccgcgctgatgcgtcggcgacgatcgtatgactgggacgatgtggccatctgaactccctgaaccctggtttctctggttgctagtgtaatgacaacgctttacggttccaatacctgccgttcctgttgtccatttggtgaattcgccactgccgggcgcatgcctgatgcgatacgcaatgccaaggtggtatgcccggcagcggcgagcggatcactcttgcggcttggccgcacaggcgatggcggggctgacggacatctggcggttcttgcgcacaatggacacctgaatgcaggtctgcgagccttcctgcgcgttgacggtcaccgtgggatctgacgttgtgacggtttgcgcgctctggtcggtattgctgccctgcactatggcccacgtataggtatcaccgctttgcgggtctggattcgtccaggtgaacgtcacggatgacccatccgccgcataggtgccgttcagattctccggggaaggaatctgggcgttcgcggtatcggtgatcacgtcatcctgattattgcggttgttgtcatcatccttggtgccgggcgtcgccacctgtttggtatctgatccggtggcgctgtccatgcggggaacgaccacgaaggcgaatatcagtgccgctgcggtgattgccgcaagtataccgacggtaatacccaccggtttgacccatcgccgtgacgaacgggtggtctgatctcgctggtccgtggcccggcgccgacgctcgatgtctttggggtaggccggcatcccttccacggtaacgggagtggcatgcccgaaatatgcgaattgcacacgctgcatggcacgtgcgaactccaacgcggagtagtaccgctggtcggggtccttgttcagggcccggcgcagcaccgcttccacatcggccggtacgtcggggcggttgaggcgaggcaatggctggttgacgatcagcgaaatcagttccgattgcgaacgtggatgatattcgtgctggaatggcgagcagccgacgaacatggcgtacagggtggccgccagtgaatagatgtcggcggcttccgaaccattggtcagatgctgaagcacttcaggcggtgcccacggcggcgagaatccggtttcggtacggtcatacacatcggtggagataccgaaatcacccagaacaggcaagccctgcgaggtgatgagaatgttgctgggcttgatgtcgtgatggatgatattgctgcgatgcgcggtgaacagcgcgcttgacagcttgatgccgaggtcgagtacctgctcgcaggtcatggaccgggccttcatgatgctgttgtaggtgccgcccggcgcatattcgatgacgatgtagccatggccatcggaggtgacgccggcaccatataccggcagaatgtacgggtgggatgacagcttggccatgaagttggcctcgcggttgaacagggcagcggcccgtgggtcaagggttttggcgctgacctttaccgccaccgggcgtgcgggcatacgctggttatataggtacaccgtggcggtggcaccgcttcccaacatctggacgaaatcatatccgggcagcttcggcggcctcatcggaatattggccatctgttccctccctccttggaaaatgcgctctccctgcattcgttctacaggataccgtcaagggtacgattcttcgtcgggttcggtaaaatttttccctctgtgacggtcgggtttaggctggagccatgatgacgagacttgaacctggaacagtgctggacggcatcgaccgtgatggagcggcgaggctgattgtcggcacgcctggaagcggcaaaaccgaattcgccttatcggtgttgatggcggggctgcgccgctacggtggcacgcaggcggtgatggccgtatccggccgtgtggccgccgacgcattgggcaatcgggtgattcgtgagctcgggttttccgtgcaggccaggccggtcaccacgctgggtgccgtggcattccgggccatatcagcttcgcgcgagggaactggattgccgtcgcctcgattgttgaacggtgcggaacaggatgctttgctgcgtcaagtcatggccgtgcatctgcgccatgccgtagcgggagatgattgcggcacctgtgatttgctacgcgtctactttgcccaggatgactgggcgaaactcatacgcgatgccggtgccggcgagatgcccggctcggccgcttccgtacaatcaagcctctcgcaacaagggtcggattcgccgtctccgacgtcggcaggcggctcgaccagcgcggataggttcactcgaggtatttcagatgcgtttatcagccagttgcgcgatatgctggcccgattggatgagctcggtgtaggcgttcacgaagagccacgtctcttggacgccgtgacggaggacgcgcgattgtcggtgcaatggcgtttggctttcgcattgcgccgtgaatatattgcagcccaaagcgcggcatatccggggcaataccgtttggatgcctcgtatttgctggtggcaggagctcgtgtggtgcatgaggcattcgccgccgatcacgcggatgattccgaccggcctatgcgtatggaggcgttgggcttgccccggctgctggttgtggatgatgttcaagacaccacgctggccggcatgcgcttcttggaggagttggggaatgccggcgtcaagttggtgctggtcggcaacccggatgaatcggtgcagaccttccgtggatcgtatccggaatatctgatgcgccgtgccgtggaagggtggctgaaagccaaggaagaacagctggttggcggcagtaccggcgctgatcagtcgcacatgacgatggctgatgtgatcgcgtctcgtatttcactgtcgattccctcgccggaagatgagccgctgcctccggccgagcgtcccggcaagctgaccgccatgctgggcggagtcgatgcagcgaattatcagtcggacggcacggtgaccgccggcctgtaccgatcctcacgtgaggagctggatgatgtggtctggcgcatcaagcgggcgcatctcgaccggcatattcggtggaacgacatggcggtcatcacccacgacaatgccgccgtgcggctgttcggcgaacgactgcgccgagatggcgtgccggtgcggtattcgtcggtcacccgtcctttgaaggacgagactttcgtgcagggattgttcgcgcttgtggagcttgcccgattgcgtgccgagggaatggcggaatgccagatgacgttggcttcctgcgcggcatatataaggactagagtggccacgttgatgaacggcccgttggtgagtgccgggggcagacccggtcaagggcgtcctgcaaggctcgctccgattgaattggccatgagcgcgctggagtcgctggcgcatctcgccacggatgatgccatgctgacctctctgacgacggcatgggagacattgcgtgaaacataccatgaaacacggcgtgaaacaggtcgtgaaacatcctcatcagtggttccgtcgccagtgtctgtcgaaatactcggtgaaccgtccgacgatgacttggcctttggcgttgacgcgctgtacgtgatgcttgccgttgatgatgccgccgcgccggcgcaggctgcgctcgcatccatccatgcggtgcttggcaacgaccctcaggcccgcgcttttgcgaacctgtggcatctggtgggcagcgttgcttccggcttggagcggctgccggcaagccagcgcgtacagccgcgttatgcactgtctgttgcctggaacgccaccggtctggcaccggtctggcagcgtgcggcattattcaacacggcagaggggcgcacggccaatgaccggctggacgcggcaatgcgcctgttccagttcgccgatgattccaccgccagccgagacatcacgtcattcatggcacaggttcggggcatggaagtgcaggccgattccttggcccacatagggccggtggaagacgctgtgacattgaccacgccggcaggcgcggccggacgccactggggatatgcgtggataccggtggtccagcaagacgtgtggccgaacctcgccgggcgcaacaccatgttcggtggtgaagaccttgccgagctcgtgctgaggggagcgcttgaagaaagcgacaaaaccgggcatgatccgcggttcgcggctgtgctgtcgggcgagaagaagagcttcctggtcgcgctgacccgtgcacggcgaatcatgatcagcgcggtatggaacgacagcatgagcccctcggactttcttttcgggtatctgccggaatactatccgcgcaaccggcaacaggcgcctttcaccacagtgggggcgcatacaggatccgccgaatatgatctggccggattggacgccgacccacgtgggttggtcagcgccgcccgcgcggttctggccactgctcaaccgcagcaggctgccgcaaaggacgccgcggttgcgttgacactcctgtcggagcatggtgtgcgcgccgcaaatccgcagagctgggcgttcgtggaatcgccggcccaatcggatagcgcgtcatctggcggtgcgtcatctggcggtgcctcatccgacagtgcctcatccgacagcgcgtcatctggcggtgtacagtctgacggtatccaaacggggaaaggcaagacggatgcgcaggccgcacccatggtcaccctgtctccatcggcggtcgacagcctatgggcatgtccggtgtgctggatgctggagaaccggttcgccggtcctcgccccagctccgtggccaccagcttcggaaccctcatccatgcggttgcacagcaaggcagcgaggaagggctggaccatctttcccacaatgcccagacgttggccatactgggcttggactccacggccggcacggaacgccgcatcgaggctgtcacggcacggcttaatgccatctatcagagcaaacgtcctgatccgaatgccatagccgacacccggaaccgctatgaggccacccgtaaggacgagtccgcggcagatgccctgcgcaacatcgccgattactttgtgcgcagcgacgccgatccggaaacgtatcttggcaagaactccagcaacttcagcattggcgcattggccggtgccgaatgcgaacgggagtttgccgcacgattcgatgtgcgtgacatactcgacgcatacaatgccgtgcccggcatgcacccgatcgatcggaacatgctggtccgtctgatgggagcactggtcggagggtggccggaaggcatggacgagcatctgaccgtgagactgtccgggcgcatcgaccgtatggaaacccgcgtactcgcagacggcggcgaatgcattcgcctcattgactacaaaacaggcagaacgcccacggtcaaacagattttcaatgatctgcagctcgtgtgctatcagcttggcctcgtgttccccgaagacgggccgcgcggtgccaaggcacttgccgcaatgccgcatatcagccaaagcgcgctgttccatgtcgggcagaatgcggcaccagccagaagctacgccccggaaggtgccttccagccgccgctgttcactgatggttcgttgaatgccgaaccgttcacgccacgatactggtataaagaccccaaccgtttcttcgacatacccgccatagatccggctactcctcccgaaggtgtgagtgccgaagcgtgggcgcaattcgccgcgctcgccggtacgcagacgttatggtcgctgaccatgatcgcccgcgtattctatgccgcggcggccagcaggtcggccatcatcgaggcccatccgcaagacacccatatcggattctgccgtatgaagaacgtctgccctgcctgtgcgggccagatcgacacgattttcgaaacgaggcaagcatgagcacgttcactcccagtgcggaacaggccgccatcatcgatgcgccagtcgatgctgacgtactggtggttgccggtgccggttccggcaaaacctttacgatgacccaacgcatcatcgcgcttatcaatcgaggtgtggcacctgaacgcatccttggcctgaccttcacacgcaaggccgcaggcgaactgctggaacgcgtctccgccgcagtggccggtgatatggcgggctctacgaccgccacggtgtctgatcgggcattcctcaagccggccattttcacgtatgacgccttcttccagaccatcgtgcgccaatatggactgcttgtcggattcgatcagaacacgcaaccattgagcgcagccggagcgcttcaactggccaccgaagtcatcgacagtcacatggatctggcgttcagtgaggattttggcgccttctccagtttggcgaaccgtgttctggcgttgtcggatgccattggcagtgccatgatcggtgccggctgcaccagcttcgatgatgcgatcaatcaagtacggcaatgggattcggcattcatcaatcgattgcagcaagccgtcgcagacgaacccatgcccgaggacgagccgaaaatccccaagatcaaacgactgaagaaagataccgacgccagctggcaagccaagctcgatgaccgtgccgaacatttgcatgcccgctgcgcctatcattgcggtgcgctgctggagaccacacgcaaacgcgatattctgctccagctggtggaggcctatgcccaagccaagcgggaacgcaatatggccgaattctccgacttcaccattgccgcgtatcagcttatcgagcgcttcccctccatcggagagcgcacgcgccgcaggtacagccatgtgctgctcgacgaatatcaggacacctccaccacgcaggccgctctgctggcagcactgttccacgtggatgcgtcacagaggtccgccgtcaacgcggtgggtgatccgttccagtcgatttacgcatggcgtggtgccagccctggtgcattccgtatgttccagcaagatttccacctgcctgccggatacaagccattcccgttgtccgtcaccaggcgcaacagccgtatagtgctcgaagccgccaataatctcacgctgccgttgcgctccaatccgtcgcgtccctccagctcattgatgcgtgaggtcgatgtctcatcgctcgaccccatgcctgatgcccccgaaggaacattgggagtactgggcttcgccacggccgggcaggagatcgacgccgtagtgcgtttctgcaagacggccatcgcacggcaccgttccgcagccgaacaacaggaacagatgacgggcgaacagaaagcgccggtcgccgtgctgtttcggtccaaatcacatatgcccgaatatcaggcggcattggaacaggccggattgaccacattcgtggtcggctattccgcgctgctggaacgtccggaaatccgcgatctgatggcgttgctgcacgtggccgccgaccacaccgatacgggatcgctgatgcgcttgctggccacgccacgattcaccatgtccgcagcggatttgaccatgttggcccgttttgctgaagaacagaacatggaacaacgcttccaagcattggtgcaggccggccttgcccaaccggatacaccagcgaatgaatgggcggctgtggtgcgtgagtaccgcgatcaggtggccaatgcggtattcctgccagacgtattgctacgcggcgacctggtaaaactgcttgaacggttgagcgcacacgggcgcaacgccataacccgggccgcggtgatgctccgtcaggtgcatgatgccgtcgggcggccactgggcgacgtgattcgcgccggcatagaagcgttggatcttgacatcgacaccgtattggccggtgtgctgcataatccgcagcaccgcgccaatcccgctttggcgcatatgcctatggatgcgattgtggatttggtggatacgtacacgcaagagattgccgctgagcaaactccctcgttgcatgggttcatcacatgggtggatcatctggcttcggtggaggatgaagccgccagtctccccgacgctccggtggatgtggaactgatgaccgtacaccagtccaaagggttggaatgggatgccgttgcggtagtggggcttaccgccggcggattccccagcaatcagggcgaccatctcaagatcgtgctggacgaacaccatacgggaggcaccgagcaaggtcactggaccgcacccgaatatcatgagaccgccgactcctggctcaccaaccccaccgccgtgcccgtgcctatgcgcgccgatgccggcattttgccgcgattcccccatgatgccgatgtggaagccgaccccatcgcatcgttggcggctttggatgatgtggagcttatcgatgctgaagtgttcggctccatgcgcgaattcggcgatggcgtggaagaagtggatgcatccggctggtatttgacgcaggcggaggaatatgggcgtcggctgcatgccgacgaacgtcgattgatgtatgtggcgcttacccgtgcgcgggaagatgccctgatgacctattgcgcctatacgggcgaatccgggcgggacccgtcagtggtgcccaaaggctctcgcgccgctcagccatccaatttctggcttgaagtgcatgacgcgctccaagcccgtgaacatgcgatatcggctcaggactgtgtggaacggctgcaagccgccaatgccgggaagcccatgttgatctcggcgcaaggcgaagcgattgcccctcccgaagggttctttatcggagagcatgccgcggcatacagtgacgccgtggtgggggaggcgtggcaaacgccgattacgcagacgaatgccgccgccgaattgccgtggccggctaccctcagcgacgcggtgcatgaacagctgtcacgcggcatcgatgtcatcgccgcagattcctcgtcacttgagcagcaccaagacgccggcccactcctgcaacgggcacaattgctggtggacgacgccgatttgatggccgatgccgccagcggccagtcgcttgatgaggcagtcaaagccaaggcgcaacgcgttctggctgcaggacgccagaacgtgacaagcctgcaagcccgcgtaggtggcatgaacgaacgggaggagcgcctctactggcgtagcattatccgcccgattccgcgcatatcgtctccggcggccgaggccggcacgcagttccatgcgtgggccgagcaattcatcaatgccggtaagccggatgaagcggtactggcatatgaagccgaaccaagcatgccgcatacaggtcaggatgcgggattcgtttcccgggaagccatgttggccgatttggccgaacgggagcggcaatgccgcaagccatccacacggcagcccgctgtcccacagcccacggctcaacaatccgtatccgccgtatccgccgtatccgccacttccataagcagcgacaatgccaccgagtccaagctggtggcgtggcagcgcagactggccgaatcatcgtgggccaagcgcatcccggcgtggacggagcgtgccatcgtcgtggacgtgccgggcgtgggcctggtcaatggcaaactcgatgcggtattcatcggtggacttgacccgtccagcaccaccgcacgctttaccgtggtcgactggaaaaccggtcgtcggcccaccaagccagacgacatcacccgcaaacttgcccagctcgacatgtaccgactgctgctggcagcggtcgaaggtgtggaattggacagtatcgacgccactctctactatgtcagtgagcccgacgagggcttgcgcgagcttcacgcccgcgcgaaaaccaaacaggaaatccttaccgagttgagctccggcattcccgaacaatctgacaacgactgagcccaaaggctcatgacctgtacagcatcggacggccttcaccggtggagagaccttatgcatcgcaaggcatctccgacgatgaagacgactggccacgtaccggtccgcggttgaaacgcaccgcgtgacgttgctcgggaaccgctaccctcggatggcacgtgtgggcgggcgcacgtgccggacaacgcaccagtaaggagttattgtgtccacgactcgcgcggtttcgaagtcgtccgctgcccactcgccctaccagcgcctgttcatgctgcccggagccaaggcgttctgcctgtccggcgcggtggcacgattgccgatctccatgatgagtctcggcatcgttctggcgctcaaccatctctacgacaattggaccatcgccggcaccatgagcgccgcctatgtgctggccatgagctgcgtcaccccgttctacgcccgcgccttcgaccgtttcggccaagcccgcgtgggccggcttgcgctcgccgtgcagatcgtggccatgctcgccttcgccttcgcggcgttggtgcgcgtgccgattccgctgctgttcgtcctggccatcatcatgggtctgacgcagttctcattcggcgcattggtccgaacacgctggtcctatgcgttgcgcggtgtggaagatggtgaacagctgctcaacacggcctacgccatggaagccgccattgacgagatcgtctttattctggggccgattctggcggcttggctggccacctccgtgcatccggtatcccaactgttcgtgcccaccgtggcatgcggtatcggcggcaccatattcttctcgctgaaatccacccagccaccggttatcgtggaacaggtcaccgtggccgcgcacgatgacggcagccctgctgcaagcgaagatgccgaccagctgaccctgcgccagctcaaacgcagcggcgccaagcccaagagcgtattgctctatgccggcgtactgccgttgctcgctgtgttcatcgtgttcaatatgagcttcacgtccttcgacgtgtccatcaccgccaccatgaaatccatgggacttgagcccttcctcggtctgcaattggcgatgttcgcggtcggctcgtgcatcggcgcgctggtgttcggctcttgccgactcaaaggctcccattgggcgcatatggtgatgttcctatcgctgctgaccgtcggctacgtgttcttccggctgtcaatggacaatctcatcctgctgggcgtcttcgaaatcctcgccggcctgaccgtctcgccgacgttcgccaccggcaacctcatcgtcaaggatctggtgccggcggaatccctgaccgaaggactgagctgggtaaccaccgcaggcacggtcggcacatcgatcggctcgtccgtggccggtattgtgcttgacgcctccaaccctcatgtgggcatgatgctgccattcatcttcacgctggcgtccgtgccattggcattggccggatgggccttggccaagcggcgtgggtgaaacggaatcgggctacgaccgatggatggttggcggcttcgccggggtctctccctcagtccgcttcacgtccagctcgaacgcaattaaatgatggctttcagccaactgaattattgctcactgtcgttcgccctcacctaaaaacgcctccggcgttttcttcacggttcggctcatcagagggagctcgacttcacggttcggctcgtcagagggagcttgattctgtggacgggatattggcgtgagggtttggcggtgataggctgattgccgattggaaaacgtcccgggtacattgccgggcaggtacgggtagacagggaagaagacatgatcaaggtttcggtggtcggagcaaagggccgcatgggctcgcacgtggtcgaagcggtgaacaaggccgaggatacgcagctggcgctcgcattggatgccggcgacgacctgacccaggtcaccaccgacaacaccgatgtggtcgtcgaattcaccgtgccgtccgtcagcctgaacaacgtgctgaccctgatcggccaaggcgtggacgtggtggtcggcaccaccggctggaccgacgagaaactcacccaggtcaaatccgccatcgccaacggcccgaagcccgaaacccagaaggtcttcatcgcacctaatttcgcgatctccgccgtactggccgactactttgcaaccaaggccgcgaaatacttcgaatctgccgaagtcatcgaactgcaccaccccaccaaggtggacgccccctccggcaccgccattcacaccgcccacggcatcgccgaagcgcgcaaggccgcaggactcgcccccgtgccggacgccaccgaaaccgatggcggctcacgcggccaggtggtcgacggcatccacgtgcacgccgtgcgtctgcgcggcctcaacgcccacgaggaagtgctcttcggcaacgccggcgagcagctgaccattcgggccgacagcttcgaccgcaccagcttcatgcccggcgtcctgcttgccgtgcgcaagctcgccggcgacgctccggctggcctgaccatcggcctcgaccacttcctcgacctgtaatcgacccgcagtcgaccagtagtcgcccccgcatttcaggcagggaagcgcgccgggacgcgcatcacggcattgccaccggttccggtcataatgccacgcattcagcaacaatcaaggtacgtaatgtaagagtccacaatgggaagtacggtgaacactatgagcgagcatgacatgcaccttcttgagccagcacctttcggccgcattctgccggctatggtcaccccgatgaaatccgacggcagcgtcgatttcgccgccgcgcagaagctcgccaaatacctcgtcgccgatggcgcggatggtctggtggtcaatggcaccaccggtgaatcgcccgtcacccatatggatgagaaggtcgagctggtcagggccgtcaaggaggtcgtcgacgttccggtgatttccggcgccggctccaacgacaccgcacacaccgtgcgtatggtcgaacagactcaggaagcgggcgccgacgcggtgctcgtcgtcatgccttactattcccgcccctcgcaggacggtatcgtcggccactacaaggccgtcgacgaatccgccgaaaagccgatcatcgtctacgatgttcccggccgtaccggcttgaaggtcaaggtcgaaacctacgaccgactggccggacttgaacacgtcaaggctgtcaaggacgccaccggcgatcttgcagccgcagtggagaagcagcagcgcaccggcctcgcctggtattccggcgatgacggcctgttcctgccgttcctctccatcggcgccgtcggcatcatttcggtgattgcccacgtcgcctccaaccccatgcagcagcttgtccaggcattcgatcgcggcgatatcaccaccgcccgtcgcctcgccaaccagctcgccccccttgtccacgcgttgaatggcgacggctatcaggccgtcatggccaaggctgcgctcaaggtcaagggcgttatcccctccaccaccatgcgtctgccgaacatcggtcccgacgccactcagcttgacaaggctgaagagggcatgcgcgctgccggactgctgtaagcccgaaacgctgcatacgggttgccagcccgccgcccctgcatgacagagcagaggcaccacaacagaaatcccaaaaaggttatggcacaagaacaaaagaaaacaagcaagaacacgaattctcgccgtcgcggttccgcgcgcggccgcaacgccaacggatccaacagccgtacgccgtcccgtaagatcaacgccacccggcaggccaccgcaccccagcaggatgccgtgctgatcgccccgccgaagtaccgcaagggctccatgcgcatcacgccgctcggcggcttgggcgaaatcggccgcaacatgaacgtgatcgaatacaacggtcacctgctgctcatcgactgcggcgtgctcttccccgaggaggagcagccgggcgtggatctcatcctgcccgatttcagctacatcaagaaccgtctcgacaaggtcgacgccctggtgctcacccacggccacgaggaccacatcggcggcgtgccctacctgctcaagctgcgtccggacatcccgctgatcggctccaagctgaccctcgccttcgtggacgccaagtgcaaggaacaccaccagaaccccaccaaggttgaggttgccggccgtgagaagctcaaggtgggccccttcgacctcgaattcgtcaacgtcacccactccatcccggacgccctggccgtctacgtcaagaccccggccggctccctgatcgacacgggcgatatcaagctcgaccagctgccgctcgaccaccgcatcaccgacctcgtcgaattcggcaagatcggcgaaaagggcgtggacctgctgatgatggactccaccaacgccgaggtgcccggctttgtcaagcccgagacctccatcggcccggcccttgaccaagcgttcgcccaggccacccgcaagatcatcgtcgccagcttctcctcccacgtgcaccgtgtgcagcaggtggtggacgccgcccacaagtacggccgcaaggtcgtgttcgtcggccgttcgatggtgcgcaacatgtccatcgccgccgacctcggctacctgcacatccccgaaggcaccgtcgtggacctgaagcaggccaacgacattcaggacgacaagctcgtcttcatgtgcaccggttcccagggcgaaccgatggccgcactcggccgcatcgccgacggcaaccaccgcgacatccacatcaacgagttcgacaccgtgattctcgccagctccctgattccgggcaatgagcacggcgtctacaaggtgatcaacaagctcgtgcagctcggtgccaaggtcgtcaaccgcgacaacgccgccgtgcatgtgtccggccactgcaacgagggcgaactgctgtacatgtacaacatcgtcaagcccaagtgcgccatgccgatccacggcgagaaccgtcacctggtggccaacggcctgatcgccgtcaagaccggcgtggacccgcagaacgtggtcttggccgaagacggcgacgtggtcgacctgtatcacggcaaggccgcggtcgtcggctccgtgccgtgcggttacgtgtacgtcgatggcgattccgtcggcgagctgaccgatgacgagctggaaaagcgccgcattctcggcaccgagggcttcgtatccgcgttcgtggtggtcgacaccgacaaccacgaggtcgtcaccggcccgaagatctacctgaacgccgtggccgaggacgaaagcgagttcgacaaggtgcgtcaccagatcgtcgaacagctcaacgaccagatgatgcagggcgcgcgtgacacctacaagctgcagcagaccatgcgccgcacgctcggcagctgggttgcgcgccagctgcaccgcaagccgatgatcgtgcccgtcgtggccgacatcgctcaggacgtcgaaaccgtagaaaccaagtagtccggattatccagggacgaccgtaaggagtaattgaagtcatgcccggttctaatctcactcgtattgaagccgaagaacgtaaggccgttatcgaagcgccgattcactatcacgtcgaccttgacctgacggtcggcgcgaagaacttcggttccaagtcgctcatctgcttcaacgcgaagcctggttcgtcgaccttcctcgacctgattgccgacgaagtgacatccatcgacctcaacggcaagtccctggacccagccgtggccttccaggacaaccgcatcgaactgaccgacctcaaggagaagaacgaggtcaccgtcgaagccaagtgccgttactccaacaccggcgagggcctgcaccgctcggtcgacccgtccgatggcaacatctacctgtactcccagttcgaggtgccggacgcgcgccgcgtctacgccgtgttcgaccagcctgacctgaaagccaccttcgatttcaaggtgctcgctcccgccagctggatcgtcacctccaacatgccggttgccaccatcgaggacgatccgcgcgaaaccctcgacggcaccctcggcgacaagccgaacgaaagcacccgtctgtgggacttcgagccgaccccggtgatgagctcctacctgaccgctatctgcgccggcccgtacgccgaatggcacaccgaatacctgaacgaagacggtcgcaccgtgccgatggcccagtactgccgacagtcgttggccaaggccttcgcgaaggacgtcgactacctgttcgacatcaccaagaagggcttcgcgttctacgccaagacctggggcgtgccctacccgtacgccaagttcgaccagatctacgttcccgaatacaacgcgggcgctatggagaacatcggcatggtcaccatccgtgactcctacgtgttcgagtccaaggtgaccgacgcgctggccgagcgccgcgtggtgaccgtgctgcacgagctggcccacatgtggttcggcgactatgtgaccatgaggtggtggaacgacctgtggctcaacgagtccttcgccgaattcacctccacgctggccactgccgaagccaccgaatggcatgacgcctgggccaccttctgctccggtgagaagagctgggcgttgcgccaggatcagctgcccaccacgcacccgatcgtcgccccgatcaacgacctcaacgacacctacgtcaacttcgacggcatcacctacgccaagggcgcctccgtgctgaagcagctggcattctacgtgggccgcacgcagttcttcgaaggtatccacaactacctgaaccgccacgcctactccaacgccaccctggccgacctgctgagcgaactggagaagacctccggccgcgatctcaaggcctggagcgccaagtggctggaggaatccggcatcaacacgatcgccaccggcctgaccgtaaacgcggacggcaccatcgccgaattgaagctcacccagagcgcgccggccgaacacccggtgctgcgtccgcatcgcctggccgtcggcttctacaacgaagacgccgaaaccggcaagatcgtgcgcaccgagcagttcgaactcgacgtggatggcgaaaccaccatcgtcgaggccgcggcaggcaagccgcgcccggcattcgtgctggtcaacgacgatgacctgacctacaccaagattcgtttcgacgccgaatcccaggcattcgccgaagccaacctgcatcgtttcgacgatgccctggcccgcgccgtgacctggctcgccttctgggatatgacccgtgacggcgaattcccggccgaacgcttcgtggacatgaccctgcgtcttctggccacggaaaccgaatccaccaccttccgttacgcgctggcctgcatgagcaccaccgcccaccactacgtggcgccagcccgccgcgacgatgtgctgcgccacgtggccgccgagctgtggaccctggccaacgccgccggagccggctcggacacccagttccagctcgccaccgcctacctgggctatggcgaggagggcgatgccgcattcgccgccaacgcacacggtctgctggacggcaccgtgcgtcttgaaggcctcgaaatcgacaacaacttcacgtggaccatcgtccaagcgctcacctccgtcaacgagatgaccaacgacgacgtggacgcgcagctcgccaagaaggagaccacggaaaaccgcgagttcgcctacggcgcccgcgcctccatggccacgacgcaagccaaggaatgggcttgggatcaggcactccacaacgacgagctgaccaactcccagctcgaagccgtggcccgtggcttctccgccaccccgcgccacgacctggccgagccgttcgccgcccggtatttcgaggccgtcgactggatctgggcgaacaagacctaccacatggccgaggccctgctcaacggcctgtacccgggttacgccgatcccgccacgctggtcaagctcggtgacgcctggctggacgagcacattgccgccgacaacgccctgaagcgtctgatcgtcgaaaacgtggcatcctcccaccgcaccctcaaggttcgcgaatacaacgaagcgctctgatttccttctggctcccctcgggtgcgaggggagttgtcgcctcaggcgactgagggaatcgcttccgcgaggagctacgtccacattccaacataaaacccgcaaccaatcctcaacagcgtattctcgctgaaggccggcaatgtgccggtcgatgagcgacaaggatacggggaatgattgcgggcttttccataacttcattactactgattctgttggccggaatcggcgcaggattcgtgggctatgcggtaggcgcatcgtcactggtctcatacccggccttgctcgcgttcggcattccgcctgtattggcaaacgcttctaacaccgttggcgtggtcggcacgggcatcggtggcgtgatgggcgcgcgcaaagaactcaaaggccaagcggtacgctccattacgtatgtggtcattggcgcgttcggcggggtggccggtgcgtttctgttgctcaaactcgacccgagtgtctttgaattcgccgcaccagtgctgattttgctgagctcgctgatcatcgccatcaatccgcgcggccgcatgcaggccaagcaggccgccgcggatgccaccgcgcaactcaagcacatcgaagccactgaagccaccgatgccactgatgccgccaagcgcgcaaccacccctaccgcacctcaccgcccgccggaacaactcgtgcagcccatgagccaggattcctggtgggtatggctgggcgtggtggcagtcgccatctactccggctacttcggcgcgggcgccggcaccctggctctcgccatgcttgatgccgccaaaatcggcccattccacaagatcaatgcattgaaaaccctgatcggcacaggcgcgaacatcagcgcctcagtggtattcatcatccaaggcgcggtcgattggccggccgccatcatgctgtgcatcggctgcttcatcggcgggtacatcgccccgcccatcacccgcaagattcccgcaaacatcatgcgcgccgccgccgtaatcgccggcatcattctcaccatcgatctggggctcaaaacctattgattcgtgccttacactgatgcagtgaagcatacagcatggccgccaaccgcagcgtggccgcagaccccgataaggtggccaatgtctggcatttggcgactgcggaacctgagcgcctagaaaccaacgcggtaggcaaagaggtgagtgacttcctcgatccgccagacacgtcgcagattcacggcgttgcgtgccatgctgattggtggttcgcggcgcgagcaggtgctgttcgccggcgttatgaaggagctactcgcgcccatcaacaatccgcgatatgtcatcatcggcaaggaatggggcgtgcgcacgtacggtgtaagcttcccatgcccgtccatatttgcccgccgccagcaggacgccgaaatactgcgccggcagttggaccgctgcctgacgcattgcaccatggtatacacccgcactgaggaaggccggcgtacgctacttcgttgccaaacgcgttctttcctcaaccgtgacgaacaactgccgcgcatactgaccacaacatcggagtgatagatcgttgcatgcatagccgagaccactccggtagaggagatgccgttgggcatgttcaccgcatggctcagcgtgttcctcgccgtcgtgttgtatacgatcacgtttgccggcccattcgtgctggtacgccgtcttcgttcccgcgccagagcccatcgacctgcccggcatgcccgttaaccgatacttctcattgttcgtctatcgagcaaggtggcacgtacgatacttggtataggggagagtttctcgctgtctgtggtggaaaatccgagttttattatctgagtcagtgctttgggtttgcgttttgggctcgatttactattggacggcgatatccggggcgggcggctagctgttgggggttcttgtcgcggctgtagatgtgtgttcggtctatcggtgatgcttgtcctgttcgtggaccgggcgaagtgcgggacgacgcgcggatttcgcggtttttcgtctgccgtcccgcagagagcccgggggatgattatggtccgtaacggggattggcgtgattgcgcggttctggcggttgatagtgtggaacgccacgaacgtcaaacgattgatttctctaccatcccacgttcctgcgggacgccgcgcggaaaccggccaaatccgcgtgccgtcccacaggcatgaggctgtattcggccggccactgtccatggcggacggacgaacagaccccactggctatcgtctgcgcttctgcagcgctcaccccggccttccacggaaatcatgacagcatgaaggtgacgaatggcctggcttgcctgtggacgccgatcaatgtgtgcgacaatgattcgcggtacatggcccctggccggggtggtcacggcatcattggtgatgagattgttggttgaggcgcgctcggtgtcaagacaactcaccaggaatttcgatacgagcctcgaccggttgggcagaatatccggtgcgcccacaatgcctacgctggagccgatgggaataccttcaagttcgttgtcgtctacggtgataactcggtattcgtctgaggggatgagcagacgtgcgctggtggtgttgattaccggatgcagcacaccgttgacgctgatgaatcgagatgcggtgtctttgcccacaatgagtttgttattgctccagtctgaaggcaggccagggctgatgatgccatagaacacactgatcagaaccatgatggcggtcaggccgatactgaccatcaccggcgtcaggcctttcttaggagtcagctccttgccatccggcataccggaagtgaaggcagtaatgagcctggcccgcgaatagttttgtgcgtcctgcaggtccttcttattcgccatggcccctcctcacaatcccaatgccacgtaagcgagcggcagggtggccaccacacagattacgttcgaggcgtcagccagacgggtcatggcgatggaatcgtgcttagacagctgtgtgccgatgacgcacagcaacgctcccagtgagaacaagcccaccaccaccgaagcccacgtggggtgaaacaccgtgcatgcggcacaagacaggcagatgccggcacctgcggtgataacggtgatcagcatttccgattgtgcatagatgcgcctggaatcaagcagcatggctgcgaacagaaccaaggtaagtgccacgcctgctgggcttgcactggaaacagccagagacgtgccgaacacgatcagtgcgctggtggcagcgcgcaggtcgaacagcagcgtggagccgatacggtacttattacgcacttcgctgatatcgatgttcttgggcagcgcgaaaatctccgattcgctggtggggctgtccacagacaatcgtgcggaagacaggctgagccacggcagcgcattggcagccagaccgagcagagccactgccacgatccatacgcgagtggaccagtgcggcatcgttacacacacaatgccgagaatcaccagtgctgcgccgataatgacaggaatcaacgcgtacagtctgttcactgtaagcagcaaacatgaaatgccgccggccagcagtaaaccagcaccgataccaacggccgggaacccgtagaacgagggattgaacagtgaacccatgagatgatatccggtcacgccggccaaaagcgaggcgactagcgacagtgccagtgcctgccgatgcatatggcgcgaagccagtaccgtggcaatcgccagtaaagcggctgcggtaatgcccgctacgccagcattgatgatggatagtggggccaatgccagacaaatcgctccgacacccagtagcacacaactgaccaccattgtggtcactgtggtattggcactggtccacggtcgatgagaacgctccaccgaatcggccaccgcctcaaccacatcgtcgtagacgatatcctgatcgcccaaggcgttgacctcgagtttgagacgttcaccgtctcggatggcctgatcggccagcgaagcgggattattgatggcggtttcgtcgtcacgggtcagtcggtagccggcatacaccagagtcggatcgaacacacctagtttcttggcgatatcaggcagcagttcagctaccggaagtgtcgacggaacattgagtttcgcggagcgtttgccatacaccacagtgatggccacgcgcggggatgatgcggaaggcgagggctgattggctggcactcccatcgcaatcgaaggtacgggcgttggcgccggaacgtgtggtgccatgcgcggcgatgccggcatcatggacggtccggcgggcgtgtggcgatgcgacgatgccatagggtgcttcctcttctcaataaactcccaaaggtctactgtattcttgtattctctcacacattgcgggtatcgggaatgccattgtctggtcctagagcagattccgtggcgttttttgccgagtcgggtcctagggtggagcacaacgactacgatggtgcgggtaacgtgatacaaggagtggaacttcatatgccgaagatgtttggaaccgatggtgttcgaggactggccaatagggatttgaccgcacgtctggcgttggatttgggcgatgccgccgtgcgtgtgctcggcgacgccggcacccaagacgatcagcctgagggacgccgccgcgcgctcgtgggacgtgacacccgtgtgtccggtgattttctggcttccgccctgtccgcgggcatggccgccggcggcttcgacgtgatcgatgccggcatcatccccactcctggcgtggcctacctgacctccgtgctcaacgtcgaaatgggtgccgtgatctccgcctcccacaacccgatgcccgacaacggcatcaagttcttcgcacgcggcggcttcaagctgcccgaccagaaggaagacgacatcgaggccgtgctcggccaggactgggaccgcccgaccggtgccggcgtgggccgcgtgagccacgaccagaccaccgccaccaacctgtacatcgatcatctggtggccaccatcgctccgctgaacgatgacaaaacccagcccaagccgctcaagggcctgaagatcgtggccgactgcgccaacggcgccacttccgtggtggctcccgaagccctgcgccgtgccggtgcggatgtaatcgtgatcaacgcctcgccggacggctacaacatcaacaagaacgccggttccacccaccccgagcagctgcaggccatggtcaaggccaccgatgccgtgatgggcgtggccttcgacggcgacgccgaccgttgcctcgccgtggacgaagacggcaacatgatcaacggcgaccagatcatgggcattctggcccgtgccaagcagcgcgaaggcaagctcaaccacgacaccctcgtggtcaccgtgatgagcaacctcggtctgaagctcgccctgaaagacatgggcatcaagaccgtggaaaccgccgtgggcgatcgttacgtgcttgaggaaatgctcaagggcgattactcgcttggcggcgagcagtccggccacgtgatcaaccgcgaattcgccaccaccggcgacggcaccctgaccgcactgaccctgtgcaacgaggtcgtcaagtccggcaagagcctgaaggagctcgccgccgacttcccgcagctgccgcagaccctcatcaacgtgccgaacgtggacaagaaagccgccgccaccaacaagcgcatccaggatgccgtggcccgcgaggaggaactgctgggagacaccggccgtgtgctgctgcgcccctccggcaccgaaccgctcgtacgcgtgatggccgaagccgccacccaggcctacgccgacgaagtctgcacccgcctcgccaagatcgtcgccgaagaactcgcgctgtagcacccttccctaaggaaaagcaatgtttggaaagaacgccaaagtcgacctcgaactcaaccgtgatgtcgaacaactcatcaaaaccggcggcaaggagaagctcctgcccatcgtgcaggccggcgaaccggtgttgcgccaacggacggtggcctaccatggccagctttccaagcgtacgctcgccaaactcatcgatacgatgcacaccaccatgctggaggcgcccggcgtggggctcgccgccacccagatcggcttggggctcgcgctcgccgtggtcgaagaccacgtgcgcgacgacgaggatgatccgcgcgaaatcgcggaattccccttccacgtgatcatcaatccgagctacaaacccaccagcgacaaaaccgcctcgttctacgaaggctgcctgagcttcgacggataccaggccgtgcgcaagcgttggctcgacatcaccgccgaatgggatgatgaagacggcaagcaccacagcgagccgttgcacggctggcccgcacgcatcttccagcacgagaccgatcatttgagcggcgaactgtatatcgatcgcgccgaaatccgttcgctgaccaccaccgaaaacctcgaggattattggtgcgacgacccggtacccaccgaggccgccgaagaactcggcttcgcactatgatcgaccgcacatggctggacgccgccaagggagacattccccaatgggcggcgtccatgcccaaagacgccgacggcaccaccattgactgggactgggtgcgttcgctggacctgatgcatggcatcagcgtattgctggcgcttgctgcagatggtgagcaatatggcgaaaccgcagcacagcctcagctcgggttggaccaaccggaactgacgccacaagctatccacgacgcattgaaggtcgattacgccacacgcgagcatctggaatcaatcatcgcccaatgcaacagcacattcatgaccgattacgatcgattcatcggctcctatcgtctgcctcgcgcgctcgcctacgccaatcgtcggctcaacgacaacatcaacacgctgttgcatctgggcgaacagcaacacctatgggtggtcagtcgcgaacggcgggggaggactaccgttgccgtgctcaggccgtactccggcagccgcccatcgaacgatgaccaaggcatgctgaatctgagcggtgaaaccggtgacgcatctgccggaaacactgctgccgaaagcagcgatgtcaagttccccacaacagtcgccttggacgatatccaagaccgtacggcggcgattcttgacgcacgcgccgaacgacgtaaggcccagcgcttccagaagcgtgcgggcgatgcggcgatggcccgcgccaatctctccggcgcgacttcgccgggtggtgccgcctcgtctggcaacgctaccggccaccatcccaagcccgactggcgcgacgcctatctgcccggccgcgacgtggacgcggtgatgggcatcgacatcgaaaccaccggcatcgatccggcgcgtgactacatcatcgacgtcggcttcgagttcatgaacatggccagtccgcgcccggccggcgaacctgagacatacgcctatgagcagggctattacgccgccggcgacgcctacggccagtcccgtctcgcttttggcgtgccgccggaaaacgcggcgctcggcaacgccctcatcgccaaactcaccggcatcgatgtacgcggccgcagcagcgaggccgggtaccgactcttcgacgaatggccccaagcccaggccggcctgctcgcgcggcttacccagcagccgtacgtggcgcataacgccaccttcgaacatagctggttcatgctgaacgtcgccggatacgcggaaagctaccgtgccgggcgcatcaccatcatcgataccctgccgatgagccggcagtgggaccccggcgcggtacccaccaacgagcatccttacggagacaacacgctcgacgcctacgccaaacgtcagggcgcgcttgattccgcccacaacgaacgccacttgggccttgaggattcgcacatcatgctggtggccatgaaacaccatctggcggcgctgaaagcgcaaaggaaagggccgtgggggcccgccggcagggctggcgtcggcggcaagtcctgcggtcgtaagcggtgagtacactattggtctcgtgagtaactatcaggacggccgacagcagcgtgagaaccgccgccgcaccatcgtgcgtgtggtgtgtgtcgtcatagctgtggccatgctcggctccctgatcatcccggcgatttacgcggggctttgacgttgccttcgcatattcgtgcccgcagttgaacacgtctgatgcgagggatttgtgaggtcgcccggccggctatcggcaaggcaggcccggaaccttctggcagcatggattgcaggcggatgcgtgtgtggcgcggcaatgcccgccaacgccagaggaatgtgcgaaggctgtcaacaaggacgtgacttcccaaagaatctcaaagaatcaacagtaaggtaaaccacgatggcagaatttgactttacccaggcgatcggcgaagcccgcgccaaatacgaatccatcgccaaggcgctggacgtcgaccggctcaaggccgatatcaaggatctcgaaacgcaggccgcggccccgggcctgtgggatgatccggaaaacgcccagaagatcaccagccggctgtccgccgcggaatcgcagctgaagcgtctgaactccgcctcccagcgcatcgacgatgtggaaacgctcgttgaactcggccacgaggagggcgaccaggactctctggacgaggcgcaaagcgaaatcggcgagattcagaaggatctcgaccagatggagatccagaccctgctcgatggcgaatacgacgaacgttccgccgtggtgaccatccgctccggtgccggcggcgtcgacgcggccgacttcgcgcagatgctgttgcgcatgtacctgcgctactgcgagcgtaacggcttcaaggccaaggtcatggacacctcctacgccgaagaggccggcatcaagtccgccaccttccaggtggacgccccctacgcttacggccgtctgtccgtggagggcggcacccaccgtctggtgcgcatctccccgttcgacaaccagggccgccgccagaccagcttcgccgccgtggaagtggtgccgctggtcgaggccaccgaccatatcgacattccggatacggacatccgcgtggacacctactgttcctccggccccggcggccagggcgtgaacaccacgtactcggccgtgcgcatcacccaccttcccaccggcatcgtggtgaccatgcaggatgagcgttcgcagattcagaaccgtgcctccgccatggccgtgctccagtcccgactgctcgtgctgcgccacgaggaggaggccaagaagaagaaggagctcgccggcgacatcaaggccagctggggcgatcagatgcgctcctacgtgctgcacccctaccagatggtcaaggacctgcgcaccggctacgaaaccagccagactcaggccgtgttcgacggcgacatcaacgcgttcatcgaggccggcatccgctggcgccatgaacagcgccgcgccgccgaaaccgaggagtaaacagaattatggcactgatctcactggacaatgtgtccaagatctatcccaaaggcacccgaccggcgcttgacgacatcaacctcgatatcgaacgcggtgatttcgtgttccttgtgggtgcgtccggctccggcaagaccacgctcttgagcctgctgttgcgcgaggaggaggccaccagcggcgagattcgcgtggccggcaacgatctgcggcgcatcaccaaccgtcaagtgccgcagtaccgccgttcgctgggcttcgtgttccaggattacaagctgctcaataacaaaaccgtatgggagaacgtggcgttcgcccttgaggtgatcggcacgcggcggtccaccatcaaatcgttggtgcccaaggtgctgaataccgtgggactcaccggcaaggaaaagaactatccgcatgagctctccggtggcgagcagcagcgtgtggccatcgcccgcgcctacgtgaatcacccgcagattctgctggccgacgagcccaccggcaacctcgacccgaccacttcgctgggcatcatggaagtgctggacgccatcaaccgcaccggcaccaccatcgtcatggccacgcataacgaagagatcgtcaactcgatgcgcaagcgcgtggtcgaactgcacaacggcaagatcgtgcgtgacgaggctcatggctcctacgattccgccctgttcttcccggatgccgaagtcgaagccaagtccgacaccgcccatcatgtgctggcggcggcgaccaaggccatcgagggcagtgacgagccgtctgaaggcatcgcccgtttggccaattccgtgcattccggccgcaccggccgctatggcgagacgtttgcgccgctggaagacacgctgacctggggcaagggcattccgttggatgagcaggccgccgccctggaaagcacccaggcgttcgacccgttcaaggacgagtccgccgcgaccgccgcggttgccgatacgtccgtgtcatccgccgccgagccgccggccccgccggagccgcccgcaccgccggaaccgcccgcaccgccggccaacgagcagtccgccgccgagcagcctgctgacgagcagtccgccgacgagcagtccgccgcagaccaaacatccgacgatcaacccgctgagggcgcgaaggagtaagggggatcatcatgcgagcacgattcattctgtccgaaacgtgggccaacctcacccgtaacctgtcgatgctgctgtcgctgacgctggtcaccttcatctcattcctgttcatcggcgcttcggtgcttactcaggcgcagatcaccaaagccaagggcgactggtacgacaaggtcgaggtcgtggtgtggctatgtcccgacggcaccagccagtccgcgaactgcgcttccggcaaatcgccctcagccaatgagatcacggcactgcagaaaaccattcgtgatgaactcaacgacgtggtctccaacatcgactatgtcagcaagcaggatttctacgacaacaccttcaccaagcagtacccgaacggtgaattccaaggccgtacgctgaccgcggacgatatgcaggactccctctggctcaagctcaaggaccccaccaaatatcaggtggtctccgaagtgctctccggcaaggagggtgtggaagacgttaccgatcagcgccagatcttcgacccggtgttcgccgtgctcaaccgagccacggcggttacggctgtgctcgctggcgtgatggtggtggtcgccatcctgctgaccggaaccaccattcgtatgtccgccgcatccagacgaaccgaaaccgaaatcatgaggtacgtgggtgcctcgaactggacgattcgtctgccgttcattctggagggcaccatcgcctcgctgatcggctcggtgctctcgtgcctgatgctttcggctatcgtcaacgtgttcgtcaccggctggctggcgaaatccgttacatggattccttatgtgaatcagctcacggtactggtgatatcgccgttcctggttgtgggcgcgatactgctgtccatcatcgcttcaaccatctcgttgcggcgttatttgagggcgtaacgcgaccggcttacccgcgagaaatgtgatgacatcgtgtgcaagcctctcaggttcgcatgttatggtattggcttaagtgagcgaaaggactattcacatatgacgaatgtacgtgtgatcaagcccgcactggcggcattggtggccgccgcagcctgtgcgggaggtctggcgttcagctcggcacagcctgcccaggcagacacctattccgacctgatcaatgcgcagaaccagcacgccgcgtcggtacagcgcgaggccgaactcaagcagcagctggccggtgccagccaggacctggcgaataaggtacttgagctggacgatctgaccaacaacaagattgtcgccgcgcaggccaaggtcacacaggccaacgaggatgccgccaccgctcaggacgaggccgatgccgcatccggacgtctttccgccgcgcagaaagacaaggagacgcttgaggagcggatcaagcagaccggcaaggactacgatgacgcgcacgccgccgtggcccagctggcccgtgacgagatgcacggctcgaatgcttccgacgtgatgagcgtggtgacgggtgccaccagcacacaggacttcgtcaactccatgcagtcccgggacgcgttgtcccgcaacgaggcgaatgcggcttcctccgccgcgacctcactgagcacgtcgaagaatcgtggcgagcgcttggcggccatcgaaaagcagatcgctgtgctcaagacccaggccgatgagaaggccgcttccgcacagaccgccgccgaaaccgcgcaaagcgaacgtgacgctttggataagctgcgccaggaaggcgaagcaaggcgtgacgaactgtcttccatgatcgacagtctggattcccaatccgccaagcaggcggcccggaccgtgctgatcgcctcgcaggtcgattcctacaaccgtcagttccagaaggagcagcaggacgcc

SEQ ID NO: 3165 - DNA, 2772 bp, Unknown
  R53_2m  MAG No. k141_1003
attgacgtggtatcacaacctttattcagttctcatcgctgagactaaaccgttttagcttccggccagtcgcgaacctgttaactaaatcggtttagtaaaaacataacacaatcgaaacatgcacgcaacgaattcatcgtcgcgtgtcgcattgatatttgcccaacgggatcgctctccctcttctcatacaataatgggccgcgcccaaccgtatggcagagccggtctgttccggttccgttacggttgggcgcgacccaaaatatcgagcctaggcccaatatcccttatcggcgaatacgcagcgtggcgagctggaatggcgccaacgaaacgaccgcaccgtcggcaggcattggttcgtcaccggcgagcgcgcgcggcagttcggcatccagctccggctcctccatgagattcacctcctgcacgctggccttggcatcggagagagcggcgtcaaggcgcagtgtggccgtggcattgccgccggcggcctcgtacaggcgcacgatcagatcgctggaaccgtcatcggcgagcttgatccagtccaatacgatgacgccggtggcgtcggcgagcgagaccagcggcgccatatcaggcaactcccctattacggggctgttaagtcgcgccgcttcgtccagcaccgcattcatatcggcgtcagcgaccagagaccacgcgaaggagtgtgcgccttggtcggtgcgtgggtcggggtacagcggtgcggacagcagcgagagccgcaccatggtgccgcggccggtgccatgtgccgcatcggcgtggatggggctgacgtcggagccgtaggtggaggcgttgaccacagcggcggcatagtcggcgtcggcgatccgcacgaagcggtgcgtgcagctttcgaatttggcatcatcgctgcgcgtgttcttgttgatggggcgttcgaccagaccgtattggcattcgtattgcgcgttcaccgcttgcacggtgaccggcatatccactttgaggaactgttcgacggcatgccagtccacatcggcggtgaagtccagtgtgacggagcccggccttaaggcaatgcccgtacgaatttcaacgcccttcgcgcgagtgacagcatgcacgacggccccaccgttggcggtttcgtccacgcttgcaatcgatgcctcgctgagcgcgttggcggtgaggaacgcatcgcgttgaatatcccaggcgtcccagtggaagggttcgtctttgagcatttcgtagcggcccagtcgggtgccggcgggcaccagttcacgattggttcgctgatcgacgattgacgaaacggtgccgtcggcttcaatgcgcacgtgcagtcggccgttgtcgagcacaatcgtatcgccgtcatgggtaacggcgacccgagccatggatgcggttcccgcttcggctcggctcgaagccgggcgtaccacccacgtctcacaggcttggcgggaatatggggcgattacggcgtcggttatggttgcgtcatcgggttccacggctgcgatcgcgcgcccggcttcaagggcgatctcgttcagccgagcgatgtcacgcgcgtattcggtccgcgcctgacggtgtacccatgcgatggccgaaccgggcagaatgtcgtggaactggttcaggagcagcgttttccaaatacggtccagctcttcgcgcggatagacatagtccgggttcttgatgcgggccgcggcgcacaggtattcggtgacgcgcagcatcgactcctcctggcggcagccgcgcttcatgtcctgctgggcggtgagggtggcacggtgcagttcaaggtacagttcgcccttgaacaccggggtctccccttgcgcatcgtcgacgatatccttacgcacgcggtcgaacagttggtcgggagtaccgaattcgatcttcggcgcgccggcgagatcatggtcgcggcggatgcgcgcggtcatctcacgggtggggccgccaccgccatcgccgaagccgtacagcagaatcgcgttacgggagaggtccttgtccaggaagttgcgctgcgaatacatgagctcgtgcatgctcatccacgagcagtaggtatccgagggcgggaagtgcgtgagaatacgcgtgccatcgatgccctcccacatgaacgagtggtgcgggaacttggtggtgtcgttccacgagatcttctgcgtgaggaaccagtcgaatcctgcacggcgggcgatctgcggccaagagccggtgtagccgaaactgtccggtagccagatgccgcgcggcgcgacgccgagatgctccttgaaatatcggcggccgaacgtgatctgccgcaccaatgattcgccggaaggaatcatgttgtcggattccacccacatgccgccgaccgggatgaagcggccctcttcgatgcgccgcttcattcgtgcgaacaggtcgggatgctcctcttccagccatgcgtactgttgggcggaactcatcgcatacgtgaagtccgggtcttcgtccatcaaagccagcacgttggatacggtacgggccaccttgcggcgggtctcgcgcaccggccacagccatgcggagtcgatatgcgcgtggccgatggcgatgtgtttgattgcgctggaggcggccggttcggcgagtacgccggcgagcgccgcacgggctgccgacacggtttccaagtcgcgttcatcgtcgatgttcagggagcgttgcagtgctttggcgagctgccag

SEQ ID NO: 3166 - DNA, 23203 bp, Unknown
  R53_2m  MAG No. k141_1039
ggttacttatgtaagagcacaagcgcaaccggcaaatgtggatactatgacgcggtttggcgtgttgtggataacgtgtggatgaaaacccggttatccaccattagttcagaaggtttaccaaggctccccagccgacttacctgtgatgacaaacaacccgccgagttgttcgctgaatacgtcagacccagtgagcggagaggggagccaaggtgcggtcacttcaccaaatcggtgagttcgccaaggttcagttcgaagctgacgccacgatcctcgaaatgcggctggttacgggtgctgaccatggcgtggcgcacgaactcgccggcgatttcggccgactcggccaggccgcggccggccatcaccgcgccgcacagggcagatgcgaaggcgtcacccgtgccgtgaatcatgtatggcagcttttcatgagccagctcgatcttgccggcaacaccggtggaagcgctggccacatagttgacgattttgccatcgccatggtcgatgcccttcagcaccacgttcttggcacccaacttcagcagagcaccaagaagctcgttaaccgtggcctcatcaatattctggccgggatagtcacgcttggtgagaatactcgcttcggtgaggttcggcatcaacacgtcggcaccatcggccagagcgcccattgcctcgcacagctccggtgtgtacgtggggtacatttcgccggcgtctcccatcaccgggtcgaccagacgcagcgcgttcggatattcacggtagagacgctgaatgatcgccacctgatcgggggagccgaggaagcctgaatacacgccatccagttccacgtcttccttctgccaggcatccaagtaaccggagagaatatccgtggtgtcgtggaacgtgaacactgcatagcgcgtgtgcgccgagaacagggcggtcggcaccgggcacacatcgcagcctgcggccgagagaatcggaatcgcggcggtcagcgagcacttgccgtagccgcacatgtcgtgcacggcggccacgcgcggaatatagttcggatcacggtcatacagtgttacatcggtcatgtctgttcgaatcccttcaccatgttggcggaataattcattggcgatgtttgactgtagtcgttcgtcatgtaaaccatgtaaccgggcggcggaaaaaggaacagacgtcatcaccgagcgggcaaaccgtcttggtgacgggtggaacaaacaatcatcacggacacttgagccatgcgcgaaaggcatggtagcgatatcaccgtgaccgcagtcgaccgtgaaagcgcatgcgtgcggcccggcgtgtcgcgataatttcaacgactttttcgtgacttctgacagtctcccacgtcaatgatcccaaggctttataagcccttataggcaagcccgataacgttcggcttgcgccgcgcggcccaagcgtcgtaacttcataaccaacacctcgccaaccgcccgaacacggcaggcgggtggcaaggaaaaatcctcgcgacctagcacaaccaaggagaaagacccatggccgagaacaacaagaagtaccgttttgaaaccctgcagctgcatgtgggccaggagcaggccgacccggccaccgactcccgtgcagtcccgatctacgccaccaccagctacgtcttccacaacttcgaccacgccgaggcccgtttcgggctggctgacccgggcaacatctacggccgtctgaccaacaccacccagggtgtcttcgaggaccgcatcgccgcccttgaaggtggtaccgccggtctggccgtcgcttccggcgccgccgccgtcgaatacgccgtgcgcaacatcacccagtccggcgatcatatcgtcgccgccaagaacatctacggcggtacattcaacctgctgcgccacaccctgccgcgcgacggcatcaccaccaccttcgtttccgccgagaacccgcaggagttcgaggacgccatccaggagaacaccaagctcgtctacttcgagaccttcggcaacccgaacgctgatctgccggacttcgaggccatctccgaaatcgcccacaagcacaacctgccggtgattgtggacaacaccttcgccaccccgtacctgttccgcccgctggagcacggcgccgacgtcgtggtcgagtccgccaccaagttcatcggcggccacggcaccaccctcggcggtgtgatcgtcgaaggcggcaagttcgactggaacgccgttccgggcaagttcccgactctgaccgagccggatccctcctaccacggcctgaacttctacgaggccctcggcggagccgcctttgtgacccgcgtccgcgccattctgctgcgcgacaccggcgccaccctgtctccgttcgctgccttcctgctgctgcagggcaccgagaccctgtccctgcgcgtcgagcgccacgtccagaacgctctgaaggtcgtcgagtacctgcagaccgtgccggaagtcgagtccgtctcccatccgtccatcccgggccgtccggatcacgacctgtacgagaagtacttcccgaacggagcaggctccatcttcaccttcgatatcaagggcggaaaggatgcggctcgcgtcttcatcgacaatctgcacctgttctctctgctggccaatgtggccgacgcaaagtccctcgtcatccacccggcttccaccacgcactcccaggagaccttggaagagctcgaggaccagggcattcaccagggcaccatccgcctgtccatcggcaccgagaacatcgaggatatcctcgatgacctgaagggcggcttcgaagcccttcgcgcttccggcttggccaagtgaggtcgacaggagggttgacggcccgatgagaaggggcgcgatgctaatggggtgcatcgcgaatcatcgagccgcatggggtgccttccgcctgatcgcttgacccaaggagtagaaagctcgcactgacgtcatgcagtgcgggctttcttgcgtctgtatgcctcacactgtttgcgcagaggcatgaatagtgtgagacctgagacgacataatcctcaaggatgagggccggcgcgtggcccctagcccaattcagtctggcgcacgatggggcgcgccgttatttcttcataagttggaatcgtcatccgggcataaggtccggccaaatatggagaggcattatgaacgtgcagaacccgtccgcatcgcgcggcatcgctattcaggccgtcgacttggtcaagaactacggcaccggcagcaatatggttcacgccctgcgtggcgtgaacgtgagtttcgaacgcggcaaattcaccgccatcatgggcccgtccggctccggcaaatccacgcttatgcacacgctcgccggcctcgactccgccacatccgggcatattcttttcggcggggcagacctgacccgcatggacgacaagcagctcaccttgctacgtcgccacaagatcggcttcatcttccaaagcttcaacctgttgcccatgttcaccgcagagcagaacatcctcatgccgctgactttggccggtgataagcccgaccgtgcctggttcgacctgctcgtagaaaccttgggactcaagcagcgcctgaaccaccgaccgaacgagctgtccggtggccagcagcagcgcgtggccatcgcccgcgcgctgattaccaagccgaagctggtgttcgctgacgagccgaccggcaacctcgactccgtttccagcgccgaagtgctcggcttcctgaagcgttcggtcaacgagcttggccaaaccatcgtcatggtcacgcacgatgcggtggccgcctcctacgccgaccgtgccatcgtattcgccgacggacagatcgtggccgatgaatcgaatcctactgccgaaacgatgaacgagctgcttatggccgaacgcgaacgcgccacgcgcactgccgtcaccagcacacgcgccgacacgctcgcccgtcttgccggcgtagaggatgtgcccaacctgcccatcaccgacgctccattgcccccagccgggagaaccggcaccatacgccatgcccgcgccgccgcacagcacactcgctgagccggaaagcgagagacaggatacccccatgttttccatcactctgaaacttatgaagaaaagcgccaggatgctgattccggcaggcatcgccatcctgatcggcactgcgttcatcgccgctaccttcctgttcggcaacgcgatgaacgatgcgcttgccgcccagaataccgcccagctcggcggcgcgaactacgtgatcagcccggatagcggcaaggacctgaccgataaggaccaggactacatctacacgcgcacggttaacgacttccagcttgaccgcatccgcgccaccaaaggcgtcaaggacgcacgtgccggctacgcgggttccgtgaccgtaacccgtggcaacaagcatgccagcagctacgtcatcaccaccgccacaaagcgcacgctgctgccggtcaccatcacgcaaggagaccagccggcggacagcaacgagatcgccctgaccaagtccgtagccgaccagctcggcgtcaaggtaggggaccgtgtgaccgtcaactcgcaggcggcgcagtatgcgggcaagaccggcgattcggccggtaataccggtgacgctggtgatgagtcggcccagaacgccgatggcacgagctcgcacgacggtgattccgatgccgcgtccggcgcgtccgccccatccgacggcaccgacacggccgccgactccggcatgaccgtgcgcgtggtcggcctcaccgacgacccgaacggtgcctacgcctactacggtggcgcttccgtgctttccgacaacgtcatcaccgcaatggccggcagcaacgatttcggcaacctgcctgtctacctcgtctatctcgacatcgacgatgccagcgacacggccgcggcatccaccgtaaaacaggtcagcacactgctccctaagcatttcagcgtgcaatcccgtgccgcgctcgtcgaggaatccgtcaaaagcatgagctcgggcgaaaccagcatcaccaccatcttcctgctgagcttcggcatgctcgccatgctggtcgcggcactcgtcatcgccaacaccttccaagtgctcgtggcacagcgccgccgcacactcgccctgctgcgcaccatcggcgcgaacaaaagccagctgtatgtctccgtgctgtttgaagccggtgtgctgggactgatcgcctccgcactgggagtgggcctgggcatcggactcatggccgcactatgccagtcgggcctgatgaaagccactggcatgaccatgcgactggtactatccggtccggtgttcacggtgcctatggcattcggcatcattatgacggtgattgcctcgctaggctccgcgcgttccgctaccgccgtcaccccgctggaagcgttgcgacccatcgaactgaccgacacgcgacgggccggtgtggtccgcgccgtgatttccatgctgctgattgcgggcggcgtggcactgtgcgcattctctgtatggcagatgtccgagaaaatcgccggacgtgattcaatggccgacaagcagtattcgctggtgctgctcgccgccatcatcggatgtgcattgatcttccttggactggtgctttccgccacgttctggctaccggtgctcatgcgcggcgtgggcgcgctggttgcactggccggtccgtccgccaaagtggcacatgcgaacattcagaagaacccgcgccgcgtggccgctaccggtgccgcactgcttatcggcgtgacgctggtctccaccatcgccaccggtgccgccagcgccaagcaaaccatgaacgaggcgctgaccacgcgctacagcgtcgacatgattgccgctggcgccgatatgactggcaaacaggccggcgaggcagccaaagtcaagggcgttcagagcagtatctacgcgccgacccgcatgatgaccatgaaggatgccgacggcaagagcctgagtgtgctggtcgtgggcgtggatggcgtcgacgcgctgcgcaaggtggtgcgctccgatttgtccggtgtgaccattgatggcgattccgtactgatgcccaagtattccgccgctacaggcaaggatattccgctggacaagagcgttacgttcacggctggagcggccgaagcacaagccgatgccgccaatggtccgtccggtaatgatgcgaacggcagcgccgaaaacggcaatggacaatccggcggcacacagacgctgacgctcaaaccgcggaaggtggactatcgccgcattgcctccaactacgccgcggtcgccttcgtggacgccagccacttcaccaacggtggaatcaaggccgacgggcatatcatgcttatgcgtattgacgccgagggcgcgggtgttgcgctgaacgacgtattcaccaacgtgcagaatgtgttctccgccagtgctggcgttaccgtgaccggtccggtggccgaacgtacgcaatgggagaccatgatcaacggcatgatggcattgttggtcggtttgattgcggtggctgtgctcatcgccttggtcggcgtagcgaacacgctgagtctgtcggtgatcgaacgcacacgcgaatccgccaccttgcgtgccatcggcatgacgcgcggccaactgcggcgctcgctggcggtggaggcgttgctgctttcgctcgtctccggcgtggtgggagtggtattgggtaccctgttcggctggctcggatcctacatggtgtttagtttgtacggcgacaccgtgttcccgttcgaatgggccaccaacggtgtggtgctcggcgtcgccgcgctcgccgctctgctggccagcgtggcacccgcccgccgggccgtcaaaacgccaccagttgaagccttggccgaagcgtagagcaataagctccctcatcagagggagcttttttgttacaccagcccgttatcgtacgcgaagactacagcctgtacgcggtcacgggcgttgattttggcgaggatatgcgccacgtgggttttgacggtgggaagggagataaagagcttgtccgcgatctcctgattgctcagaccatgggcgatctccaccagcacctcgcgttcacggtcggtaagcagatccagttcgggatcggtgtatgctgggcgtgacgtattggaaccgtcggaagcggccccggcaggggaggggatgccggtcatcgagccggcaccgttgccggccgcaccgccagagacgccgacggcggaaccgtacacggcaccggagcgcgcgacatcgccggtcagcgaaccatgctgcgcgtaaccgtcctgcatcatcttttcgatgagtcgcttggtggcggaaggcgcgataatcgcattgccttggaatacagtacgaatcgaattgagcaacgtttccggttcggtgtccttgagcaggaagcccgaggcgccggcattgatggccgccatcacatactcgtccaaatcgaacgtcgtcagaatgattacgcgcgtcggccggtcgtcagccgattcggccgagacggtcgcgtcggcggccgggctggccgaatcggccgcgttgtccggcgcggcggagagtgaggtaatacggctcgtggcctcaatgccatccatgccgggcatgcgcacatccatcagcaccacgtcgggatgcagggattccgccaacgccacggcttgggcgccgtcggacgcctgcccgaccacctccatatccggttgcgaaccaatgaccatggcaaaaccggcacgtaccagctcctggtcgtccgcaataatcacgcgaatgcttctgctctcgttcatgctctccactgtatccgtttcctatcggagcgccgctccataaacaccctgattgttccctgagttcttattgggcaagtctctcaccggggtaacgttcccgcgtgttgcatctgactatccaacgaagccgccggtcgcaactgcatatccggctgcacaccctcatgggcctcgtcgctgaacccggtttcacgcaacactctcaacagctgacgcatatgagccaatccggcgcgcccccgagcaccaatcgcggcaaaagccgcttcaatctgcatactatcaggcgcaggttcggcgttgagcatcaccagtccctcgtcagcctgcgcaatcaccgattccagcgtggtcagtacttcggtttgcatcgccgcactaatacggttgcgctccaagttggccgccagcaccttttgccgctcctgctcggctcgcagcgcctcctcgcgtcgcaacagcaccagagcgtttgcgccacgcgaacggctccatcgagccatcgcaatgcaggcaaaaccgaccaacatgattcccgcgcccggcagcaagccggacaaaaccagcctccattttgagagcatggaactaccatcgggcaaaaacagatggaacagctgactgtatccattccacccagccatcaccttgatgcccgcaagccacgaatcggctgccagcgccacgctcacccagcgccaagcggactctcgtccatacaataccgccgaatacacggataccatcgcaaacatattgatggtcaaaatcgatggcaagaacaacagttgcacagcagacagcaccgccatcgccagcgcgctgccctctgggaagcggcgacggaacgccaaaggcgagagcataataatcgtcagcattatagtcggcacgcggttcggcgaatacggggcattgccgatcatttgcaaatcgccatacgtggcggaatcaaatagcgcaatcagcacgatagtggcgataacgtccatcagaagatagtgacgctcggtccactgcgcaaatcgacccacccagttcgactcatgcgtatctccctggtcgagtactttggggcgcgcccgatccatcaatcctcgtatacgcgagataacggttagcaccggatcctccgtatcggtgccagactgtggggcggcaggggagagcggaatcgtagccgccacaataaagccaccattcggccctgggccggcctgcacgctgccacccaacgactcaatgcgttcgtgcataccaaccaatccgtatccgggcttatgaccgtctgctgcagacgtcgcgccacggccgttatcggatacggtaatcgacagcacatcgtttgaccagatttcatcgatggtggctttagcaccctcgcccgcatgtttgcgcgtattggtcagtgcttcctgcacaagacggaacacggcggtttccgcgtcggcggacagccggtcaggttgcgctttgccggtcatatgccgggacaccaccagatgaccgtcaaacagcgaatcgatgtcggcatatccggtactgccactcgcaccgaacacattgaacagacgctgcatatcatgctgcgcgcgttccgcttcatggcgaatcgtacccatcgtgtgcttggcgatggccagatcatgcgcacccgcataccggccgccatccgactgcacaataatcgtggagagcgtatgtgccaccacatcatgcatatcacgggcgatgcgtgcgcgttcggccagcgccgcgatgcgcgtctcctcggcctctttcgccacaatggaagcgttgcgctcgcgcatggccgccagcgtggcgttgcgcgctcgctgccacaaggccatgatgatgacgctcagcacgctcgattcgatgaacgccgcctccatgccgaagtcagcgagcatcttggccccgcagttgacggcgccgcttgcccccacgacgccggtgaccgccgggcatgtgggcatcgtgatggcatcggacagccagccgtcgcggatgacgcgcgaaccggaggaaggtccggcgaacagcggacccacgttgaaagacaccgaccagaccgtcgccgcgaccagtcccatgacgaacgccgtgacgatgaaccgccaggaatgtcggggattgccgtacagaatcaccgaatacaccatgatcagggcgtagaaatcgaaatacatgatcgccgggccgaacacaagatgcgtgatggtcagcgccacgaacagccaggccgccggctccgggcaatacctgcgcagcatcagcggcacgaagaccggcagcgaccacagcgtcatcgacgcctgagttgcgggaaacaatatgccgcccgtcgaatcagggctggtgacgccgatgaacggcacgcagccggcgatcagcgctgcggcgagcaacgtgtcccatagcagtgtgcgggtcgactcccgtgcgcaccatgccctcacgcgcgccataatctccataacgcgcaaggctagcgtgtccggcgacgaaccggtatcactcttcaggaggatttatggactagagtcttgaaccatgacaatgctgagcaaatactacgtgcccggactggccatagaggaccattccatcgatgttccgctcgactggaccggccatgagccaggccaagcgttcgacggcgaaaccatcaaactgttctatcgcgtggtcaccgcgcccgaacacgtgcatgacgacctgcccctgctgattttcctgcaaggcggtcccggcggtgccggcccgcgcctcaacagcccgacctccgacggatggatcgaggaggccatcaggcacttccgggtgatcctgcccgaccagcgcggcaccggccgctcctcgcgcgtggacacgcacgccatggcccgcatcgccgccgcgcacgacgatgatgccgcggccggcgcacgagcccaagccgactacctgaagaagttccttgccgattccatcgtgcgtgacttcgaacatctgcgcctgaccgaattcggtggccgcaagtgggtgacgatgggccaaagctacggcggcttcctgaccctgaccacactgtccctgttcccggccggcgtaatcgccagcttcaccaccggcggcatcccgcacgtgccggccgacgccgctgaagtgtacgagcataccttcccgcgcatggtgcgcaagacgactcagttctacgagcgctacccacaggacaaggagcgcgtggccgccatcgccgacaagctgccgactactgcggaagtcgccgaattcgttggcaaactcaccgattccgtactgaatccgatggctggtaccgatgtggagcatcgacttggcgtgatcgccggcatggccgcccacggcttcccgctgatgccgaacggcgacccgctcaccgtcgaacgcttccagtgcttgggatccgactttggcatgaagccgagcttcgagcgtgtccattggattcttgacgacgccttccttgatggcgatggttccgcttctgccgactcgccgttgtctgacgaatttttgaccaaggtgatgaacgccacttcgtcgcgcccgctgtactggccgctgcaggagttcatctacgccaacggtgagatggaacagcccattcgctgggccgcccagcgcgtgcgcgatggcaagcccgaattcggtgctgatgaacgcccgctcaacttcaccggcgaggccatgttcccgtggatgttcgaacaggaggccgcattgcgcccgttcaagccggccatggacctgctcatggaagacacgcacttcggcgtgatctatgacgaaggtcagctggcccgcaatgaggtgccgctgcaggccgccgtctacttcgacgacatgtacgtcgattccggtatgcagctcgacactttgagccgcgtgggtaacagccactactggaccaccaacgaattcgagcatgatggtctgcacggcccgctcgtcttcaagcatctctatgacgaagcccttaaccggggcgacctcgaagaactgttctgactcaaggaagcaagctccctctgatgagggagctctgtatacatgcacgaaaggaaaacgtatgactcagaacctcaccatcggttttatcggatatggcaacatggcccaggccatcgcccaaggcttcgttgacgcgggcgtggtcgccggcggccagatggtcgcctgcgccgcccactacgacaagcttgagaagaccaccgccgaacttggcgtgcgtccgttgcacaatgcgctggaagtggtgacggccgccgacgtggtcatcatcgccatcaagccctaccagatcgccgccgtcgtcaagccgctggccgacgaacttgccaagccgggcaagatcgtcgtctccatcgccgccggctggaatctcaagaagtaccaggacctgttcgccaccgaagacggcgaatccgtcgactccccggacatccatatccagtgcaccattccgaacactccgatggccgtgggcaagggcgtgctcgtcaccgaatccgtcaacaccctgaccgacgacgaaaccgaaaccttcgagcagctattcggccccatcagcctcatcgagcgcgtggacaccgcgcatatgaacatcgccatggtggtggctggctgtgcgcccgccttcactgacatgtacatcgaggccttgggcgacgccggcgtgcagtacggtctgcagcgagccaccgcctaccggctcgccgccaagatggtcgaaggtgtcggcgcgctctacatggccactgaaacccatcccggtgccatgaaggacgccgtctgctcgcccggtggtaccaccatcaagggcgtcgcccagcttgaaaaggacgggttccgcggctcggtcatcgacgccgtagatgccatcgtcggctgactgccaatcagagttcgcgtatattcgcatatcacagtcaaggccttcgagccgtatgctcggaggcctttgcatatggccggttcaccacatgcacgttcaatgtgtccagcttctccctagactggaaccatgtctcttactatcggaatcgtcggactgcccaacgtcggcaagtccaccatgttcaacgcactgacccgcaacaacgtgctggccgaaaactacccgttcgccaccatcgagccgaacaccggcatcgtaccattgccggacaagcgtttgcccgtgctggccaagctggtccacaccgaaaaggtcgtgcccgccacggtgaccttcgtggacatcgccggcatcgtcaagggcgcctccgaaggcgaaggcctgggcaacaagttcctggccaacatccgcgaggcggacgcgatctgcgaggtcgtgcgcgccttcgaggacgacgacatcgtccacgtcaacggcaaggtggatccggccgacgacatcgacaccatcaacaccgagctgatcctcgccgacctgcagaccatcgaaaacgcgctgcccaagctggagaaggatctgaggggcaagaagatcgagccggcctacatggacgcagtcaagcaggcaaagaccatccttgaagccggcgagacgctcgacaaggccgcacgcgaaggccgcttcgacaaggattccgtctacgacctgcatctgatgaccgccaagccgttcatctacgtgttcaacgtggacgacaacgagctggccaacaaggacctgcaggcaaagctcgccgcatccgtggccccggctccggccgtgttcctcaacgctcagttcgaggcagacctgaccgagctcgacgaggcggacgcccgcgaaatgctggccgacgctggcttgagcgagtccggtctcgaccaactggcccgcgtcggcttcgacgtcctcggcttgcagaccttcctgaccgcaggcgtcaaggaggtgcgtgcttggcagatccacaagggctggaccgccccgcaggccgccggcgtgattcacaccgacttcgaaaagggcttcatcaaggctgacatcgtctcctacgacgatttcgtggccgccgacggctccatggccaagatcaaggaggaaggcaagctccgtcaggagggccgcgactacgtcatggccgacggagatattgtggagttcaaattcaacgtgtccaagtagttttcctcggctccccttcctgaggggagccgtcgcggaaagcgactgacgggagtgttgcggaaaggtccgagcagtgttggttgcccagacctttcttcatgttacgaacctttatgaacctcgttgagatgagatgtttgcgtctacttttcttaggcttccgcgttctcgtcggctcctgtggcgagaacattcctcaatgatttcgccacctgtattttcagcggacgttttccggtctgtacgaccagccccgcggccaagagctcttccacgtatttccttgcgctctgtttggatagtccgatgtgatgggccacttcgtccaacgacatggatttggacgagtcgaacagttcttcctgaatcacgccatagagcaccgagacggcattgcgcgatagggcatgcctcttttcaagctgtgtacagagtatccgacctttgtcgagctgatcgaccttgatactgagttcgtcaatcagctcatcctgggcttgttggatgaatccgaggatggtgttcacgaagagcgtgagttcgccgcagttcagcttgtcctccgcctccatgaatgttttgtagtaggcgttcttgttctccgcgatggtgcgggacagggatagcacggtgggcatagtcaggtcatggttcaggtacagggccaggagataccggccggttctgccgttgccgtcgtagaacgggtggacgtattcgaacaggaagtgcgacatgatggccgactgcagccggggaatctcgtcggaggtcgcgagatggatcatatcggtgaggagtgcgccgatgttgccttcgcctttgactccgttatggatcgcgaggccgtgcggcccctgtatttccacatcgcctttccggaacaggtcgccgtccggctgattgctctcatcgatttcgtcgagcacgaccttgtcgtagatgtcgcggatggcggcgatgcctgccggcaacgcggagtccttgtccgtgagattcaggtacaacttggcaaattcgctgaaccgtgccttggagtcgtcgccgtccctccttgccttgtcggccgcgtccacggcgtcctgggtttccttgcgggtgctgcgcacgccttccatctcgttggtggcgaacagttcctcactgatggaatgccgtatgtagtcccagtgcatgacgccgggaatctggttccagagccgtgatatgcgcctttcggcgagaagtatattttccgtgagcagggtcgtctcgcgtggcgtggcggagaacagctcgcccaatggcgtgatgaccccggtcctgaatgtggaatctgcctcaagccgctgccgtgcgagtgccgcatggttattgaaggaatcgactgacctgtcggcatggaacagccttgccaaacttctatacttcatatccatgagagagactcgcttcccaaagagcatccttgattgtagaaagtataagatagagaaggaaatgagtcaataaacaactataaaatcatggatgatacaaaaatatagttgtgcgcatgactgcatgtgagtgacatatggtagtgcccgaaatgcgtgtcagtagtgaaatacttcatgatctgttgttctttctgaatatgtgatggtatgcaatgggttttgccgcggtgcattgcgttgcgacgatgccaagaacacatgctcgtacaggtgcgtttatggggcatggtgcgaacgagtcggctcgatatcaccggcaatgattcagctatgcgtcaatgagaggtgtactgatcagatggcgtgttcgttcacgccgttgctgctgaatgcgatgtgttgatcatggttcgcgcaccataaggtcttacgtccgaatccgtcaaatcacgcggtgtgtgaaatgcccgttgtatataaaaagtccggtgcaacgcacgatgataatgcgctgcaccggacctactgcagaaacaattgttacagactgtagatctgtgcgccgaacggccagagcgcaagcttggccattttgaacgactggatgccgaacggaatgccgatgatggtgatgcagttgagcacgcctgcacccagatagccgagtgccatccaccagccgaccagcaccacccagaggatattggccagcgtggagccaacgccgccaccgtattgcacggttttgccgaacggcgtcaaggtaaggcccgccattttgaacgcctgaactcctagtggaataccgataatggtgatgcacagaaacagtccgatcagtgtccagctgatggcgattgccagtccgcccagaatgatccacagaatattgccgatgaccctcatcgtaagttcctcacgtttgccggcattgcgccggataccgaatcgaatgctggattccattctattaggcgaacgcgggcgatatgtggggaatcggtgacgggacccctgagcatcccctgaatcgtccctgagccgcatgctcaggcgcctactcgggtgagcattctcacattcggctgatttctagcgaaaacccttgtgcgggcgggctgtggactatagcatcacgacacatgaccactacatcgcagccttctcaggcatctcagtccaccgccaccaaacccgccgccaaccgcgagctgctcctgacgcagtccgaccgcgaccccaagagctaccgtggcgtggaccgcgaccagcaggtcgtggacatcatctccaaactcaccagtgagaaggccacgattccggcaagctgcgtgcagcgcgacgccgccgacaccggtctggaatccaacagcgccgacgtggtgatcggcgaagccatgcttaccatgcagaccgagcgtggcaagcaggcgattatcggcggggccttccggctgctgcacgccggcggcacctactcgattcacgaactcggcctgcagccggacaacctggacgaatccgtcaaggatgaggtgcgcaagcccgaagcgtaacagcggtgtgccggcccaacgatggccggataatgggaaacaagtaaaagcgatgacgcgtatgtgaggtacgcgcgacgaataggagaacatcatggccgatgagaacgagcagcagaccgcatgcaaggcaggacgcgacgagcggcattgcaagtgcaagcagcgtaggaaagccgccgcggcagccgaggcggctgccgccaacggcgaacaccactgcgcctgcaagcacgagcacgccgagggcgcggccgcggagccgggcgcgaagaaggagtgccactgcaagcatggcgaagtcgcggccgctgaagcgggtgaggccaagcactgcgcctgcaagcacgacgcccacgacgccgaaggccacgccatttcgaccgagccgcatcttggattcatcgaagacttggcctcgttgatcgatattcaggaggaggccactgtctcccgtacggtgctgcgcgaggacggcctgcgcgccgtgctgttcggcttcgacaaggaccaggcactgagcgagcacaccgcggccatgcccgtgatcatccaggtgctggaaggcaagctgcgcgtcggcggcgaaggccgtgaagtcgagcttacggccggcggcatcgtctacctgagcgcccgtctgccgcacaccgtctatgccgtcgaacccagcaagatgctgctgcagatgttcgacaaccgcggctgattcggtgaatgactggcaatcacgtatgagaagctgattgccgttagaccattcatgatggcttccttcatatggtgttggtcgtatgaccgtaatatgaaggaagccatttcttagacgttggggagagcttgaattcgacgccatcatcatacggcctcaagggtgcataaacgatgtcacaagtagacgcacgcccgccagccatcccaaacgtcacagcaaacctagaacccgcatgagctgatggccgatattcgccatggctgcatcatcaaccacgccgacttggtatcccagcagtttgcggtcgacggtgacgatcttgtccgtcatcacgtaactcactttgttcaggccgttctccggacttggttccaatcggacccgcgtgtcgatgtcggaggaatcgtatgaggtcagcagacaagtgatgacggaatcgaaccgatcgacggcatcgctctgcacgatgacaaccggccgtggcttgctggcgtagccatcggcctgcaacgtccgaatctcacctcgtttcatcggacatcctcaaggcgagacgactggcatactcagtagcgtcccgctcggacgcaaacggctccacgtcatttcgtggcaaacgcacctcataggggaacccacggtaatcattgaacgcgctgatgaacatacgcagggcatcggccggggtggtacccagctgtcgggtcgtctccttaaacaacgcagcctgctcgtcatcaactcgcgtggcaatctgcatgctcatagccactccttattgctatttactatctttttgcaccaaattgtatcaaatacttgacttcagagtgaagcccccgcgttccaaggcccttgtctatactgtagacagttgttcttcatatgtgaatcgcccgatatgactttggagcgggcttgtgattggaggggccggatatgacgagttacgtgctgcggctctatgatgatccgctgctccggttcgatgcgtcgtatggcgagggcctgctggcgggcaagatcgaggcgcatgtccgctggttcgatgagtcgaagcgcgcgttgctgccgtttccgttggctccggagccggataatgcgaagctgacgacgtggctggagcggcgcacgattccgaagaatcgtgagttcgccacgcaggttcttgcgcaggcggggttgagcattgcggatacgctggggatcatcgacctgggcaaggggctgtcggtcaacgattcgttctgggcggaacgcgacggtgagaacctcaagttcgcggacatcaacctgtatgacaatccgttggacgagacgctcgccatcgtggcctacacggggcatacgtcgagcgagaagcatgcgatcggcctgtcgagcgagtggacgacggacggccagttcccgaaggcgtggcggcatacggaacgtgggctggaactgtggaaggcgggttccgaatggtatgcgaacgccggtttggaaccgtattccgagtatctcgcctcgcagctggcgcgcaggctcggtgtgaatgcggtcgactaccgcatcgcccgttggaagggcaagctcgcgtcggtgtgcggttcgatgaactcaaaggacgtgtcgttcgtgccgttctatgcggcgacgcagctggcgtcgttcccggagatcctcgccgccgcacgcgccgtgtccgaggaatcgttcgaggcgatgcgcacgatgctagtgttcgacgcgctcatcgtcaatcaggaccgtcacgccaacaaccacgggttcctgcgcgacaaccgtaccggccggattctgggtccggcgccgttgttcgaccataacatgtcgctgttcaagaacgacatgcgcgccgactgggagggcggcgcgtggattccgcaggtactgtccgaacgtcagccggcaaattctcgtatgacgttccgcgaccagtgcgcggccatcatgggcagcgcgcagcatgagatgttgcgcaaaacgttggacgtcaccttggagaacgacccggcttacccgctggagccgggccgcatcgaggcgttggacgactacctgcacgcggccgcacgatccctgctcgaactgccggtggtcgacgagtcgaagctgtccgaccagctcgatgcgttgcggccgtcaatcgaacacgctcctgtcatcctcaacgaacgactgttgcgatagaccaaaccggtcgagttcgccaataaaaaggaccttccgggttgcgcactgtgaggaggcgtggaaggctgctattgacttgaatcctattatgcaaccgtgactgcgtgcctgttcatgttccagtccggttgtgtgatggacaagtgcggtatgaaggccgtttgcatatccacacatggctttgatgtctcagctgtccagggcgaaggtgatggaatcccgtcctagaaccgccgcgttacgtgcgcgactggcggcagcatcgcggtggccagggcgaacgtcaccgccaggaccgcgcccgccgggtggacgctgtacgcccagccgtatgcgatctgtccgaggggctgggcgcacatgctcgcggagagcgcgagcgacatcaccttgccggtcatgtcctcggggcagcccatctggatcgccggcacggcgatgaggttcgcgagggtgatggcgatcatggttccgcaggtgctcgccgtgagcaccgcgagtcgcatcactccacctgcgggaatcgtcatgacaagcgcttggggcaggatggtgagcgagaaggcggcgatcgccatcgggaatcgccgcatggacagcgacctcgcgacccgcccaccgacgagcgcgccgagcagtccggatgctcccacgagaccatatgcaaggccgtacgccgtggagccgaaccccagtacggtccgcaccatgtaggggaagccgacctccgcataccccgtcaccaggaagttgagcgcggcgcagatcaacaccagatgcagcacatgaggacgttcgcgggtgaggaaacgtccggccgcgcgcaggtcgtcgaccgcggtgacgcggccggcgtcgccgcggtcgggagcgccgagccggatgaaacactccacgacggcggccgcaccgaaccccacgatcgtgaggcccatcatgggcatcgcaccaaccgccgcgtacagcacgccgccgagcacggcgggaacgagcgtgctcgtctggttcactacgttcaccacggccatcgcgcgacgcatcacatcctcgccatgggagcggaacatctgcggcagcgccgcctgcaccgtaggcgtctccatcgcgtcaagcacggcgagcaccacctgcatcacggctatcgccgccagattgaaaccggcggccgaaaagatcgccgcgcagacgagcaccgtcacggcggaaagcgcgtcaagcgccaccatgacggtccgacggttcgtacgatccgccatcacgccgccaaggggcgagagcagaatcgtgggcaggatgctcgcagtaagaatggaggcgaacgccgccgccgagccggtcttgtcaagcacccacatggacatggcaaaccgcagcataaggttggcgaagagcgatattccgagacccgcgacgagcaggcggaagtcgcgtgtgcgaagaggatcagcggcttggcttctttgtggttgggtcgtgcattcgtatgcgttcgtcatcgtggattcctttcttgtgattggccacggccatttatacaaaccgaccgtcggtctgttatggtgataacaatacgcccaaggaaaagggcgcggaagcgcttcgacatctgtggcatcaggatgtgcaagatgcggcgcacccgggcgcgtctcctatgcggacgccgtatcctcttccggcgtcagggccgtgagctcttcggtcgtccgcaggatgagcgtctcgtcgaacactggcgcgccgatggcgtcgagcatcgtggcgaggcagcggatgcggtgttccatgccggcatgatcggcggggtagaagcagggcatgagccagtagttgccgaggagcgagagcagttgcgccgcctcctcggggtatgccgtgggaatggagccgtcctgcacgcccatatcgatgagcgagcggaaggactccggcagtctcgtcgaccagaagcgcatgttcgccgtaaagaacgcaggatccttgagcagcgccagctgggaacggaccaggtccagatgatcgggggcgtccacagcggaaacgatgagcgcgcgcagcttctcaagcgcactcatgtccttgcgctcgatgagtttgtcgagaagacgcgcggtgacggcccactcgtcggcgttcagccggtcgagaatcgcctccttcgatttgaagtggtggtagagcccgcccttggacagtcccaggtcgttcaggatgtcctggatggacgtcttctcgtagcccttttcagcgaagagcctgcgggcggaatcgaggattcgtcgttcggtgtctccggaatgcatatcgtgcgccatgcggatggcctgcctttcgttcatgtccccgtcaagcatacagaccgtcggtcggtctgtcaaatgatcgaggaagtcacccctgcgatgcgattgaatatccgcggcaaggcgggacgaagaagaccggtaagacgccgagttcaagttcaacgtctccaagtaagtgtttctctggctcccctcttcgaggggagctgtcgctgcaagcgactgggggagcggtatggataaggcctgagaagtcgtcttctcaggcctttgtcatgacattgttctgcaaggactggctgctgcagcagcataatgtgtgttctattatgagtcttcgccagaaatcatgacggcaacacgagatgcaacccttagctcgcccctgattcatccccggaccgttattcaggcggagcgtatgcggtaagcccaatccttttgtgaagattttgtgtatttttgggcatgcgtgggtttcaccgtcgatttgaatgatgataggcttctcgatgtctgccgtacgaagaccccatcaaggagatgccatgaacctgtatcgctacgcgatgttcatcgcacgcgcctgccgtgggtcgttcgtcggcaatgttctgtttgccaatccacgaatggccctattctcgatgctggtgtagcggggacacgccttatgccgggatgtaccgatggcccatccgcagtcgacgtcgcatgaatcgctcaccatagccatcgacttacgcaaagccgcgaatcgtttgccgtatatgaatgcggaacggatggcggcttttcctttacgtccggactcatcggtgtcctcgcgtcttgacacaagcatggggccggatcgcccacacatgccgttaccaacaggaggaaatgctgtga

SEQ ID NO: 3167 - DNA, 12752 bp, Unknown
  R53_2m  MAG No. k141_1378
gacacgctccgggccgctcaggccaagtctttacggttcagcaacacacaccccaacccacccaatccctgatgattggttttgcttaatagcgaggaggattatgacgaacgatattgagcggcatagtccggatgagtggcggaagaccgcggcggcgttaatgccggaaagcgtagctgtgggcgccggggaaacgacggcgaaggtgaatgcgaatggggcacctttgctgggggattctcgcgacctgttccgacccaagacctcggatattcccgccaaacccggtgtgtacaaatggcgcgacggggaagggcgcgtcatttatgtgggcaaggcgaagaacctgcgcaacaggctcaccaattatttccagccgctgtatctgctgcatccgcgcacgcagaccatggtgctgaccgcacgcagtctggagtggacggttgtcgccaccgaactggaatcactgacgttggaatacacgtggatcaaggaattcgacccacggttcaacgtgcagttccgcgacgacaagacctatccgtatctcgcggtcagcacgggggagcgaattccgcgcgtgtgggtcacgcggtcgcgcaaacggcgggatacccggtatttcggcccctatgccaaagtgtgggaattgcggcacagtcttgaccggttgctgcgcacgttcccggtacgcacctgcaccaccaacgtattccacaaggcgcaactgaccggacggccatgcctgttcgcctccatcggcaaatgctccgcaccctgcgtgaaccgtatcgaagcggacgaacaccggcggctgtgcgaacagctggtcggcgtgatgaccggacgactcggacggccatacatcgcccagttgacccgcgacatgaaagaggccagcgccgaactcgaattcgagaaagccgcccgactgcgcgaccagatccaaatgctggaaaccgtggtgcaacagaacgccgtcgtcttcgaccaggatgtggacgcggacgtgttcggcttcgccagcgacgagctcgaagcctcggtgcacgccttttatgtgcgcgccggctctattcgcggcgaacgcaactggagcgtcgaacgagttgaggacatcgatgacgccgacttgatggccgaccttctggtgcaggtgtattcggacgccgccggggacaatcacccccagtcggccgcgaccatctccaccaatcgcgaggccatcggctccacacagaccatcacggccacggacgctgtggcacgcgcccaggccacccgagaacgcaacacccgtcaggagaccaccggacgcgcggacctgctggcacccatcgcaccggtaccgcgcgaaatcatcgtgcccgtcgaaccggcccgccgcgaggaactcgaaggctggctgaccaatctgcgcgggggcgcggtgaccatccgcgtggcctcgcgaggcgacaagaagcagctcatgggccgcgccaatgagaacgccagccaagcactgcagcgcagcaagatgagccgcatctccgacatgggcgcacgcacccaggccatgaacgatgtggccaaggcattgggactcgcgcaagccccgctgcgcatcgaatgctacgacatttcgaacactgtgggcggtgccttccaagtggcctccatggtggtgttcgaagacgcgatcgccaagaaatccgaataccgacgcttcgccgtccgaggcaaggacggcaaaggcgcggtggatgatctgtccgcgctttacgagacgctcacccgccgcttcaggcacggcaacatcgccggcgactccggcgaaagcatcgacgcggaacagcgcgcggcctcggccgccggcaagatgaccactgccgtggcggcggagacaatcgttgcgaacggtaacgacaatggtgagggcggttccgacatcagtggcaaggggcacgcggtgccggtcggagtgcagaacgatgcacgggagtcctcgcccgacatcgtccagcagaacacaaaccggcatcactttgcctacacgccgaacctggtggtggtcgacggcggtaagccacaggtcatggccgccgccaaggcgcttgaggactgtggcgtgatcgacgtggccgtctgcggactggccaaacgcttggaagaggtgtgggtgccggacgacgactatccgatcatcctcaaacgccagtccgaaggcatgtatctgctgcagcgtgtacgcgacgaatcccaccgcttcgccatcacctaccaccgccaacagcggcgcaaaggcgccctgcgcagcgcgctcgacgagattcccggcatcggcgaaagctaccagaagcggctgctcaaccacttcggctcggtcaaagccatgcgcgaagccagtgtcgaggacttcgagaaggtcaaaggcatcggccacgccaaagccaaagcgctgtacaacgcgctgcacgagcagtgagccggcccggtccagcagcccagagtgaattttcggttgcggggcctgtggttgacatattcgaagcaaagtgtcggctagcatggaaacagacatcaaggaggggatatggccaatcatcgttgcgctgtactcggcaaacccgtcgcgcactcattgtcacccgtgctccacaacgcggcttatcgttcgctgaaactcgacgattggctgtacgacaagcacgaggtgggggaagacgacctcgacgctttcctcaaaggccttggctcgacgtgggctggcctgagcctgaccatgccgttgaagaagaccatccaaccgtacggtgttccggaaaatctgtgggccaaggaactgaaggtggcgaataccgcggtattcgactggagtgtggctaccgatgatcccgcttggccgaacggcaagccgggcatcaagctgtacaacaccgatgtcatcggcatccaactcgccttcgaccacgccaatcgcgaactcggcgaacaccacaccgcatcgagaagcggcgccgcgctgatcctcggcaatggcaacaccgccacttcggcgttggccgcatgctgcatgatgcccgaaatcggccatatcatcgtcgccgcccgccaccctgggaaaaacaccgggcttaaaccagtggccgaaaagttcgtcaacgtgcataacccgtacagcgaaatcgaattaggcgacgatcaggccctgctcgaggcagcccgcaacgccacctatgtcatcaacacgattcccggacatgcggccgacaacgtcgcggatgccctcaccaatgccggaaccgagccattctccggactgctgctggacgtggtctacgatccacgccccaccaagctcatggaagcctggcgcgctcatggcggtcacgccatcggcggcgaagaaatgctgctgtaccaagctctcgtacaggtattgctgatgaccggtatctgggatgacgacccgcccagcgatgccgaccagcgtctgcaggacaccaccaccgaagacgaccagctggagatcgcgatgcgcaaagctcttgaggaggcgttgtaatgagtcaacagacaacaatccgcgataccggcgaggcggccgccacgaatgcgccggcgaattccgcgacatccacatcgactccggacaaccagccgaccccgcttgatgccttcgaggtgctgctcatcaccggtatgtccggcgcaggccgctctcatgccgctgactgcgtggaagacatgggatggtatgtggtcgacaacctgcctcccaaactgcttatcccgcttgtcgacatgatgaccacctccggttccggatcggggtcgggcgtccacaagcttgccgccgtcatcgacgtgcgctccagctatttcgacgagctggccgccgtgctcggccatctggatgatctcggcgtcaaaacccgtattctgttcctcgacgccagcaacgaagtgctcatcaagcgctatgaatccgtgcgccgcccgcacccgctgcagcacggcaaccgactgatcgacggcatccttgaggaacgtcacctgctggaagacctcaaggagcgagccgactgggtcattgacaccagctccctgagcatccaccagctgtccaccaaactctacgagacgatgctcggttccggccccaccaccgtggcggtacacatcttcagcttcggcttcaaatacggcatgcccatcgacgccgatttcgtggccgatgtgcgttttctgcccaacccgttctgggttcccaacctgcgcgagcttaccgggcacgacaagccggtcgccgactacgtgctttccagcaagggagccaaggaatttctcgacgcttatgagaaagctatcgagattgcgttggaaggatacgcccaggaagacaagcactatgtaaccatcgccgtcggctgcaccggtggtcagcaccggtcggtggcgatgagcgaagagctggctcgccgcttacgcgcacatgggctcaacgtaaccgtttccgcgagagaacagcataagcgtcactcatcgtaagcaggcgtcgagcggtcatcgggcaagcgttcggtgaccacactgcgagaaagcaaagcccataatacgtatcaaacgggttcgcttgtccaccagattaggtatcacagaaagccgatggcttccgaccgtatgacagcagataacggcacgaagcgcctgaagcattgagaagaacgggactgtaggaggtagatcttggctcttctggacgatgtcaaaagcgagttggcggcctttgaaggcgattcgccagccgcgatcaaggcccaagctgcggccatgatccgttttggcggcggtcttcgaccggtacagaatacatacgttatccaagccgtattcacctcgcttgacgttgcagaatggctgaagaacacgttgaggaacacgttcgggcatgaagccgaggtcaaccacctcacccgtcagaccccgaacggccctgtcgagacctacgtggtgctcgtcacccgcaacgtagtggccttggctttgcagaccggactggtcgaccgccgcaagcagcaggtccgtggactgccgtctgaagtggtcaacggatccatcgcccaaatcaaagcagcatggcgcggcgccttcatggcccgtggcttcctatccgatcccggtaaggccagcttcctggaaatcgcttgccccacggaagaggccgccatggccctgtgtggcgtggcccgtcgtctcggcatccaggccaagcatcgcacgctgcgcagctccgagcgcgtgaccctcaaggatcccgacgccatcgaacgcatgctcaagctcatgggcgccacccgttcggcccgcgaatggaccggcaagcgctccgacggcgaggcccgcggcaaggccaaccgtctggccaacttcgatgacgccaatatgcgccgttccgccaaggctgccgccgaagccagcgaaaaagtgcagcatgccttcgaagtgctcggcgataacattccggacaacctccgtcaggccggccagctgcgcatcgatcacgtggacaagagcctcgaggagcttggcaagatcgccgaaccgcaaatcaccaaggatgcgattgccggccgaattcgccgactgcttcagcttgccgagaaaacggagaaggctcgcgcagccgaaggcaagtaacccgacaacgacgtaacgaaacaccgcattcagtcagtaggcgaatgcggtgttttgttccggaatgcctgtaatatgcaaagtggcaaaattggccactttgacgtgcgattcgtcaaggaaaggatattcatgaagacactcaaggaccttggagatctcaagggcaagcgcgttttggttcgcgctgatttcaatgttccgctggacggcaccaccatcaccgatgacggtcgaatcaaggctgctctgccgaccatcaagaccctgcgcgaagaaggcgccaaggtcatcctcatggcccaccttggccgcccgaagggcaaggtcgttcctgagctgagcctggccccggttgccgcccgcctcggcgagctgctcggcaccaacgtgccgctggccaaggacacctacggcgaggacgctcaggccaaggtcgccgccatgaacgatggcgatgttgtgctgcttgagaacgttcgcttcaacccggaggagacctctaaggacgccgacgaacgcgccgcttacgccaagaagatcgccgccctcggcgaggccttcgtttccgatggcttcggcgtggtccaccgcgcccagggctccaactacgacgttgccgccgatctgccggccgccgcaggcctgctggtcgagaaggaagtcaaggccctgtccaaggccaccgagaacccggagcgtccgttcaccgtggtgctcggcggttccaaggtctccgacaagctcggcgtcatcgagaacctgctcgacaaggccaaccgtctggtcatcggcggcggcatggtgttcaccttcctcaaggccaagggctacgaggtcggcacctccctgcttgaagaggaccagcttgagaaggtcaagggctacatcgagaccgccgagaagaacggcgttgagctcgtgctgccgaccgacgtcgccgtgaacgccggcttcccggccggtgacaccccggttgctccggaagtcgttgccgccgacgccatcccggccgacaagatgggtctggacattggcccggagtcccagaagctcttccacgacaagatcgtcgactccaagaccgtcgtgtggaacggcccgatgggcgtgttcgaggttcctgagttcgcctccggcaccaaggccgtggcccagggtctggtcgacgccaccgcagccggtgcgttcaccatcgtcggtggcggcgactccgcctccgccgtgcgtaacctcggcttcccggaggacggcttctcccacatctccaccggtggcggcgcttccctcgagttcctcgaaggcaaggagctccctggtctgaaggtgcttgagtaatccattttctagctcccctccttgaggggagctacgtattttttagaggggaaacatatggcgtccaaacgcattccgttggtggccggcaactggaagatgaatttcgaccatcttgaagccacttacttcgtgcagaagctggtatggctgttgcgtgacgctcgctttgacttcaaacgctgcgaagtcgcgcttttcccctcgttcacgtcattgcgcagcgtacaggtgctggtcgaagccgacaagctccatgtcgcctacggcgcacaatccgtttccgtgaccacccaaggtgccttcaccggcgatgtgtccgcggacatgatcgcccatctcggctgctcgtacgtcatcgtcggccactccgaacgccgcaaataccatcctgaagatgacgccaatatcgtcgatcaggtacgtgccgtgctcgccgccggcatgcagccgattttgtgcgtcggcgaaagcttcgaggaacgacgtcaaggcattgaactcgatttcgccgtgggccaggtacgagacgtcacccgcgatctcaacgaagaacaagccgccgaactcatcgtggcctacgaacctgtctgggccattggcaccggcatggtggccactccgcaatccgcccaggatgccgcaaatgccatccgcaacgatttgaagaccacttttggcacgaaggtatccgatagcgtacgtatcctgtacggcggatcggtcacctcgaaaaacgcggcggaactcatttcccaacccgacgtcgacggcttcctgatcggaggggcggccctggatgttgaggaactcgccaaaatcgctcgactggcactgaaatccacgaaatcacggaactaataccacggttttcccgtgtgtgcgctatgctggtcaacagtccaatcaatccggaggtaccctgtgaccgctcttaagatcacgctgcaagtcatcgtcgtgctgctcagcttcgtgctgaccctgctcatccttatgcacaagggcaagggcggcggtttgtccgacatgttcggcggcggtctgacccagaacgccggtacttccggtgtcgccgaaaagaacctgaaccgttggaccgttatcatcgctctggtgtgggtggcattgatcatcggcctcgacatgatgaccaagttcaacctcggctgatcggcttgcacgccatatagacttgtcgctcgcgacccatgaccgttaccgtcggtcatgggtcgtatgcgttctatcgagtattacgaaaggacatcaccatggtcactatgaaccgcaacaaagtcgttatcgtcggcactggccaggtcggtgccaccgccgccttcggcatcgtcacgcacggcctgtgcaatgagcttgtgctcatcgaccgttccgccgccaaggccctgggggaggcccgcgacctcgatgatggcagcgaattccaggaccgccacgtcaaggtgcgcgccggcgactacgccgactgcaaggacgcggacatcgtcgtcatcaccgtgggccgcaagccgccggccaactccaaccgcatggccgaactcggcttcaccgtgggccttgtgggcgaagtggtcgacaacgtcatggcctccggcttcgacggcgtgatcgtcatggtctccaacccggtcgatgtgatggcctggtatgcctggaaacgttccggcctgccgcgcacccaggtgctgggcaccggcaccgcgctcgacacctcgcgtctcaagaccatcatcggcgaagagaccggcctcgacccgcgtaacgtgggcggcttcgtgatgggcgagcacggcgactcccagttcaccgcatggtccaccgtctcgctcggcggcaagccattcgcccgcttcctggccgacaaccaagaccgtttcgcctccgtgtccaccaccgaaatcgaagagaagacccgcacccgtggcgatgagatcgtcgcggccaagggcggtaccaacttcggcatcgcctccaccgtggccggcatcgtgcagaccatcctgtgggacgaacgccgcatcgtacccgtctccaccctgctgaacggcgaatacggcgaacatgacgtgttcctcggcgtccccactgaactgcgcgccaatggtgccaacgagatcgtcgaactcgatctgagcgaggacgagcaggccaaattgcaccattccgccgaactcgtgcgtgaacactgcgaggggctgctgtgattctcgacgccatcacaccgaaacaaccccgactgctggtcgccgacctcgacggtacgttgctgcacgacgccgaggtattcgaggaccggttcatcacccagcgcagcatcgacaccatcaaccgcgcgcacgatgccggactgaaattcgccatcgccaccgcgcggccggtgagtaccggcctccagttcgccgaaaaactgccggtggacgccgtaatctatctgaacggtgccctcatcgatttcgacccggcccactccgacttcgacctgctcacctcaggtgccacgccggccgatgagaaccatttgatcaagattggcttctcctcacggcgtgcctgcgaagtctgtctgttcctgctcgatcgcatgcccggcctgaagctcggcatcgtgatgaacgacgtgcgctacaccaacttcgatgtgcgcgtgtattggaaaacacaggccttccaatatacgaacttccacgacgtgcccgaaggcgtggcggataagatcaccatcttccccgagcctgaacagtggaacgagctgcgtgcgctgattccgccggacttcgacatctccattagcgaaggcgtgatgtggatgctcatgaacccgcaggccaacaaggagcacgcgctgcacctgctgtgcgaacgactggacgtgccgctcgaacagaccgccgccttcggcgacgacctcatcgatatcaacatgatgagcgaatccggccggggtgtggccgtggccaacgcgaaccccaaggtgttgtctatcgccgacgagatctgcccgcccaacaacgaggacggcgtcgcccaatggattgaagcgcagttgggctgaaccggccgagactcgagaacacgccaaaattgaacttgtgttgaaccgggagtatgctttgaactgttgttcaaaagataaattgaactcccggttggaggcataaggatatgagcgtatcggtgtttgcggaacgtctgcgcaatgcgatgaacagtaggggattgaagcaggtcgatttggtgcacgccgccgaacatcgtggcgtaaagatgggcaagagccatatcagccaatacgtggccggcaagaccatgccccgcgaagacgtgctcgaattcctggccagcgaactggacgtcgacgcgaactggctgcgcggcgaggaatccaccccgcaattgaactcggacgcttccaacagcgtcacggacggcgaacacgccgccacgccgcttgccacgggcaccgccaagcccctgacggacagcgagattcccgtgggccgccgccgtaccttcggcaaatcgcacaagctcgacaacgtgctctacgacgttcgcggcccggtcgccgacgaggcgatgcgcatggaggccaacggcacccacatcctgaaattgaacatcggcaacccggcacccttcggcttccgcacgccggacgaagtcgtctacgacatggcccaccagctcaccgacaccgaaggctactcgccgtccaagggcctgttctccgcgcgcaaggccatcatgcagtacgcgcagctgaagaacatcccgaacgtcaccatcgacgacatctacaccggcaacggcgtcagcgagctcatcaacctgtccatgtccgcgctgctcgacaccggcgacgaagtgctcgtgccctccccggactacccgctgtggaccgcctgcgtgaacctggccggcggcaccgccgtgcactacctgtgcgacgaacagtccgaatggtatccggacatcgatgacatccgctccaagatcaccagcaacaccaaggcgattgtcatcatcaacccgaacaaccccaccggcgcactttacccaaaggaagtgctccagcagatcgtcgacatcgcgcgtgaacaccagctcatcatcttctccgacgaaatctacgatcgcctcgtcatggacggcctgcagcacatctccatcgcctcgatggccccggacctgttctgcgtgaccttctccggcctgtcgaaatcgcacatgatcgccggctaccgcatcggctggatgatcctgtccggcaacaagcgtatcgccaaggactacatcgagggcctcaacatgctcgccaacatgcgcatgtgctcgaacgtgcccgcccagtccgtggtgcagaccgcgctcggcggccaccagagcgtcaacgactacatcgtgccgggcggccgcgtgcacgaccagcgtgacctcgtttacgacatgctcaaccagattcccggcatcaccgccgtcaagccgaaggccgcgttctacatcttcccgaagatcgacgtcaaacgcttcaacatccactcggacgagcagttcgcgctcgacctgctgcatgacaagcacatcctcatcagccacggcggcgcgttcaactggcatcgccccgaccacttccgcgtggtgtacctgccgcgcatgggcatgctgcacgaaaccatgggggagctcgccgacttcttcagctactactggcagagctgatccttggtacaggcgaacacgatcgatgccgggctgggcaccaaaccggtgccccgtctggctctgaccatgtcggtccccaccatcgtggcgcaggcggcgaacgccccgtacacgatcatcgaccgactgttcatcgggcacatccccgaagtgggcaacgcggccgatgaccggcgtgggcatctgcttcccgattctgctggccgtcaccgccttcgcctcgctgatcggcgcaggcggcgcgccgcgcgcctccattgaacttgggcgcggcaacttcaagaaagccgaacgcatcctcggcaccagcgccgcgttcctcatcgccatagccctgaccctcaccgtgctgctgcagttggcgaaaccactgtggccatggtctccgtactcatcggcaccggcatatccatccttcttgaccccgtgttcattttcgtgttcggatggggcgtcaggggagcgggcgccgcgaacgtgctcgccacattccccggcttcttcgcctcatggttcacctcggaacagacggtcatcgacatcgtgacccgcatgatgccgattttcgtctgcggctggggtatcttcggcatccagatgggcgcgcaatgcgcactcgtcggcatgggccaggccaaacagtcggtgttcttggccatcttccgcaagatcatcctgctcgtgccgctcgcgctgctgctgccgcactggatcggcgtcaacggcatcttcatcgccgaacccatctccgacgccacctccggcatcgtggccggcttcctgttctatgccacctaccgcaagattcggcgagatatggtctagactcctgattcaatggatgtgccgtctcatgcgttgcgaaacacgggacggataggatgcctcgcaaaacgggtgcccgttgtttcgtgatatgaaggagattttatgccggtggtgtcgcgtcgtgcgcagccaacgtgatggccataatcgccgaaagc

SEQ ID NO: 3168 - DNA, 9039 bp, Unknown
  R53_2m  MAG No. k141_1470
actttccggcctgagcatggccaatttcgattcctccctgtccagcccgtaccagcagctggtcccgagccagcattggacccccaccatcaaccagatgtggggtgcgcccgccaactcgctcggctaccatccgtacgagtccagcatgtactcgcgcgctacgaactacaagaagttcgggttctcgcacttctacacgctgaccggtccggacgtgatcaagtatcaggacaagattgacgagtcgccgtacgtctctgataagtcttcctatgattctgcgttggaaggcatcaagtccggcaagacgaacaagttcattcagatcatcaccatgcagaaccacatgccctaccacgagtggtatgagaacaacgactacaccgctgaatccaccacgggtacgccgctgggtgatgatgaacagcagtcgattgagacctatcaaaagggtgtggagattaccgatcaggccactcaggagttcctgaacgaactggatgcgctggataagcccgtcaccgtagtgttctacggcgatcacttgccgggcatctactcgtccgccagtgaggatggcaacaactccttggccctgcacctgaccgattacttcatctggtcgaataaggcttccagctcccaaggcaataaggcaagcgatgcagcctactcttcgccgaacttcttcgtggcacaggccgccgatcacatgaacgccaaggtcagcccgtatctggcgttcctgaccgaaatgcattccaagattgccgctatggaaccgcctgtggtcaacaaggtccaaggctgggatcgtattcccgaaggccagaacatctatctcgaccaaaacggcaacccgatgtccaccgatgacttcgacaaggaaaccaagcagttgcttgccgactacaagctcatccaatacgacatcaccgccggcaaaaactacctcaaagacacagtttttatgacgttgccgtaaagcagacagcccggccgaaccgtaaagcggatagctcagtgggctatccgtaggtgaggggagcggctgtgccgcgacggaaaatccggaggattttcggtctgtaggcaacgtgcgagccgacaggcgagccagcaaaacgcgggcgaagcccgtccaaaattgctgtaccgttgccatagtgctgtgagctccctctgatgagggagctgtcgaacgaagtgagactgagggagagatcccacagaccaatcactcccgccttacaataaagccatgaagcgcatcgatgtgaatcatggctggcggttccgttcaattggcaaggaccgcgatacggcagcgcggcagccagtcacgctcccgcacgatgcgatgattcacgagtcgcgcgaccctcgcgggccgcacctcgcgattcatcgaacgaggacatgacggcgtggccagctggtcatgggcgggctatgagggccgcgacgccatcgtgcatgtcaccgatgaccgccgcattgtggttgatgcaggcgggcatatcgccgtcggaccttctgccgaagctgtggatgtggaggtacaagtgaactctgtggccgcacaacacgacctgcctgccaatgccgaactgctcggcgtggccagcgccaatcccatcaccgtcgatgaactcgccgacaatacctgcaccacctacttcggccgagcccaagctatttggcgaataccagccgaaacgtctggtattgcctgcagcacaaacgccctcatgccatcgtcatgacggtacgataggtacagtcgatgcccggaaaaccgacccgggcatcctgcgggaaggatgtgccatggtcaatgcggatttcgctcagttgcgtcacgcctacgaatccgggtgtacgcggccattggcttggcgacgggcgcaattggatgcgctatgccgtctggtagcggacaatcgtgatgctttcgtggctgcggccatggccgatttgggcaaacccgcggcggaaaccatactgatggagctgaatctggtggccggcgaggcgcagttcgtccgcaaccggctcggactgtgggccgcgcgccatcccaaggcgatgcattggatgctgcaacccgccgccggctggacgatcgccgagcccaagggcgtggtactcatcatctcgccatggaattacccggtgctgttggctctggagccaatggccgacgcgctcgccgcaggcaacgccatctgcctgaagccctccgagctttcgcccaacacctcgcgcctcatcgccgaactcgtgccgcaatatcttgaccccgagtccgtgtgcgtggtcggaggcgggcccaaggaaaccggcgaactgctgaaatgtccgttcaaccatatcttctacaccggcggcgggcacgtcggcaaaatcgtcatgcgtgcggcggccgagcacctgacaccggtcacgttggaactcggcggcaaatcaccgtgcttcgtggaccgtacggtggatatcaatgtggccgcacgacgtatcgcatggggcaagttcaccaatgccggacagacctgcgtggcacccgattatgtgctcgccacgccggatgtggccgaggctctggccgagcgcatcgccgtagccatcaccgaattctatggcgaagatccgaaggcctcgcctgattttggtcgtattatcaacgatcgtcattttgaacgattgtgcaagctattgccggtcggcaccgtgccgtctgaggagccgagctcgccgctggtacaggtggcatcggcggtaggcgcggccatggatatggtcgggcggcgcttcaatgtcgtggctgccggacgcggaagcgcgggggagacagccggtggtggcaccggtagcgcgaacaatgcggcgaagccggcggctggttcgaatacggcagccgctgatagtgatgcgactgcctcggccgctgttgagccgagcgagattcacaaggtgcccggcgtattcgatccggccgggcgaatcgtttgcggaggcaaggtcgatcgcgccgcccgatatatcgcgcctaccgtgctatacggcacgtcaccggatgcgccggtaatgaaggaggagatcttcggcccgattctgccgatcctggtggttgaggatgccgagtccgcaatccgattcatcaacaagcggtcccggccgttggctgcatatgtgttctcgcgcgatcacgaggttcggctgactttcgaacgtcagaccagctccggagctttgggatattcgttgccgttgggtcacctgctgtccagccgactgccgttcggtggcgtgggcgcgtccggcatcgacgcctaccacggcaaagcaggcttcctcaccttcagccacgtcaaaaccgtggttaccaagccgcagttccccgacactctgcgcctcgtgtacccgcccttcaatgaagccaaggccaaactgttcaacatcatcgccaaattcagctagcgtgatatcgctcgctgatattgggtgatggcgttgtcatagtgacgttcgctgtcccggcagccacgtcaatcgattgattcgtgtaccgggccagatttttctgtcctggtatttgatttcgagtcattttctgcttaccgggacaaaactgacgccgaaagtatcgtccgcgtattacgaaaatggcggaatagtgcggttttgcatggaatggaattccaaatattcctatattcgaggtgttcaactgtcctggtttgcgaaaaagagccgaaatcagctaccgggacagaaaaatctggcccggtagccacgtcaatcgattgacatggccaccgggccaaaaatatgcggcagatgcgccgcttctgttacttcagggctttgaagccgatgtcgtggcggtagaacagtccgcgcagctcgagcttgtcgatgatcgcgtagaccttgtcctgagcggacttgatgtccggggcggaggtttcgacgagcaggacacggccggagttggcaatcagaccacccttgtcgtcggaggcgacgccggcatagtagacatgcgaatcctcgtcgacctcgatctcgggcacacgggcacccttgatgacgttctccgggtagccgttggaggcgatgaccacgccgagggtggcgttggactcatcccagatgaattcgggggtttcgccgtcgagaatggcggagatgccggcaccgaggtcggaggtgagcttcgggagcacgacttcggtttccgggtcgccgaaacgagcgttgaattcgatgaccttcggtccgtcggcggtggcgatcaggccggcgtacaggatgccggtgaacggcgtgccttcctcggccatgccttcgacggtggggcgcacgattttctcgatggcctcgtcgaccacggactgcggaatctgcggcaccgggctgtaggcacccatgccaccggtgttcgggccttcgtcgccatcgtgggcgcgcttgtgatcctgggagatcggcatcggccagaaatcagtgccgttgacgaagctcatcagggagaattcctggccgtcaaggaagtcctcgataacgaccttggcaccggcggagccgaagcgatgatcgatgaagatgtcttcaagcgcacgctgggcggtgtgctcgtccatggccacggtcacgcccttgccggcggccagaccatcggccttgatgacgatcggcgcgccatgctcgtgcacgtaagcctgagccatgtccaggtcgccgaacgtctgatatttggcggtcggaatgttgtgacggtccatgagctgcttggcgaaatccttggaaccctcgatctgggcggcggccttggacgggccgaacgccttgatgccggcggcggcgaaatcgtccacgatgccttcgatcagcgggacttccgggcccacgaacacccagtcatagccattgttcttcacgaattcgataagtgcggcgtggttcgactggctcagctgcgtggtgtggatgccgtccttgagcatgcccgggttgccgggagccacggtgacttcgtcaatgctcggtgccttgagcagcgtgtaggcaatggtatgctcacgcgcaccggagccgatgaccaatactttctgacccatgtttttccttcctaaagtctttggctcccctctttgaggggagccggtatctggagctacttcagtacgatttgcgtgtcggtggtgtcggtggtgatctggccgagcacgtaggcgggttcgttgttgtcggcgagcagcttcagcgcctcgtccttgcgggcggggtcgatggccagcaccatgccgatacccatgttgaagatgttgtacatctccttgtgatcgatgttgccggccttctcaagcacgtcgaagatcgggagcacaggccaggtgccaagctcgatctcggcggccagaccgtccggaatcatgcgcgggatgttctcgatgaagccaccaccggtgatgtgggccacgcccttgaccacgcccgccttgaacagcggggagagggccttgacgtagatcttggtgggggtgagcagcacgtcgccgagctttgcgccgcccagctcggcgagctcagtgtccacggtatagccagcctgctcgaacagggccttgcgcaccagggagaagccgttggagtgcacgccggtggaaggcagaccgataagcacgtcgccctcagtgatggtggaaccgtccacaatggcggacttttcggcaacgccgaccgagaaaccggccagatcgtactcgtcctcgtcgtacatgcccggcatttcagcggtctcaccgccgaccagtgcggaaccggcctgcacgcagccgtcggccacaccggccacgacctgctcaagcagggccgggtcgttcttgccgcaagcgatgtagtcaaggaagaacagcggctcggcaccctgggcggcgatgtcgttgacgcacatggccacgcagtcgatgccgatggtgtcgtgcttgttggccagcttggcgaccatgagcttggtgcctacgccgtcggtgccggagatgaggaccggctccttgtagcacagggaggctaggtcgaacaggccgccgaagccaccgatgccgccgaccacgccgggacggttcgtgcgggccacgtgcgacttgatgcgcttgacgacttcgtacccggcttcgacgctcacgccggcgttctcatatgcttttggcatttggtggggcctttctgttctattttcaagctcccttgccggggagccacctgcaaaaagcggattttcgtttgtactaagctccccttgtcaggggagctgtcagcgaagctgactgaggggtagtcgtaaagaccaatgactgaggtgtagtcgaaggaccggccgaacctactgcacgtccggctgcacggtgttgtactcgttgccgatgtacttgctcttgtacagcgcgaattcaggcagacgcacacggtcctcgggcgtgagggacttcaggaagtcggcctcgtagtcgtcgagcgcagtggggtagtcgccgttgaagtaggcgacgcacaggccaccgtatggggcgtcggcgttcagtccgatggattcgaccagaccgtcgagcgaaaggtaggccaaggaatccgcgccgatgtattcgcggatttcctccacgctcatcttggctgcgatgagttccttggtggtggagatatcaatgccatagaagcaagggtacttcagcggcggggagctgatgcgcatatgcacttcagcggcgccggcttccttgagcagctgcacgatgcgcttggacgtggtgccgcgcacgatggaatcatcgataacgataacgcgcttgcctttaaccacgctgcgcacagcagagagcttcatacgcacaccctgctcgcgcagttcctgcgtgggctgaatgaaggtgcgggccacatactggtttttgattaggcccatttcgttgggcaggcctgctgcttccgcatagccggatgcggcggacaatgaggagttcggcacgccgataaccatatcggcctccaccggggattcggcggcgagacgtgcgcccatgcgcttgcgggcggagtgcacgttgacgccatagatatcggaatccgggcgtgcgaagtagatgtattccatcgagcagatggccagctgcgtgttgttggtgtactgcacgatcttgtagccgtgatcgttgaccaccacgatttcgcccgggcgaatgttgcgcaccagctcggcgccgacgacatccagtgcgcaggtttcggaggcgagcacgtaggcgccgttcttcatcttgccgagggagagcgggcggaagccgttcgggtcgagtgcgccgatcatggcgtcttcggtcatcagcaggtaggcgaaaccgccatgcaccgtgttgagcgcttccttgagcttgtccataaaggtgcgctgcatcgaacggcgaatcaagtgcatcagcacttcggtgtcggagttcgaatggaagatggcgccttcgtcttcaagcttgcggcgcagtgacgggcagttcgtcaggttgccgttatggcacagagccacgtcgccgtcatggaagcggaagatgaacggctggatgttgtccgtggtgcccgagccggccgttgcgtaacgcacgtggccgatggcgcaattgcccttcagtcgttcgatttcgcgctcatcgccgaacacctgggtgagcaggccgagtccgcgatgaccgatgagatgaccgttatcgttggagacgatgccggcaccttcctgaccgcgatgctgcagcgcgtgcaggccaaaataggtgagtcgtgaggcgtcggggtggccccatacgccgaagatgccacattcctcatgaatgtcttcgagttcagccgacaagccaaagctcctttttcaaacaggggattaactatctgccaaccctaccaatcggcggctacatcgcgtgttgtggggtggtgggggcatggggctgcccatggtcttgcccctggccgcatgagcagagccgtcaggtcggaccctgttcgccgatggcgccggaatatggactgttgcttaaatcctgttgtcttatagtccgatgttttgtattctcaactgaaatgaaggatagttttttacccggctgggggcactgttgattactgaggaagtcggcaagagaatcagagaattacggaataagacgggcctgagccaggaaaagttcgctgcaaaaatcggtatggatcgcacatatttcgccagtatcgaactaggcaagcgtaatgtagccttgaaaaacattgaaaagatagcgaatgggttggatgtgcccctttccgatctgttcaaagggatctaagactagtgcgtcgagtaaaaaggtgatgggggataagcgagaatgggattcaagggtaaattgtataaaacaacgttgattaacaatcgcagatacctgggcaacaaatacaagctcctgccttttatcaccaaggtggtcgatgaggagtgcacggggatcgatgtcgtcgccgatatctttgccggcactggcgcggtttcttccgctttccccgggaagacggtaatcacgaacgacataatgtacagcaattacgtgtgcaattacgcctggttcggtgcggagacttatgatccgcaaaagatcgtgaattatgtagtcgaatataatgccatctcgcaatatgacgacaactacatgaccgataatttcgcggatacctacttcagctataacgattgttccaaaatcggtttcatcaggcaggatatcgaggacaactatcaagctggcgacctcaacgacagggaacatgcgatacttatcgcctccctgctctatgcgatggacaaaatcgcaaagacctgcgggcattacgatgcctatcgtaaaggagccaagttcgataaaccgcttgagcttcgtgttccgcttgccgaggtgcataacaatgccgggaaccaatgtttcaatgaggatgccaatgaactggtcaaggacattc

SEQ ID NO: 3169 - DNA, 21857 bp, Unknown
  R53_2m  MAG No. k141_1481
accccactggggtgcgtggattgaaatcaagcgtgccgccttggaacggcagggatggcattggtcgcaccccactggggtgcgtggattgaaatgtcccagtattggattaccgcgccttggcttccgcgtcgcaccccactggggtgcgtggattgaaattcaccgtgctcaaacaggatgcgttcaacgcctgtgtcgcaccccactggggtgcgtggattgaaataagaacagattcgtaggacactgcgaaaaacaaatagggtgctttccgccatcaacagcggaaagcaccctattcttatggtattcttatgatttctctgtcctaattagagcacctcactccgcagcaatcgcggccttgagctcctcgaccttgtcggtcttctcccacgggaactcaacgtccgtgcggccgaagtgaccatacgcggcggtcttcagataaatcggacgtttcagatccagctcgtcgataatcgcagcggggcgcagatcgaagaccttgcgcacggcggcggcgatctggccgcgcgtcacgccttgctcggtgccgaaggtctccacgttgacggacaccgggtcggcaacgccaatagcgtaggcgatctggatctcgactttgtgagccaagccggcagctacgatgttcttcgcaacccaacgggtggcgtacgcggcggaacgatcgaccttggacgggtccttgccggagaacgcgccaccgccgtggtgggcggcgccaccgtaggtgtcgacgatgatcttgcggccggtcagaccggcgtcggccgccgggccgcccaggatgaacgaaccggtcgggttgaccagctggcggtagttgtcatgcggcaccttggaacccagcacctcatcaagcaccgggtcaatcacgtgcttcttcagctcaacagcaagccaatcctgcgtaacctcaggatcgtgctgggtggagatcagcacggtgtccagacgaacgggcttatcgttatcgtcatactcaatggttacctgggtcttgccgtccgggcgcaggtgcggcacttcaccggacttgcggacctcggtcagacggaaggcgaggcgatgtgccaaatagatcggaagcggcatcagcgtcggagtctcgtcggtggcgtagccgaacatcacgccctgatcgccggcaccctgtgcttcgtaacgttcttcgcggctggcggcggtctcctgatcgccagtcagacgggcaacgccctggttgatttcggcgctttgctcggtgatggccaccacaacgccgcaggaatcggcgtcaaggccgacttcggaggaggtgtagccgatgttgcgcagggtttcgcggaccttggactgcacgtcgcagtaccccttggacgtgacttcgccgaagaccaggaacacgccggtggcggcggaggtctccacggccacatggctggacggatcctgggccagcagatcatcaagaatggcgtcggagatttgatcgcagaccttgtcagggtggccttcggtcacggattcggcggaaataagccgatgttcttctgtcatatcatccctttcttcaggacttatcgccccgcgggatgcgaggcacaatgatacggtgtcaatttttacttgtcactgcggaagcgggcataaataaaggctcgtgccaaccagcgcggtggctcgagccttacgtcttgttcgctcctgatgatgagttatagctgattgcgataactcaggcaagcgtgtcgctcaaaatcagttgtgagagaactctcacaccatcattcggcgacgaactgtccaaacaatccaaacgaatcgtctgaatcgatcagttgccctcgttggcgtcgtcctcgcccaaggtctcctcaagcagaccctcgtcgatctcgcggaaggcgatggacagaggcttctcgttgttctggtattcgaccagcgggccgacgttctgcagcaggccctcgttgagctgcgtgaagtaggagttgatctggcgtgcgcgcttagcggcgaaaatggccagcgcgtacttggaatcggcgtgcttcatcagatcgtcgatcggcgggttcgcaagaccgtcgggtgtcgggtcagtaccaaaagccattgttcttatctccaaacattggaaaatctatctcaaccgaagcaagtgtagccgtttggggggacttctgtcagccctataccggactctcgccagaagaatgtattccaaaaaaatgtgtgagaaacgttacgtttttgaaaattccattattcgactcttgacaagtggcgtgtccctcgcgaaggcttgaatagagccatgactgaaatgcgatctgcaaaaattatgtcagggcgcgtctttgcaggcgcccgagccctctaccgtgctgcgggcgtcagcggagacgacatgggcaagaagcccatcatcgccatcgccaactcgttcgatgagttcctgcccggccatgtccacctcaacaaggtcggccgcatcgtttccgaggctatcaaggaagccggcggcattccgcgcgagttcaacacgatggccgtggatgacggcatcgccatgggccacactggcatgctctactccctgccttcccgcgacatcatcgccgacaccgtcgaatatcagtgcaacgcgcactgcgccgacgccctcatctgcatcccgaactgcgacaaggtcgtgccgggcatgctgatggcagccctgcgcctcaacattccgaccgtgttcgtctccggtggcccgatggaggccggcaccacggtgctcgccgacggcacagtcaagagcaccgaccttatcgacgtgatgtacgccaccgctgacgacagcgtctccgatgaggaactgctcaactatgagaagaccgtctgcccgacctgcggctcctgcgccggcatgttcaccgccaactcgatgaactgcctgaccgaggccatcggcctggctctgcccggcaacggcaccatcctcgcctcccactcctaccgcaaggacctgttcaagcgtgccgccaagcaagtcgtcaagatcgctcaccagtactacgacgattccgacgattccgtgctgccgcgctccatcgccaccaaggaagccttcgagaacgccatgaccatggatgtggccatgggcggttccaccaacaccgtgctgcacatcctcgccatggcccagtccgccgacgtggacttcaccctggacgacatcgagcgtatttcccacaccgtgccgtgcatctgcaaggcctcgccgtccggcaagtgggagatttccgacgtgcatcgcgccggcggcatcaccggcatcctcggcgagctcgaccgcgccggcaagctgcacaccaacgtgcattccatcgactacccgacgctggaagccaagctggccgattgggacatcatgcgcccgacctgcaccgaggaagcccagcagatgtacaaggccgctcctggccacatcatctccccggagccgtggacgcacaccaccctgttcgactcgctcgaccgcgaccgcaccaacggcgccatccacgacatcaaccacccggagattcacgaaggcggcctcgccgtgctgcgcggcaacctggcccccgacggctgcgtggtcaagaccgccggtgttccgccggagatctggaagttccgtggaccggctctggtggtcgactcccaggagcaggccatcgaggtcattctgaacgacaccctgaagcctggcatggcgcttgtgattcgttacgagggtccgaagggcggcccgggtatgcaggaaatgctgtacccgacctccttcgtcaagggcaagggcatcggcaaacaggtcgctatgctcaccgacggtcgctactccggcggttcctccggtctggccatcggccacatggcgcctgaggctgccaacaagggcccggtggcgctcatcaagaacggcgacatcatcgatatcgatatcgaagcccgttccgtgaacgtcgaactgactgacgagcagctggacgagcgtcgtcgcgagcttgaggctggcgacggctacgtggctcaccgcaaccgccacgtctcccaggcgctgaaggcgtacgccgccttcgcccgctcggccgacaagggtgcgacgcgtgacccggagctgatcaacaagctctccggtctcaactgatcgccgattgcatagctgaaaggcccggcatcttctttatgaagatgccgggcctttactgtgcttccgaaggcgggagcgatattgcttgttatcgcacgcaggcggcgggggagaggcgtgcgcctcgggcccagtcggcggcgcgcatggccttcttgccttgcgccttgacttgggtgagttccagcggcgtgctgccggtaccaacccacacgttcttcttgcccaccttcagctcgccgggctgaagctcggccggagtgttgggattggactggtcggccggttgtgcggtgagaatatgcagggcgagggatttagcggttgactcgtcattatcggcgattggcccttccgcaaacagttcggtccatgccccgggatgtggcgtgcaggcgcgaatctgacggtcgatggcctcggcctcgtccgtccaactgatgcgggcgtccttcaccgtgatcttgtgcgcgtattccaggctctcggccggctgcgcggtgaatgtggcggtgccttcacctacggcggccagcgcatccacatacatgggcgcgccttcctcggccagacggtcaagcagttcgccggaagtctcacggccggtcagttcgatggtcagggaagcgacgatcgggccatcatccaaaccctcgcccaccttgaacacgtcggcgccggtggtcgggtcgcccgcccaaatcgcacgctgggcgggagcggcgccacgccacttcggcaggttggagaaatgcaggttgtaccagcccatgggcaccgcatcaagcacgttcttgggcaggatattgccataggcgatgacagcggcgatatccgcatgcaggtcgttcaacgcctccatgaattcgggggagcggggtttgagatcgatgacgggcaacccgagctccagagccgtagccttgaccgggctgggcgtgagcttgcggccgcgaccggtaggcgcatcggggcgggtaatgacgccgaccacatcaaaacgtggatcggtggcaaaggccttgagcgagggcaccgccacgtcgggggtgccggcgaacacgagtttgagcatggtcctccttgaaatgtcgatgctcactgcacggccggaatgttcacgccattggcgatgagcagttcacgcagcttgaccggatcctggaaacgtacgccacggatgccggccgcattcgagccgacgatgttcatggccttgtcgtcgatgaacaacgcgccatcggccttgatgccgaactggttcaacgcggcctcgtagatttccttgtgtggcttgcgcagcttgacaaaaccggagacgagcttgccatcaagctgctgcagaatatcgcactgttcctcggccacgtggaacagactggattcccagttgctcaggccccacacgccgatgccggcagccttcaggtcattgaccagcacgcgcgcgcccggcacgatgccggtcagggagtcgcggaagttcttgatgtagtagtcgaggatgtccgcccacttatcgcccttgtcacggcgcatgatggcgatggcctcgtcggtgctggtgccgccgtccatcaggtcgttgacatcgtagaagccggagatgtcgttgtcgaggaattcgtcgatggtcttctggctgtagcgggggatgagcacggccgctggatcccagtaaatcagcacgttgccgaaatcgaagatcacgtcggtgatcggcttgccggcgttcgcagcggcctcgccatccgcgaccagcacgtcgtaatccatacccggttctccaggccaacccttcatagtgtcctccttctagcgatgttcattctgtaattatcgtttcacgtgttgaagacgattagatcaggtccttgggatctactcggaagcgaagctctccgggttcgcgggacgccacatgacgagcggtttcccggtgcagtcgggccgccagctcggctcgccgactctgcggcacacggattactgccttcacccggtcggccgtggcttcgagctcccgggcgtcgaccgtgtccggttgcgcgatcggcaccgggcccaacatgccgggcagctcgtcgcaggccgtccaatcgccgcccagggcgccgatacgctgcatcagcatcatcaccgcatcacggcggccccatacgcaggcggcggccacggccggcggcataccggtctccacacgctcctcaagatccttggctgcaagaatcctcgaatcccagagcatcagcgattgggcgatggccgggtcggtttcgccgagaatcaacgcttggccgccacgggaacgcggtgcgcacaacgacaccgcacgcatccacgcggtcaacgtatccaaccgagcatccacgcccaacgcatacaggctggtccaagcgtcgagcacggccactgcgcgatactcatgaccggatgttccctgctcggcactgatcggacgcacgcgcggttcgaaaccgggagtggcgatgacgatcatcggctggcaagccacatcgcgcaccagaccctgcgtcttgctggacaaaactactggcacgccacggaacaatccggccagctccgccgcagtgcctgcagcacccacgcgcaccacgcgcatacgttcatgcccacagcccggacacttccagttgatggcggcagccccgcaccagcggcatcgcggtgtggagtcccggcggtcggccggtagttgcaatggtccggaacacttggcgcagcgcacctgacgatggcatttcgcacaactcagagtctcactgacgctgtcttgcggaatggacagcagcacggggccgctctccaaagccttagatagcacgcggacagccgtatgcggcacacgtgcgccgatggacgggtcggcaagacgcgcaagctcatcgcgattgagccaacgcacccaaggagtggcgtccttcagcggcgaggcgagcggatgaattgtggtggaatagccgctcactggggtctccactgtacctggaccggtgttttcccactggctttgcggggtgcgcgcattggccatggccacgaacacgccgccatgggacttggcgcgcagccgcatcacgccacgggcctgtggatatggcatcataccgtccatgttctgataggcggcatcctccagaatggcgaacagcgccgggccttcaaccggcgcatacatcaccgcacgggtgccgatcaccaccttcacctgtcccaacgccacagccagataggtgcgataccggtcggccgcgggcatggtctccgcgttaagcacggcgacgtcgcccacccagccgccggcgggtgccggggcgaacggtttgagtccataattgcgcagcataggcatcaggtcttcgacctcgcgcatggtgggcaattcaaccacggcagctttaccggcactcagcgcagtggccaccatccatgccatgttccgttgccactcctgtgcaccgggcagcgaatcaaacacaaaagattggaaacgctgaccggtaagcgcatcatgaagcacattgacgtcggcgtaattggcggtcagacgacgatacccctgcgcagccccctccgaaacggtactggcaacggcaaaggtagagccagcaggcatggtcccatcgggattggtgccacgcccggcaaaaccgccttgcgtattatctggtagggagccgccgaccggtcggcggaacgacgcggccaaccgctgttcggcctccaccttggccacgcgcggtggcacggcgaaacgcagaatattggcccgtgtgccgccataggctttggcaatcagaccgatatcctcacgcatcgaagcgggaaccagtacatcggggcttagcactcgctcgatatagcgaatcgaagagcgcggcgtatcgctggtatcggtgcgtgcccagatcacgccgctgaccctttgaccgccaaaccgcacgcgcaccagcacacccggttgtgcggcctcgctgtctttttcatcaatgaagtagtcgaatgtctggccgaggtggagcgcctgcacatccagcacgacttgcgctatgggatgctgctcggccggcgtatgctccgcaggcgcacgtttacgccgcttgcggggagccagccccgcaagcgtcaactgttctgcgcctgaagtagtcatggctcaactataagtgccggagccgaggtcggtaaaattttaccggcgcaggtaatcgagtacgtgggttaggtcgcggtcgttgatggctttgtcggcggcgagctgggtctttggcttggcacagaacgcgagacccaggccggcggcctgaatcatcggaatatcgttggcgccatcgcccacagccacggtctggctcatcggaatacccaaacggtccgcccatgtctgcaaggcgtgcaacttcacggtcttgctcacgatttcgccgagcaccttgccggtcaagcacccatcggcaacctcaagccggttggcaatccaatagtcgatatggccctcggccgccagcatatcgaccacttcatggaagccgccggacaccacgccgaccttccaaccgtgttcatgcagcgtgtcgataagctccagcgcacccttggtgaaatgcagcttgtcatgcaccgtatcgaacgcggaaaccggcagccccttcagcagcgccacacgagcgcgcaaggcgtcgcagaactccagttcgccgcgcatggcgcgtgcggtcactccggcaatctcctcaccgcagccagccaccacgcccaactcgtcgataacctcttcgtcaatgagcgtggagtccacatccataaccagcaggccgggctcgctcagcgtcggcacagaaaccgcagaaccaaccgggctcccaacttcgctctcggcggacttgtcaataaaatgcacatcttcttgcgtcatgcctctgattctgggaaaaccttgggacaatgccctctatgagtttttccatggcagccgccactattcttgcgaccgaccccacacccatctgcaccaccaccgaacccggcctgatcggcaccatcaccgactggctgatcatgctgatggaaaccatcggcggtatcggcgtggccttggccatcgccctcgaatccatcttcccgcccatcccgtccgaagtcatccttccgctcgccggcttcaccgccgcacgcggcaccctgagtctgccgggcgcaatcatctgggccaccatcggctccgtactgggtgcctggaccttgtacggcatctcccgctgggtgggcctgcatcgcatcaatctcgcggcagacaaaatccccggcgtcagccgcaaagacgtgagcaaagccaacgactggttcaccaaatacggcacatggtcggtgctcatcggccgcgtgattcccgtggtacgctcgctgatttcgattcccgccggattcaaccgcatgaacttcctgcacttcaccggctggaccctgctcggctcggccgtgtggaacaccatcctcgtttccgccggttacctgctcggcgaccagtggtgctcgattcaaggcgcgctcggcgtgttcgaggacgtggtcatcgcggccgtgattgtggtcatcgtatggttcgtggtgcgaaaagtgcgtactgttatacgtaacaggaaatccgccgacggcaacgaatagggtctgccgactgccataagttgccgaaaatcccggatagaagggaagcgaagaacccgcatgagcgacaccgaagatctcgccgcgctgaacgatcgcctgatggccaagaaccatgcgctcgccgaagcgctgagccgcgccggcaaggaactgaccaaggcgaagtcacagctcgcccagctcgctcagccgccgctcaccttcgccaccatggtcaaggtcgattccacccgcaccgatgaagacggcatccagcacgcgtcggccgaagtcatttccggcacccgccgcatggtggtgcccgtggcctccaacgtcaacgccgcccgcctgaccgccggggccaccgtgatgctcaacgagaagctcgtgctggtcgagcagcgcgatgctgacaccgtgggccagattcgcagtgtcaagcaggtacttgacgacggtcgactgatcgttaccgacgcctccggcaatcccgtgctcatccgccgttccggcgcgctcgcgtatgcgggcatcaatcagggcgaccgtattatcgtcgatccgtccgtccgcctcgccatcgaagtgctgcccgccgagggcgacaaggatctggtgctggaggagaccccggatgtcacgttcgccgacatcggcggcttggatagtgagatcggtcgtatcagggacgccgtccaactgccgttccaacatcgtgcgctgtttgagcgctacgatttgaagccgccaaagggcgtgctgctgtacggtccgcccggcaacggcaagacgatgattgccaaggccgtggcgaacgccctatgcgagggtggttacgattcgaatggcgacggcgcaatcagtccggccgaaacccatgtcaagggcgtgttcctgtccgtcaagggcccggaactgctcaacaaatacgtcggtgaatccgaacgactgattcgcctgattttccagcgcgcccgtgaacgcgccgcggacggcaatccggtggtcgtgttcatcgatgagatggattcgctgctacgcacccgcggctccggcgtctcctccgatgtggagaccacgattgtgccccagttcctctccgaactcgacggcgtggaatcactcgacaatgtgatggtaatcggtgcctccaaccgcgtggacatgatcgatccggctgtgttgcgaccggggcgtctcgacgtcaagattcgcgtcggccggcccaaaaccaatcaggccatcgccatcgtggaccattacctcaccgacgacctgcctctggaagatggcgtcgacgcgcacgccttgtccgccgtgctggtgcatgacatctacggaacctccgaacgccgccatctatgcgacgtgcaggaggagaacggccagtggcatgcgctcttcctggccgacgtggtctccggcgcgatgctcaagaacatcgtggaccgggccaagacccgagcggtcaaggaatccatcgaaaccggcttggacgtggcactcaccgtgccgctgctcgctgccgccgtggaagacgaataccgcgagacccgcgattccatggccgacgtggaccccgaacaatggtcgcgcatcaacggcatggacccgatccgccgcatccgcaccgccgaatagctcaagctcaaggagcactacatgaccgttaaacgagtgatgggcaccgaaaccgaatacgcggtatccctgaacaccccggaccgctacaatccggtgcaactgtccttcgacgtggtgaacggcgccgcggacagccacagcaaatccatccgctgggactaccggcaggaggacccggtcaacgacgcgcgcggcacccgtctcgaacgcgccgccgcccgcccggacatgctcaccgacgccccgcagctcaacatcaccaacgtgatcgcccccaacggcggccgcgtctatgtggaccacgcccaccccgaatactcggcgccggaaaccaccgacccgttcgaagcggtccgatacgaccacgccggagacctcatcatgcaggccgccaccgaacgcgcccgcaaacagactggcactcccattgccctgcatcgcaacaatgtggatggcaagggctcctgctggggcacgcacgagaactatatgatggcccgcgcggtgccattcgacttggtcacacgcctgatgaccctccacttcgtcacccgccagatctacgccggctccggccgcgtagggattggcgagaacagcgagatcccgggctaccagctcagccagcgcgccgactacatccacgccaaagtcggcctgcaaaccaccttcgaacgcccgatcatcaatacgcgcgacgaatcccactccaccgatgcataccgccgtctgcacgtcatcgtcggcgacgccaatcgcatggaggtgccgcaggcactgaaactcggcaccacgagcatgctgctgtggctgctcgaacatgcggacgaggccggattcgacctgaacgccttcctcgacgaactcgaactgtctgacccagtcgaggccatacacaccgtttcccgcgacctgacgctgggggcaatcttgccgctggccaacggcggcgaaaccaacgcatggcttatccagctcaaactgcgccaagccgtctaccaggttgccgcactggtcgaaggtaccgacaccgccggcgaacccgcctggccggacaaatccaccacatccattatggcgatgtggcagcaggcgctcatcgactgcgcctccatccgccatgccgccgacgatgacgaacgtctggccatgaccggcgaggccagccgcatcgaatggctgctcaaatggcagctgctcgaaaaactgcgccgcaaaatcaccacaacgtccgcacccggcgtggccaacggatggaatgatccgcgactgaaggtcatcgacctgaaatgggcggcgctcgaccccgcggacagcatcttcaccaaactcgaaccccgcaccgaacgggtggtgagcgccgccgacatcgcacgcgccaccaccgaaccgccggaagacacccgcgcctggctcagggcaaaactcgtggcgcaattcggcgatgaggtggccgccgccagctggtcccgactcactgttcgcgacccgcgcgccgcagacgagggcgaggcggtcgaattctacggcaatgccggccatatggccgctaccgaccatcacctgttctccctcgacatctccgatccgctcgccttcaccaaggcgcactgcgaaaccgaactcaattcagccgaacacgccatcgatctgctgaagtcgctggccatcaacgccgaacgatagacttggtagctatggaagaaacacgcgaagagaccccacaggacctgcgcaaccttgcgctcaaagtcgccggcctgctcgaagaagccggccagcatgccctccacgaccaactcaatccgcgtaacctcgcccagccgagcaccgagaacgcggaccgtggcccccgctacaagcttgaagtggacaacaagatcatgcgcttcatgagcgccagaatcgccgacatcgcccacttcgacggcttctggaccacccgccccgccgaaagccgccctggccagcgttactggtacatcggcaagatcgacggtgtgatcaactacgtacgtcgcatgagcgaatggacggtgaccgccgccctgttcgaattcggcccggacaacgagcccaagccgatcatcggcatcgtgcacgccccggccctcggcctgacctacctggccgccaggggagcgggtgccgtgcgcatccacaaaaccgcggtcggcgagaagcgcgacaaggtcgtgccgtcgatgacctcctcgctggatggttctgtgctgagctacggcatgtccttcatccccagcgaatcgcagcgtgcgctcgacgtggcctcctcgctcgccggacgcccggccgacatcaagcgcgtgggccccgtctcgctcgacctgtgcaaagtggccgacggcacctatgacgcctacttcgagccgatgctgcacgtgtgggatatcgcgggcatcgccgccggcaccgtagtggtctgggaggcacagggcacgctgagccgttgggacggcgaacgcatccactggcgtcacgataacgatgtagtggcctccaatggactcatcatccgcgaactgcagcattacctgcagcagtatccgtggctcgactccatcaaccagcgataattttttgactcctccggctcccctcgggtgaggggagccgtcggccgaaggctgactgaggggagtttgacagcccaaaaagaagacaacatgccacaacaattcgaacaacctcaagcacagcaggccgcgacccaggaagacgacgccctcgccaccacgcaggccgccgcccaaaccgagtccaccgaccaagccgacgtgttggacgacatcctcgacgacatcgaatccgccttggaaaccaacgccgaggaatacgtcaacagcttcgtgcaaaaaggcggcgagtgatgccccaactgcgtgacagcggcacccgctccctgcacgccacggaacccgtaccatccgccgagatggacgggttctgccgtattttcggcgtcgaaaccgaatacggcgtggcggtcaccggtgccgaacgccccgtggacgccggccaggtggcgatgaccatgttccagcccatcgtctcccgttcccgctccaccaacacgtatctggccaatggctcacgtctgtatctggacgtcggatcccaccccgaatacgccaccgccgaagcgcgcgacccgcgcgaggccctggcccaggacctcgccggcgaacacgtgatgcgcaacctagccctgaaggcccagcgcaagctgcgcgaatcctacggcgcacacgccacgatccatgtgttcaaaaacaacgtcgactccgccggccacgccttcggctgccacgaaaactacctggtccgccgcttcgtgccgttggagaccatcgaacaccagctgctgccgttcctcatcacccgccagctgtacaccggtgccggccgcatgaccccggacggcttccagatcacccagcgcgcggacttcctggacgaggccgtctcctcggccaccacccgctcccgcccgatggtcaacacgcgcgacgaaccgcacgccgaccccgactccttccgccggctgcatgtgatcatcggcgactcgaaccgttcgcaatggtccacatggatgaagcttgccgtcacgcaccttgtgctgtgcgcgatcgaagacgccttccgccatggcgttccgtccggattcgagcagtatgcctttgctgatccggctgccgccaatcgcacggtcagtcgattccttgacaatccgcgcgccgaactgacgctcgaatcaggcgaatccgtgtccgcactgggtctgcagcgccggtattatgcggcggtcaaggccttcatcgaaacccatggcgatgcgctggcaagttcgctgccggccaccacgatcgacacgattatgggggagtggagccgcgttctggacgcgctggagcgtggtgcatacgatgcgctcgccgaccgcgtggactgggccgccaagaagcgtctgttcgacgcgctcaaacgacgtcgcctggacgtcaccttcgcccagatggaacagcttgagctcgactaccacgacatcgccaacggtcgcctgtacggttcgctcgtagcccgcaaccagatgcgtgagctgctgacaggagacaacgtggaatacgccgtgcacaatccgccgaccgacacccgtgccgccctgcgtggccggttcgtggacgcggccctgaacgtcggagcccagttctccgccgactggacccacctgaccctgaccgcccccgaacgccgggaagccatactcctcgatcccttcgaggccgagcccaccctgggattcgagcagcttatggaagcgctgaactagtccggaataatacggttggacaacacgtcacagcaccacaacaaaaagaccccgaccatctcggtcggggtctttgtcgtcagtaatgctcgaagtaatcgctacgagcagaaggtcactcggtgacggccttcttcagcagggagccagcggagatacgaacgccgtaggaagccggaatgtcaatctgctcgccagtgcgcgggttgcggccggtgcgagcggcgcgcttgacgcgctcagcggagaacaggccggtgagcttcaggccttcgccggacttcatggcctcgacgaacacatcctggaaggcgttaacagcagcctcggcctgagccttggtcaggttggacttctgggcgatcttcgaaacgaggtcagacttgttgtatgccataaagcatccttcttgggtcaggggacaagcacttttgcttagtccatgttgtcatcaatgatactagcgcatgtttctgcgaaaacccgcgttttataagggttttcacatctatttccccgaagggggtatgaaaatagacgaatcagacaagattatgcttgtcaagccacttcatggccgccgcgcccagcggaatgcgcagccaatagaacaccacgcggtgcagcaaagtggcggaaagcgccacgccctgcggcactccgaccgccacgaacgcgaatgtcagcgccgcttccacaccgcccagaccgcctggagtgggcactgcggaacccaatgcataggccagcaggaagacgaacgtcgtttcaatcggattcgatgaatggccgaacgcttgcagggccgcccagaaagcgagcccagtggtcgcgttctggaacagcgcgcccaggcagctgactgtgagctgtcggggctgggaaagcacgtccagcagctggttgatatacgtcttggccagcggcataagacgacgggtcacccagtggcgcaacggcggaatcatcatcgcaatggacagcaccacgaccacaacgcccagcacgataaccaacgtgtttgtcgggattgcgccggagaacatgttgcggccggtgaacaggccgatgatgaccagcatggagaagtacacggcgtaatacaccacgagcgcggcgctcataattgcggtcgcctgggtgttgcgatagccggatttgcgcaggaactgcaggttgacgaacgaggggcccacgccggctggcatggatacggtggcgaagccgcctgccacctggctcatgaagacgcccatattgtcacgcttgtgccgcgccatcagggaaccgagcgaaatcgacgagccgatccagccgcagacaccgaacgcgagcgtcaccaccgccatcaacgggttggcgttggtcagcgcggtgatgatctcctcgggcttcagttgggtgaagaccacgaccacggccacgatgaccagcagcatggtgatcatcgaacgccaggagaatcgggccagcgtcaccggttcggcggattccaccgtctcctcgtcagccagcgcggtgatacgactcctcaggcccttgagcagctgcttgtcccaggattccagcgcgcgcgtgggggaggggaccgcgaccttctgaatgaacggggccaaggccgtcagagtcgtgtctccccacgcctcgcgggcggcctccaccgccggttccacgccgatcagcgcggcgaacagcactagcagctgaactttgtcgagcgcggtgttggccggaccggaagcgttgtcgccgttgagccagccggcaatcacggcggtgccgtcttcaagccgggcgagcgtgtccggcgtgatgcgccggtgcgtatagccgcgccggctcgccacggacaggtagcgcatgtaggccacggcatccgccttggtaagcgtgttcaggttggcgggcagttcgatggtgtgtgcatccagcaccagaatcgcggattcgtcggtatcggcgatgccgtagggtgcgggcgcgggcagtttgatattgtgcagacccagcagcatggcgaaatgatgctggacggcgtcacgcacggaacggtcacgtcggatggacacactggtgaaacgcacccagtcccacaactgcttcagatagccgacggtatgggtctgcgcgtcgatgacggaaacgatgaaacgacggttgtccgtggtatccagatcgtagatgcgcgagccttcggccagatcgtcgtccagcgtgacggccagtgaaccgtggccgacgccgggctcctgatgccgaatcagcgaggcggtgtccagtccgatgcctttcagggcggcgaccagatcttggccccacacgcccttgttctgcgtgccgaccacgaatcggatcagcatgcccactgtgcggccggcggccatcgacaccagcatgccggtgaccgaatgccacgacagcaccaccatcaccgcagcgatggcatacaggatattccagctccatttgaccgtggagcgggtgcggcgtggcccggcggcggtcaggaaggacgccatgccggcgtagatgtcgggcaacagcccggagccgtatgaggtggcggctgagactagtgccattggcagggtgaaatcgttcagactgctgattgccgtcgatacgacccacaccatgccgtagccggcgaacatggccagcgcggacaccgcggcctgcagccattcccgggccagtagcaattgagcgagcacgatgatcacgatgacgatggtggccagctgcgtcagcacggtggaggggaagtcagccaaccagttgatgacctgggctgcggtgtgtgcgtcggattcgacgccgcgcgtcatgccgcccagatacacggcgaacaccatgaccacggcggccatcaacagcgacagaccggcccgggtcagatcgccgaagtcgcgcgtgcggcgcggagcgatgtcgtcgatgtacggtccggaatcgttgctgtcgtcggttgccgggctgtccggtccgctgacagcaaaactggccgaccggccgtcaccagaggcgatcggccggtcggtagtggaggaggtcgccttgtccgggcgatcttccgtagtggactgctcctgttcagtagtcatgaaatagttacctgacgcctgtccttgttcggttcagtttgcggtttggtttgtgactcagcgcagtagtgtggtggatgcgatgggctcgagggactcgcatcgcacctatttcagcggtcgaaagcgacgagctggctggccacaccggtgtaggtggcgggggtcagagccttcaagcgagcggcggtttccgggtcgaaggactgctggtcgatgaactgctcgacctgttccttgttgatggtgtggccgcgcataagctccttgaccttctcgtacggcttgtccatgcccggcaggcccttgagctcgcaggcgcgcatggcggtttggatcggctcgccaagcacctcccagttctcatcaagctcacgctcgatgacgtgggtgttcgggtggatggactcaaggccgcccatgaggttggtcagggcgagcaaggagtagccgagcgcggaaccgatgttgcgctgggtggtcgaatcggtcagatcgcgctgccaacgggattccaccagcgtggcggagagggtgtcgagcagcgagcagctgatttcgaagttggcttcggcgttctcgaaacgaatcgggttgaccttgtgcggcatggtggaggaaccagtggcacccttgaccggcacctgggcgaacactccacgggagatgtacatccacacgtccacacacaggttgtgcatgatgcggttggcgtgggagacggtggagtacagctcggcctgccagtcgtggctttcgatctgcgtggtcagcgggttccaggtcaggcccatgcggttggtgacgaattcgcgggagacggcgacccagtcgacatccgggcatgcggccaggtgggcgccgaacgtgccggtcgcgccgttgatcttgcccaggtactcctggttttcgatgtgcttgagctgacggttcagacggtagacgtagacggcgagctccttgccgagcgtggtcggtgtggccggctggccgtgggtgagggagagcagcggcatatccttgaattcctcggccttgccggcgaggtggtcgatgatgcgcttgaactccggggtccacacgttttccatcgcgttcttgacgcaacgggcgatggagaggttgttaatgtcttcggacgtgcaggcgaagtgcacgagggtcttcagctcgtcgttgatgttggccagctcggccggagccttgtcgatctgatcatcgatgtagtactccacggccttcacatcgtggtgggtgatggcctcatgagcggcgtgctgcttgatgccttcggcgccgaagtcctcgggaatggcgcgcaggaaggcctgctcttcggcagtgaacggcttgacgccgtcaacgattggctggttgccgttgccctcaaagccgttggccagaagaatcatccattcgacttcgacacgcatgcgttcgcggttcagggcaggttcgctcatgtattcgacgagcggggcggtggccttgtggtaacggccgtcgagcggggtcaatgcgattgcgggggaaatatcggtaagcttcataacctccaagggtacttccagccgtgaaccgagcggctagactgtggtgtggcgttcccgcccgagtcgcacaggtcaaggaacgcccgtgattcgattactgtgtgcggcctttaaggctaggagatcaccatgcctgcaaccaccattcatactcttccgaaacgttcggtcgccgtatcgtcgctgaaatggcagccgttggacatcgcggtcggtgccacactgggcgcggcctgcggcgtgatcttctggggattcaacttcgcgtacatgccgatctcttcggtgtttggtgcggttctgcccggtttcgccagcatcgtgcacgccgtctggtatttctccggtacgctggcggtgctgattctgcgcaaacccggagcggcgctgtacgtgaaccttatcggcacgctggtcgaaacggtgattggtagccagttcgatttgggcttcgtgattatctcggcgctgctgcagggtgttttcgctgagattccgttcgctttgacccgttaccgcatgttcaatctgccgatttccattgcatccggtgcgttggtcgccttggaatacggcacatatctgatgctgtttcgctacgtgggtgtgtcattcgtcagcccgcgtggcatcgtgcacatgatttccgaggtcaccggcggcgtgcttatcagcggcgtcatggcctggtatctgatgctggccatcgccaaaaccggtgtgctcgaccgcctcgcatccggccgcgcactcatcgagcgacgcgcctgacactctttgcgcgccactttcccgggaatgttgtgctggcggagaggaacccaagcgcattagcgcaacagtcccgggaatgttgcgctaatggaagggaatacgggtgcgtcggcgctgccttcatgggactattcgagaacagtcatcttagctacttcactttgctgagatgccctatccgcactcattctggcaccagttcaggcctcgacaggttgaatgcctgctgtcatctgcgttatgtattcgtggatgagttccgccatttctgggtctttcatggcctcattgaacatgtcgtcaaatcgttccgtaggcatgatattcctccttgcggcaattctcgaaaatagtgaagagccttctgcgggacgtacgtactttgaattcaaccattgagcccttacgttatgggagtgctttgccgctgaaaatcaataggattatgaagtgagctgattgtcatgggcagcagattgatgaggtctatgtaatgatgcgacacgcccattaaaaataacactaaagtaacaaataagaacatagtgctgttgtatatgatataccga

SEQ ID NO: 3170 - DNA, 23177 bp, Unknown
  R53_2m  MAG No. k141_1500
tcaggctgcgatgaacatggggggagtctatgagaatgtcgtggctcaggaacttaccgcgcatggattcaccaatctgtattactttacgaaaaaaggaattggcgaactggatttcctgatagagaccgatgatggtgatgttttggccctggagattaagtcgggcagatattaccgttctcatgcggcgcttgacaatgcgttgagcgctgatggctacaccattgacaaggcgatggtgttcgcggaaaccaacgtgttccaagaggaaggcgtcacatatttgccgatgtatatgctcacgatgctggttaatgagtgatcagtgccttggtggtgcgatgcaggcgatatttgtgatggcggtcgataaggaggtgctcaacgattctgttgtcggaccggttccgagctggtcatgaggcgtcattggaaagttgcggtgtgtagggtggtgtctttgccgagagtacagtgtttcttgaaaaatgcggtgcatgcgatatgtttaatgtaattctaaatattacattaaacatgagtgagcttcccgaattcaatttgtaagtgcaacgctcgtctttgggtagcttgtcttcgacattagcttgccgagttcgcggtatcaaacctcgttgggtgtttcccagtccaggaccttcatgggggtgtcgttgatctcgtcgacgatggcctgcaggtcggcgtccgtcaggccgtcgaaaccggtccttttgggcaggtagcggcggatgcgcccgttgcggttctcgttcgtgccgcgctggtacgaggagtacgggtccgcataataggtgagcatgccgagcgactcgtccacgagcaggtggcaggaggattcggtgccgttgtcccaggtgcggtcgatgcgcgcgggcgcggggatgcggctgtagatgtcgtattcggcacgcgccgtggccagcgcgctcttgtcggggatgaaccgggcaaacagcctgcggctcctgcgttcgacctgcgtgtcgatgcaccgcctcgacggggaggcgccgatgaccgtgtctgactcataatggccgaactcgcggcgcgagtccacgcgtttcggacgttcgccgatcggctgtgtcctcagctcgtcgatccggacacgttcctctgccgacaggtgggaatacactctcatatcgagcgcgacactttctctctggttatgaacttgaacacttccagccatggagcgggtgttgcgcttctatttagaactcgtgcggtctatcattattgtggggaggcgtcgtaaatgccgattgtcgcgggatttcggccgttttgtgatgcggtggcgacgtcgtggcggacgagtgcgtatgcgttgcgtaggcgtccggtgcgtacggtggtgatgtggctgtcgatgttggtgatgatggcgatgccgtcgttgcaggtgtggctgatcggttgggcgtgcggcccggacgggcttggtatggggtcggggctgggcgtgggccggttcgcagtgatcctggcggtgctgacggtgggcgcggtgttgatgtcggtgtcgtcgtcgttggcgcagaacatgcgtgacttgttgcaggagccattgatggccgaataccagtccgatctgaccgacgcgctggcgcgtctgactcccgcgcagacgttggacgacgaggtgacgacgcaggtgcgggccgcgcgcgacgcgatcccgtacaacgtggcttcgcaggccgcggacgcgacctcagtggtgggcgcgctggcgtcgatggtcatgctggccgcgtccttgtggcatatgcatccgttggcggcactgatgatcgcgttggcgatggtcccggagctgttggcccagttcggcgtggagaagctcacgaacgagttatggcccaagcgcggcagggagtcgcgtcgggcgaactatttcgagcggttgttggattatccaccgtcgagcacggagatcgcggccacggccggttcattcggcatccctgcgcaggcgcgcgtgcgctatttcaatatggccggcatgtgggagcgtatctcgtggcgcacggtgcagttgaccggtgtgagttcgctcgtgttcgccgtgctgacgggcggcgcgttctggctgatcctgacgtccggccatgcgtccgtgtcgagcatcccggccgcgttggtgggcatcatgacgggattgtcggtcacgcgcaccactggcgaggcgttcggcaacctcatggcgtccacgccgatgattcttgcctacgaacggctcatgggcctgctgcgcgcgaaccccgcgatccccgaaacgaccggtccggtcggcgtgcacgtggagcatctgacgtacgcgtatccgactgttgcaaagcatgacgatgacgcggatgacgcgtcggcagcgtcggttccggccgttcagactccggcgttggacgacgtgtcgttggatgtcgaagcgggatcgatcgtcgcactggtgggcgagaacgggtcaggcaagaccacgctcgtcaagctcatcgccggcatcctcgacgccccggacggcaccgtgaccctgccctcgggcgcggacggcgggaacggtcgtaccttggggtcgtgggccgaacggttgggcgcgtcgagcatggtgttccaggatttcacgcacatcgaggtgaccgtgcgcgagttcatcgatcccgctctgcggcaatcggacgatgagttatgtgacgggttgcgtcgcgcccgcgcgctcgacatcgtggatgggcttcccggcggcttggatacgcagctcggtcaggagtggggcggcgttggcctgtccggcgggcaatggcagcggcttgcgctggcccgcacgttcctgtccggcaagccgttgtggatactcgacgagccgaccgccgcggtcgacgccaccgccgaggccgcaatctaccatgatctgatcgccaaccgtccggcgggcaccactgtgatcgtcatcagccaccggccccgcgtgctaaccggcatggaccggattatcgtcctcgaccacggccacgtcaatgaaaccggcacctaccgtcaactggtcgaccgcaacggcaccttcgcccggctcgcacacgacagcctcgaatgagctcgatggcatatccggttgattgttaaaaactcagtggccggccgacagattcgtccgacgaggctcgcgcgagtgatcataacgcgggtcgcgtcggatatgcgggagatggcacgccttatatcaaaagcgatgattttcaaataaggacacggccccatcagccggtcgcgggtactacagtgaaccacaacgttcctcccccgatggtttggggaaacacagaaagaggttggtcgtcggcctgatcatcattgcgattcgcaccggcttcttccgcaagaagctgggtgccagcgagaaccttcaggagtatttcgcctgaatcgggcttgtcgtccatccgcattccgcctcagctactcatatcgataacttactaacaatccattcattgtcttcttaccagtaaaggaaatcgccatgtccaacttcattcccaacaccgtttccgcagaacgcaagcccgtggacatcgtcaccggcacctatgtggactatgccggcgtgacccgtgccaaatccgttcccgtccgcaggcgtgaagccttcgaacgcaacggattgggcgccgccctggtctgggtggtgttcggcgcggacaactcgttcgccgaaaacgagaaattcaacgtgtccggcgatctgcgcctgcaccttgacacttccgcttctgcattgcgtgccatacgagcgtgaagcggcgtttctctgctcggtgcatgccaacgtatacatggatgtcagccttgccaatccgcatatgggagcgcaggtgagggaagtgctgcgcaatgttctggcgtggtgcccatttgacaagttgctctatgcgtcggacggcatcggcatcagtgaattgcattatctggccgcggtgctgttccgcaggtatattgcgcgaatcgccatcgactgggtatcggatggcgcatggaacgcgaatcaggcgaaacgggttatcgacgccatcgctcatgccaatgcggaacggctatacggtttggcgtgaacgggtacttcgccggtgccgtcacttcccgaggaacgccgggatggcctcggccgccgcgtatcccttgcggtacatcatttccaggccctcgaagttcttcttcagggtgttgagaccatacaggtcttcgggtgcgaggatcagcactttgccttccgcttcgtaatgcttggcgagttcgagttcgtcgttgtaggtcttgtagcgtatgcgcagcctctcggctgcggcggggtgggagcgttcgagaatgcgggccggagccagatccttttgctgtttgcgcacttcgctacgcaagcgggaaagaattagaatcacgcgctcataaccatcatccaacgctttctgcaccggcaccggatcggcgatgccgccatcgaaatacggcacaccatccactacatacggctcgcaggccaccggtacggcggacgaagccttgatgatgtcgaaatcatcaaaacgcacgcgcgatttgtcgaaatacttggtcgagccgtcctcggcattgcaggccaccacggtgaatccggtcggattggcctcaaaggcctcgaaatccaacggattctcaccatcgtgattgctcagcgtgccatagatatagtcgagattggcgaagttgcggttcttgaaatagctctccgcgctcgcatactccttgcggaaggcgtatttggtgtagaaggtgtggttgcgtccatgttggcgggcgatgaacgaggtcatattggccgccccggcggacacgccatagcacatgtccacgtcgatgccgtcctccagcatgcggtccataacgccgcagccgaaaatcgcgcggaacccgccgccgacatcaatcattgccgtcttcagtgccatatcagcctcctattcatcatcatgcatccgatcacgcattcagcaggtcgcgtgaaagccgtgtaacacgttcggacagatcggaattggcgagttccacgccgccggtcgcgtcttcgggtgccagtttgcccagggactccagcacaacgcccagatggcgcacggtgccctcattgccgtcgatgacagcagcccgttcgggcagcagctcgcggaagtagtcgcggtagaacacgaaatgcgtgcagcccagcaccactgaatcgatgtgctccatgtcgtactggtcgaagtagccatgcagcgtgcgcatcaccaggtcatggtcgccgagccgcccggattccacaatctccaccaagtcggggcaaggctccttgaaaatcgtgttgttggaatcgaatcgatccatcagtttggcgaacttccgctcacgcaaggtcaggggagtggccgccacaatcaccctctggggaatatgatgcgggtcggaaggcacgtcaccccggtcgcacgccactttcagggccggctccatgccgatgatcggaatatcgtagtgttcgcgcagatcgttcaccgcggcggaagtggcggtgttgcatgcgatgaccacggccttgacaccttgacgcacgaaccgttcgacaatatcgaaactcagggccctcacctgctcaggcgtcttgacgccgtacggggcgttggccgaatcgccaaaatacagcacacgctcggccggcatatccttggcgatttggcgagccacggaaataccgccaagacccgaatcgaatacgccgattggagccgaagagctcatgcctgaatcctccctatagccatgcctgcaaccgtatgttgccgcgaccgatcacaaagccgattgttttgcggtgttgtttcgctccctagagtactctgaaagccatgagtcttccgcaacgagtaaccaagacacacgcaaccggcaatgatttcgtggtgtacctcgacaagtccggcaaattcgagccttccgccgatgaggtccgattcctgtgcgaccgtcacttcggcattggcggtgacggcctgattcgcctgaccaggcctgatttcgtgtctgatttaagcgatgatcagctttcggacgtactggccgggggcgcgaaatggttcatggactatcgcaatgcggatggatcgttggcggagatgtgcggcaacggtacacgcgccatcaccttgttcgctcagcgcgagggcgtggccgactccaccgagccgttccgcctcggcacccgtgccggcgtcaagattctgacgccacgcggcaatatgaggccgtacggaaccaacgtgttccaggtcgaaatgggggagtggaagatcggcgaaaccgacgcctacgaggtcaccatccccggcgctgagggctcggcgcgcggcacgttcgtggatatgggcaacccgcatgtggtcgcggtaatcgaggacgccttcgcgtccctgccggtggtcgaggcgctggatctggtcatcaagcccgtggtgagcccgaccatcgaatccgaccagaacgtggaattcgtgcgggtcgacgacatcgatcagaacaccggcgtgggtgaagccacgatgcgcgtcaacgaacgcggctgcggcgaaaccctgtcctgtggcaccggcctgtgcgccacaggcgttgtgctgcgggccaagaccggcatcagccactgggatatcaccgtacgtggcggcaccctgcgcgtggacgtcaccgacagcgacgtgaaactgaccggagcagccacgctggtcgccgatatcgatttgttgtaaaggaatcaggcagcgaacagggacgcgccttcggtgacgatgatgagtaccacgatcgccacgatccacagtatatcgaccatgaggtcgatgttgaggcggtaatacttattgagtccggccggcaccgccgcgacctcaacctcaccgtcgccatcatcagcagccacagccttacgtgacggcaatccctgcacggccacggtcgcatggctcaacgccatgaactggatggtggtggagaacatcagggtcaggcaccacgggcacagcgcgtgaatcacgaacagcgactgcgtgctcagccagtacgagtaggccaaagcggccagtccgcccagccacgtgcaggtcgcgaaccaacgcggcaccttcacacgagccaaaccgatcaccgcgatggtaatgaacaccgattcggcggcgatgccgaagaacgcgttcggatagctcagcccgccgaacttcacgatttccgcctgccaggactgggccaccgccgaacaggacaccaccgagttcagatcgcagccgagcgcggactccggatgcctagccaactgcaaagtctcggcggacagaatgagcgaggcccctaatgccactgccgaggcgatcagcatgatgagatatgtccaagtgtcactgtggcgccatccaatcaacggtcgcgcctccgccaagccaagcggcgtggtgttcgtggtgctggatgatgtgtcggttgcggtgttacgagtcatcatgcccctttcgatagcgctgcgctccagattagcctctgcggttgtcagctgagtgccgaatgtctggtcttggccgttggcagaaggtgacgacctgtctgcgccttgcgtgggaatgctgagatgaggttacgatggaaggtatgactggatatgtgatgcctttggagccgcccgccgtcgggtgggacatccattgccataccgtcttctcggatggcacggaaacgccggccacattggccgaacaatccaaggcattgggactcaagggcgtggccatttccgatcatgacaccaccgccggctggccggaggccgaagccgcatcccatagggtcggtttgccgttgctccgcggcaccgaaatcaccgccacggatgagaacgtctccgtacacatgctcggctaccagtatgatcccacgaatcagcacatcacggacttgttcgccgatactcgagccgcacggttgcaacgcacgcagcgcatggtcgaattgttgtctcgtgattatccgattacctggcaatccgtgctcgcccaagtcaaggagggtgacaaaaccaccattgggcggcctcacatcgctgatgctttggtgagtgccggcgtatatcggactcgttcggaagcgtttgcgaatgcggtcagcgcctcatccaaatactatattcccacgccctcgccgacctctcatgaagtggtggccgccgtcaaaggggcaggcggtgtgattctgatcgcccatgccggtgatgtgagccgtaaccgcagactgctgtccgatgaccagatcgaagcgttgatcagcgagggattggacgggctggaggtatggcaccgaggcaattcaccggagcaacgagaacggctgctcaccatctgccgccggcaccagctactggtcaccggcggatctgactggcatggcaaaggcaaaccgaacaaactgggggagaacctcaccgacgaggccactgtcgaagagatcgttcatcgcggcgtgctcccgttatatcggtgattcgcggcaatacaaagcggccttgagatgatgcccaaggccgcttatgcgcgattcacggtcacagcgtgccgaaaccgacggcgtgcttggtttcggagccgatgatcgcgtaaccgagtgccttggcgggcacgatgatgcgacggcccttgtcatcggtcatatcgatcgtcgcgttgtcggccacggcctgcgcgatggcctggctcacattatcggctgattcgtcggtgctgaagttcaccggtcgtgccacgttctgaatgcccagttcgatatccatataaagctccttgttctgccgtctttgtgacgaacatcatggtaagtggccgtcaccggccgaggttctgtactctattgtgccgcgtgtctgcgtcgtcatgtgcggtgttacgcgctcggcgtggcgcggaacaccgcacacgacattatttggatgatgtggatgattcggccagcggattgccctcgctgtcatacccgtccaacccggcacgggcatcgcgcagagcgcgttcttcccgctccaacagcggaatcaccgtggtttgggcactcgaggctccgtgctgaacgaaactgtccggagtatcgtcattcaccgcatcgtcggtcggggcggcggattgagatgcaggggaagcgtcggttgacgtcgtgccgctatgcccgttcatactgaggagctccttcagcgtgatcgtcaccgaagaatgggaagcgccatgtgagggctgcggtttggtcgatcccgtaccggttgcggtgccggagacactcgcttgcgggtgattggcggtccggtcagcatcgggttcgacttccggggtaagatccacgtcgccagcggccacgatgtcagcggaaccggtgcgatctggatcgggcgtgtcgtccgagacctcggccgccgcggtaccggtttcggactgctgcggttgtgcgggtacctgcgtggcgggtgcctgatgacggtcgtcctgcaacaatgtgccgacggtgattgtggagggggaaccgggctccgtcgacgaggcggcggccgaccctgcggctggggccgatgccggagtgtgcttgatcacgcccaactggtgtgcgagtcgttcgacctgtgccttgaactgcatgatgcgattgttgtccgcacggttcaacgcctgaatgaattcgcccacctgttccatctgcaaccacaggttggccctgagcatgatgagatcgtcaagtcgagagcccatcatgcggccgtatgcggaaagcacggcgttgcgatgggattcgtcgagcttgccgaaaatccaggcaaggtctcgtgccggatcgttgacctgcatatcctgccagttggtcaccgtggtgatggtggaaccggagaacaggaagtcgccgtcggagaatccgccgtgaaccgtgcaggtggagaacgaccacaatccctcggtgtccatgatgcgcgcccagctgtcggtgatttcttggggaacatggccggcggagcgtaagcggcgaatccagacggtcagctgcgaacgaatctgaccggtggtaactaccggatatttggcattggacagaaaagtcgaaggcaggcgatgaatggctccgatggcggtgccgacggccgcgcagtcatccaatgtcaacaggtcgagaggacgtgcctgaccatcacggtggacggcgatcatcacggtcgtctcgcctgtgggaccgggcttgcgcggggtcagcggtgtggactccgcctgggcctgctgccccacggcctgtgcggtggccgtctggccgggttgggaaacgtctcccgggacgaatgcgaccacacggtccatatcgaagccgaggccaccaagctcgcgcgcggctgccagtgtctgcgccgctttcacacggcggatcagacgtgtacgcccttccttgctgtcagtggcgtatacgtcgtacaacttgcccgaggcatcttggatcacggtctgatcgatgcctttggcctcgtcggttgcgctggcctgcacgttctcgcgtacgccggccacccccagattcggcaggacggctgaggcgagtgccgccaacatataatcgctacgtttcatcacccttccacactaatacatccgtggcgattcgcaccgcagaatgacacgcaaaacgcatgattctggcgatgttttgtcgtgagcccgattcagccataggcgtgagtcgtgccgtgagcgcgaatcgtgccacaatggacgcatggaacaggcgcaggggattcttgaggggctcgatgagcggcagcgtaccgccgcgactacgttgcaagggccggtgcgcatcatcgccggcgcaggtgccggtaaaacccgcacggtcacacggcggatcgcctatgcctgcgccaccggggcatggaagccggagcgggtgcttgccgtcaccttttcggtaaaagcggcggcggaaatgcgcgcacggttgggccagctcggcgtaggggaaggtgccggacgttccggttcgggtgcgggaactgccggagtcacggccgcgaccttccactcagcggcattgcatcagctcaacagcgtctgggcggacatatgcgaggctccattcccgcatgtgatcgaagatcagcgtgacgtcgtctcccgcgcgatcatccgcgccaccgcacgtaccgatgccgatccgctgaccgttcgcgatgtgctcgccgaaatcaattgggccaaaatctcgttggtggcggtggaagattatgcacggacctgtgccatcgcccataggcaaccgcccgccggactcgacaccgctcggttcgccgacgtctacagcgcctacgagcaggaaaagacctcgcgtggcgaaatcgattttgacgatattctgctgctcgtatgccatatcatggatgattttcccgaagccgccgcccaaattcgttccaccatcggctggctcaccgtcgacgagtatcaggacgtctcgcccctgcaacacaggctgctgaccctgtggctgggcgggggagggcctgacggcaagagcgcgatgaaccgcaacgtatgcgtcgtgggcgatccggcccagaccatctactcgtttgccggtgcctccagctgggatctgctgcgtttcgccgatgaattcgggccgctcgccgccgatgtcaatctcaacaccgactatcgttcgacgccggaagtcgtgaatctcgccaaccgggtgcttgcggccgcgccgaaccgtgaggattacctgaaactggtttccgcccgcgaatccggcccgcgcgttacccgaaccgcttatgagagcgatatggaagaggcgcagggcgtggcggcacgcatcgcccggttggttgccaacggggccaagccgtccgattgcgcgattctcacccgcatcaacgcccaacagccggtattcggtgccactttgcgcgctgcaagactgaaataccgcgttcgtaaggattcgggatggcaatcatccgcgctcgccgacgatgccgcgtccaaacgtgcgctattggaggcgatgggtttggacgccaccggacttgccgcaaacgacgatcccggcgttacgatttccacgattcacgcatccaagggtctggaattcaagcacgtgtttctgatcggctgttcggaagggctcttgccgtacggttcgccggaaacgggggatgcgctggaagaggaacgccggcttatgtatgtgggcatcacccgagctgaggattcgctgcatttgtcgtatgcgcggaccaaggatggttatggagcgcaacacagacgcccatcacgatttttgtgacgggcgccggtaatgaatgtgaatgttcctgaacgttcaggaacgggaattggctgaaggacggttgactatgcctgcgtatcctccgagttgccgttgccgccatcttctccgtcttcgccgagaagcttggacagttcggcatcccaatcgatatcgccggtcttgccatctgcggcagggtgggaggcggaaccgttggcatcggaagaggagcctgaaggggcgtcggatgacggagacgcgccatctgcgggcttgtcgctaggcagcggaggcagcagatcgggatgcgaccacttggcgtcacggccttcagggccttcggcggcggtgatcatctcccacaatccggcggcctcgcgcatgcgcttggggcgcagctgcaaaccgagcagactttcgaacgtacgctcggcggggccacccatcgcgcgctcgcggcgcatcatctcacgcaactgttcgatatgaggcagatgggccataccggcgcgccacaccacgcaatccacccagccctcgaccatcgccagcagcgattccagcgaagccagcgcctcgcgctgttcgggagtgtcggggatgccgaccttggtgagattcaccgcgccggaaatcgactccggatccatcgacgtggcgtcacgcagctgttcctccatcgcatccagatcgatggagatgccgcgtgcgtacttgccgatgagcgcctcgaaacgcggcatcagccacggtaccgaggcatacaggcgggcgtgagccatttcctgcagggccaggaaggaaagcacttcagattcgggaattttctcggtggtctcgaatccggagagcgcagcctcgaacgcggcggcgtcggcggaagcatcggagccggagacttgggcggtaccgtcagttgccggagtatcgctgttgccggccgaagtgaagccaatgggattggcggaagcgtcggtggatgtggagaacggattgaccgagtcggttgaagtgccggccgtatcggcctcgggcgcaggagtctcaccgttcagcatcttcgcgtattcggtggcgttctgggcaatcagtccaccagccggattcttcagcaatgcgatgccctgatcgaaactgccatgcacttcatggctcagattgccggccgcatgccccaactgcatggcaaaggacgtgttgcccagcagcttcatcagctgggctggatctttcatgccgtcgggaatcggaatcggcaccggtccggcgaacatgccggcaatctcgccatcgccgaacgcgccgccaagacgctccgaaatcaccgaagccaaagcgtcgttcatcgactcggccaccggagctgcgaacttcgcccactggtcgatggtgccttccacccagccggcgcgggtcagcacatccggatcgccgggcgcgggattgaactcgcaggcggtatccagccacaggttcgcctcactcatcgcgcggcgagccgcctcgccatccacggcggacacgctggacgcggaaccggaggcgttggcctgctgcaaggcaatcgacttggcgagcttgacgttgatcggcccttcctcgacagtgcgctgcatatcgcccatcgtgttgagtccgccggcgctgaacgcggccatcatctgctggacttcggatggattgggcagtcggctggggtcctgactcatcagctgttcacggatctcctcaggcaactggctgatctgctgccaggccatctcgccctgaatggggccgaagcatttgatcagccactcgtgaatcgcgttgtcgtccatgcgtatccttctttgccgcggtgtgttaccccaagtgtagggtctgcccgggcctgttcgctcgtggccgagcaatattttcggtttatgttcgttttcggctgatttcggccctccgcttacactgtagggtatgtttgcacgccacaggaatcaggaaccagacttcgtccaggagcagaagagcccgactgcggattcggaagcgggggatgggcgcatgccatcgttcgaagtgaagcatgattcgcgcctatctcgtggaatcagccgtgctcgggcctatgcggccgctcgtccgaaacgccatttcgtcggtgcattcgccgtgttgcttggtgtggtgattctgctgctgcccagcccgtacgtcatcgagatgcccggacccacccaagacgtgctgggcaaggtcgaggatggtgcggttatcgacatcaccggtaccggcgtgacgacgtataaggattccggcaagctgctgctgaccacggtgaacgcgtccggcgtgcccgggtacccgatcatcaacgcgcaggccgtctggggttgggccaatccgcaggtggaggtcatgccgcgtgaggccacggtaccggtgggccagagtgcggaccagtatcagaagaaagtcgaacaagacatggccggttcccaggattcggccagtgccgtcggtctggcgcatgccaaagcccatgcggacgaactgggcattgacgccagtgcattgcaacacgccaaggtgacgatgcacgtggacagcatcggcggaccgtccgcaggcatgatgtacacgctcggtctcatcgacaaactcacccccgccaacgagagcggcggcaagaccatcgccggcaccggcaccatagacaaggacggcaaagtcggcagaatcggcggcatagagctgaagatgcttggcgccaagcgcgatggcgccacatggttcctggctcccgcatcgaattgttcggatgtggccggccgcgtgccggatggtctgcgcgacgtcaaggtcgccacgctggacgaggcgtatcaggcgttggtggccattggcaaggggcaggccgacgatttgcctcattgcgaggcatgacacgcgcggccagtcgttgtttctggtgagacgactcgcatgggtctgcccacaatgcggcgattttcggccgcgttaacgcatttgttcgcgaagacttgctaatgtgtcccctgtgaatcaaacggcatcacagaacgctgaagaatttggtttcgagcccggcgatatcgttcaggagtggctctgggacgacgatgtggacgattccattcgtgcccagattgaagagctcacgggcgaggatctcgtggacgaggactacgactccgctgtggacggcgtcatcgtatggtggcgcgacggcgatgatgaggacgaattgtccgatacgatcgttgacgcctacgcggtactgggcaatgacggcccgctgtggatactgactcccaagcccggccgtccgggtgccgccagctcctccaccgtgcagtccgccgcacagaccgccggtatgaacgccgccaccccgctgaccgtcagctcggactggaacggcattcgcctgcgcgcattcggcaggggccgctgataagcctcaatcaatacgcttgactttaagcgtgttgactggcgtcgcgtgctgcgtagtgctgctgggcgtgactgaatgtcatcgcgattgagcgctacggcacgcgtatgcgacaccacgtgtcgcgcagtgccggccatacgctattgttgtcatttgcgggcaattagctcagttggttagagcgccacctttacacggtggatgtcgggggttcgagtcccttattgcccacttcatgggacccttgagattccaacgaatcaaacaccccgaacatgcacggcatccacatgtgcccacattttgcccacatcctgcgaagcgacctgcaccgcagcgtcgatggtgcgcgccacatcatccaaatcggaatcgaacagatccgcatagacgtccagcgtcatggccgccgacttgtgtccaagcatccgctgcaaagccttgatgttcgcgccggcatgcaccgcgatggaagcggccgtatgccgcaggtcatgaggtggcaacggctccacgccagccctcctgcacgcgcttatgaaccacgtgcggttcgatttcgcccccgcagccgactggttacgcggaggacggccaagatggtcgcggaaaacccaatcgaacgcccccttgccggccagcacgggaagcagcgcctcgccgactatggatggcattggcacgtcgcgcatctcatgcgacttcggcgaggtctccgaccattcgctaccgattcgcgtgatgttgcgtcgcacgtggattcggcggcgtccatagtcaacgtcctccaccctcaagccgcacatctcaccccagcgcaggccgcataggccgagcaggaggactagcgccttgcggtcctctggctggatgcgtgccttgcctgcctcgtcagcgacggcgagcaattggtcgatggtcagataccggtgcagtctcctgccctcgcgcctaggcaatgccagatcgtcggtcggagccttggcgatgagcctgtttttgacggcgagatcgcagacgcccttgagcacgccgacgatcttgagtaccgtgctcggcgccaatgtctcggccttgctgctgacaaaagcctggagctcgcgctgcgtgatggagccgatttgtcggtcggcgtattcaggagcgatgtgattgcgccaggtgacgtcatccgtatgcagcgtattggccttgaggatcggtttgcgcgtgtcagtccattcggcgtagagatccgatatgagggtgcgtccggctgattggtcgacaaagctgccgtcccttttggcggcattgacataccggtcgccccatgcgtcggcgtccatcttgcggcggaagccgcgtttgccggtcgcgctgccgtccggcttgcggtagcgcacctcgtaccttttcccggctttggtggcgtattggcggatggtgtaggccatgctggtctcctttgctgacatggccgattatatgaaggaccccgacctcatgatgctcgggacacttgggtgccccaagcattatattgaaacagtgtctatcaacacttttcagggctcaggttctgatttaccgccttggcttgctgtaacaagtcaagacttataagacaatataaaagccccacagattgtggggcttaatgcttttagaggctgttcacggcattgtagaattcctgcgcgtcctcggctttcttgaatttcagcggcagtgagcgcaacgcactgtatttccatgtgaccgtgcgcttcttcaacaccacgccctgcaggtcgctcacctggtatgcttcggtcttcttataccggtgcaggtacgtcgtgcagacatccaattccagacgattggcatacaggcggatacccataaacagcgggtcgtcaagcctttcgcacgtgtagatcgcgcccggcgcgggctgtggtctcttcgccatgattgttctccttcgctttccattgattctatgcttcagataatgctgacacgctcggccatgacttggcggtagtcttcgaggacttgtgtcgttatgtcgagttcgtccgcgatctgccagtcgtactcgtacatgcgttctagcagtgcgagttcgaccgaatcgaccaataggagcgctgtctgcgtgcgacagcggcgttcctgcttcgaacgatcgttcgcacaaccatcgtcaccgtgcttccaatgcagcagctcgtgcacgagcgtgcaccgtttggccgtgtacatgagcctgcggtcaatcagtatcacctcggtcgcgtcgtcgtagcagccccatagtccgtccggcaggatggcgctggacacggttacgggcaggccgatgatcgcgcggcgcatggccccgtatgtcatgcgccggtctatcggcaggtcaggcaggctcgtcgtaatccggcccagcctctccattgatggcctcacgcttgccagcggcgttataggcggcaagaccgtaaccgcctgcctgcgctttcctctcggcggcttcgaccgcatggcgtttggagtccatcacgatgtctccgatggatacgccggtcacttcgctgatgcgttctaggtcactcaggttgagcgggcgtgtgaagttctgccgtttgtaccagtagtcctcaccgaagccgcacgccttggcgaattccttgacggtcataccgctttttcgttggagcctgacgcactctcgcatgacttgtttcgcgaatgtggtcacttcgtttgctttcatacccatgcttccattatagccaattacgtagctgttgtgtacaaattgtaaagaactatgcaaattcatagaactaaactacgaatttacgtagagtaaaaaccgttgaaaggaaaaacgagatgttgagcacaaagaagaccaaggcctccgaccgctactcgtgcggccacatgcacggccccggctggcacgactggcgcgcatgcctcaccaaacagggaatcgaggaggatgaatggccggtctgacagaaacagccaccagaaacctcaaagcggaactcgccagacaaggcaaaacaacgaaagacctagcaaaagcatggggcctcgaaatcagggccgtaaacaaccgactcaaaggccgcacgccactatcgaccgacgagatcgaaaaagcagccggactactaggcctcgaaccagaaaacctgacgatgctcctcattcaacccctcgacagcatcaccaaattccacgtctgacaccaaaaaggaaccacaatgacagaccacaccgactacgagacgcgacgagccatcgtcaacgccatcatcaacgaaacaaaagaccacggcgacgccatccgaccactcaactgcgaacgatgggacgacatcaccatagatgaatacgagccgcactgccccgtcatcaccggtgaaatcgtcatcgacctctacgacctcgcggacctcatcctcgacaccatcggcagggaaccctccgaccggggaccggtcggagccgactctcacgtctccgaaccgctagaactccacacggacgaaaccggcatcatcaccgataaccacatggcctggttctcctcctcgtcgccatacacgccaacaaacacggaaaacaaccaatgaacacgacaccgaacccgcccagaccaccgatcatcatcccctacggcgacaccccatacgccctgcaactcaccaacgacggcggcacaaaacttatacaactcaacgccaccggccacaccacgctcgccacactcaaaccatcgcaggcggaaacgttcgcctaccacctccaagacgccataggagcaaccagataaacaacgctgacggagccatcgcgaccctgctcagaacagccatcaaccaccggctcgacggaaacacgaaggcataccaccgaaccctcaacacgatacgcctcgccatcgaagccaacatccccaaaccagaacagataccacccgaggacaccaaatgaacaggaaaacccgcaaaccgaactacacgctccgccgcatcaagacgctaatcgccatcatcgcctgcaccgcatcgacgaccctgctggtcacgtggcggacggcggactcgcagaccgccaccatcctcgccggcatcatctacctgctgaccggcctatggctgaccgtacggttcgccccacgcgaataagactccccatccactcgtcaggacggggcacacaacttgcaacaagcaaagggaaacaatgagcacgatacgctacatcagcctgttcagcggcatcgaagcggcgacagtggcctggcagccactcggatgggagccaatcgcatacgccgaaatcgaaccgttccccaaagcggtactcaaacaccattatccaaacgttccggacctgggagacgtgaccaaagttgactggaaacaataccaccatgcaacagatgtcgttgtgggaggaagcccctgccaggcattcagcgtcgccggactcaggaaggctttggacgatccacgcggccagctcatgctcgaatatctccgagcttgcgcagagattgatccggaatggatcgtctgggagaacgtgcccggagtactgtcggctgaacacgggcgggctttccagtcgctccttgaagccgtggccgaactctggcctgatgggggggcggcatggagagtgctggacgctcagttcttcggtgtggcccaacgacgcgagcgtgtgttccttgtcgtcaacactagagactggcgacgtgccgccccggtactttttgagcgcgaaagcctgtgctgggatcatcagtcgagccgagagaagaggaaaagccttgccggaggaactgctggcggcgttggaaacgcagattcaggcatcggaaacttgacccacgatgagaacggtgggcgggatcagtcggctgtcatgctggacttccaccagcaggatggaaggttcagggtcagtgaacatccggacctgtcaaacattctcacctctcacatgggaaccggtgggaacaacgtcccacttgtgaaagcgttcaaatggaatcaaggggaacgctcgcgaagcctggcgatcggcgatgtgagtccgacattgagcaccgaccataatccagccgtctacgaggtggcaggaaacatcatcggtcgtggacaaatgaacggcggacatcagcttggtgttgccgacccggacgaaaacggcgctttcacattgacttccaccgatagacatgcggtggctgaaatcgagagagaggtgatgtgccgggcggacagccaggcgaacgcggcgcggtgctttgatcttgcgccgacactgatggcgcatgcggggaaagacgccccattcatctatccgacagccgatgggagaggctaatggcccttaccttcaaaatacgcggagggaaagcagggggggggtaagggattcctgggacaggaagagctttccgccacgctcagcacgcacaacgaccagtacttatacatggaggattcaatgaaaggtttaacggttcgcaggctcaccccgttggaatgcgaacgactccagggattcccggacgggtggacggacgttccgtggcgcggtaaggatcatgcgccggacagtccacgctacaagtcgttggggaattcaatggccgttccggtcatgagatggatcggtgaaggaattcaactcgtcgaagacaacaaggaacttttcaagaaggaaaccacatcatgaacgaaaacaaaccacaggcggcaacatgggcgctcggcctcggcatcgacaaccgacccagtgttcatcgccgcactcgacatgccgctggacgcattcaaaggcggcctgatcggcgtcaccctggccgccaacatggacgaggccaccgcgctcgccgccagaatcgcttgccagtccatcgacaaggcgctcagacgtcacctcgaacgcggaggcgacagcgacactccggaaatgctcaccggcatccacatcggcccgatgggcgacattcgggacgcccggccatgaccgacctgctcacgccaccgaaggcatgacgccagaacaaattcttcccatgcgcttagtgcgattggcgtatgggacttcgggtggaacggcacgacaggaaccgtccaccggcatcgtacgggcttttgaaaccattcccccatacgaagccggaagcttaagggcaccgaacacggttccgaccggcgggttcgactcccgcaccacccacgcaaaccatcaacagatcggagaacaccatggaaaacaacaacccagcacgtctcggcaaaggccagacgtacttcatcgaccgatactgcccgcccgacgaccatgagtgacgatctgctcacgccctccgaattggccgtcatgctcggcatgagcgcacgcacccttgccaactggcggtctaacggcaagggcccgccatatttgaagatcggcgtggaaccgcccgaaggccatcaggacaggcgcaaagtcagataccagcgtcaaaccgcggaacggtgggctttggcgcacaagtaccagaggacggcggcgagataagaaacgacatgttcgttccagcgacacggattaaaagcagtccagacgtcaaaaacgacgggaaagcacgcttcgacaccggcaagccgaccctcacgcagcagggaatcgacgtggacaagctaatccgcgacaaccacgagttcatcgaaaacgtaaggaaaggaacacgttgaaacacgaatacacggacggcgaactcgccgaactgaaaagcatttacgacgagtcaggcaaagcgggattaagccgtgacgaaatgcgagccatgcgcaaagccggactcgtcgcacaaaccacccaaaacacagtaaaggaaccagacaccatgaccgccaccactactccagtccaagaacagaagcccacgactccggagaacccacgcgccgtcatcgtgaacgcgctggtcggcatctacgactccatctcggcattgcagcgtgccgcataccatgccaacgacaaggtggtctacatgttcgccaccaagctgctgggaggcgaattgatggacatcaaggccaactacagcaaggatgcggcgagatgaggctcaagttcaacagcaaggatggcgttttcgcaatcaaagccgaaaacgaagaggaaaaaacccagctcaaaacgtcggcggtcgccatctgcaatctcatcatcgattttttcgatggtgaaatcctggacgagaaagtgacgaaggaatgaggcgtatcccactcaagga

SEQ ID NO: 3171 - DNA, 13892 bp, Unknown
  R53_2m  MAG No. k141_1535
gaccgtggaccctgaacagttccactccaaggctcgtaacaccccgttcggcggctggcaggtcaccggacgccccctcgccacgatcatcggctcccagctgatgttcagccgtctgtagataacataaggagcagcatggatcgcctgatcgaagcgattgacaacactcagaaccccagcgtcgtgggcctcgaccccaccgaggcgttggtaccgccgcaggtcgtggcgagctttgccgacgaggtgcgtgactcggtcgaatccccggaggaaatcgaatccgcgcagctggccgtcgcctacttcgaatacaaccgcacgatcatcgacgccatcgccgacatcgtgcccgccgtcaaaccgcagatcgccatgtacgaggcgctcggccccgccggcgtggacatctacacgatgacctgcgaatacgcggcccagcagggcctctacgtgctcggcgacatcaaacgcggcgacatcggctccactgcagccgcctacgcccaccacctgaacggcgtgggcgacttcgacccgtggcatgaggatgcggtgaccgtcaacccgtatctcggcaccgacggcatcaccccgttcgtcgaggccgccgccgaagccgacaaggacatcttcgtgctcgtgcgcacctccaacccgtcctccagcgaactgcagatgctcgacctggccgacggcacgaaggtctacgagcatgtggccgatctcgtggaaggctggggcgccgagaccatcggcagccacggctactcccgcgtgggcgcggtggtcggtgccacccaccccgaggaaggcaaggcgttgcgtgaacgtatgccgcacacgttcttcctcgtgccgggctacggtgcgcagggcggcacggccgcggacgtggcaggcatgttcgacaagcagggcagcggcgccatcgtcaactcgtcgcgcggcatcatcggcgcatggaagaagagcggcaagtactccgaatccatgaccgccgacgaggcgctggaccttgtggcgagcagcgcgcgccaggcggcgctcgacatgcgcgataatctgcgggttgccgtatataggtaggtagattgtccggctgtgggctatacgtgagtgtgggctggaaaccggagccgagtgtgtttaactacccctcagtcaacctgcggttgacagctcccctgatagggggagcttgatgtgctgaataggaatgaaatgacaactttcacccccacccatgatgtggttgcggaggcgactgcggccggattcttcccgccgcgccacaacgtcgaaatcacgcaggttacggaactgaccgaccgcgtgatgcgactgacgttccacgacccgttcatcgcctcccacgccaagcccgcccagttcgtcaacctgttcacgcacgacgacttcatgctcatgccgcgtccgttcggcgtcagcgaagtcgacggcgacgaagtcagcgtgatcttcgccgtcgtgggccacggcaccgaacagttggcagggctgcaggccggcgacaccgtcgacgtgctcggcccgctcggccgcggcttcaacctcaaggaagacgccaactacattctcgtcggcggcggactcggcgtgcccccgctaatctacgccgcgcaaaagctcgccgaacacgacgcctcctttgccaccgccgtattcggctaccgcaacgaccacttcgctgaggaatacgtctcccggtacgcggactggtcgtggagcatcgacgacgccgaaggcaacgtggtcgacctgctcaacaaactcgaacaaggcgacgacctgaaggcctacgatcgcaagccgatcatcttgtcctgcggaccgctgcctatgatgaaggccgtggccgtttgggccgccgaacgcggcatccccgcgcagctgagcatggaacagcgcatgggctgcggctacggcacctgcgtgctgtgcaccatcgacaccgtggacggccggctcaaggtctgctccgacggacccgtgttcactcgcgaacagctcggatggggggagtgacgatgagcgcaaacaaccagtccgcgcagggcagcgacaaccacatcaacctgtacgagccccacgtgtggaagcaccacaccaaggtggccggtctggaatggaagaacccggtcggcaccgcctccggcaccttccagtacgccgccgtccgctggttctacgacgtcagccagctcggcgccgtatgcaccaagggcgcctcgcccgtgccgtgggagggcaacccctcgccgcgcaccgccgaatcgccggccgcgaacatcaacgctgtgggcctgcagaaccccggcatcgaccattacttggccgaagacctgcccaagctcaaggccgcgggcgcgttcgtcatctccaatgtcgccggacattgcgatgacgattacgcggcggtcgtggaaaagctcgccggctccgacgcggacatgctggaaatcaacgtcagctgcccgaacgtttccgccggcggcatgagcgtgggcaccgacccggtggccctcgccaatcttatggaccggctgcgcccgatgaccgacaagccgatgatcgtcaaactcacgccgaacgtcaccgacatcaccgtgccggcgcgcgcggccgtggaacacggcgccgacgcgttgagcatgatcaacacgctcaaaggcatgcgcatcaacattcgcaccggccagccgatcatcgccaacgtcaccggcggcgtatccggcccggccgtgctgccggtcggcctggcagccgtctatcgggtgcgcaccgcattgccggagattccgatcatcggactcggcggcatcgacagtggtgagaaggcgctcgaatacctgtacgccggcgcgaacgccgtcgaagtgggtgcggccgcgctcttcgacccggtggccccgctgcgcgtcgcccgcgaacttgacgacctgctggacagccgtcccgaactcgctgctaaactggccgcaggacagacttggaggtaaggaacatcatggcagaaacactcgcacatcgcttcactgaattcctgttggaatccgacgcgctgaagttcggcgacttcacgctgaagtccggccgcaagagcccgtacttcatcaacgccggcgccttcgacgacggcaagaagatcgccgcgctcggcacgttctacgccgaaaagattagccaggccatcgtgcacaacacgattccccgcaacatcgacaccgtgttcggccccgcctacaagggcattccgctggccgtgtccaccgcgatcgcgctgaacgccggccacaacatgaccgttggatacaccttcgaccgcaaggagaagaaggaccacggcgacggcggctggatggtcggcaccccgctgaccgacggcatgaaggtgctgctcgtggacgacgtgatgaccgccggcaccgccgtgcgcgaagtcatccccaaactcaaggccgaggcgaatgtcgaggtcgtgggtctcgtgctctccgtggaccgcatggagaagaccaaggactccgacctgtccgccgtgaaggccgtggaagccgaattcggcttcccggtgctctccatcgccaacgtgcgcgagatcttcgacgccgccgccaagatgaagaactccgacggcaccccgttgctcagccacgatatccagcagcgcgccgccgcctaccttgaggaatacggcgcctgatcgtcttcaacctaaaaccaaaagcgggcttgcgagcccgctttttttattacgttccatgaacagcagcaccatattaaggcaaaagctttggcaaggagcgtgctatgaactggttagttggtatagggctgtttgcgctcgtggggatatgcagttacttcggcatcgagcatcatctggacagcaaagcgaacaagttgtcgcaaggtaatgaagaagaccgccgagatgctgccgaattacgtgatatcgccgccaaaatcgatcacggtaagtattacccgatgctgtaacgggcaatctgggcctaaattgatgctatctccgtttcgaggggctgatgtcgtggtttccagagatctacttccgtttcgaggggctgatgcccaagtagaagcagcatgaaaatggcggaatgacgttggggtgatgccgctcatactcgggatatgacggatgaacagccccttgaaacggagatagatgtctccagaaggccaaatcagccccttgaaggcgagatagggttttaaactctgggaccgactcgcctgtgatgaaaacccgctcggcgtagaattaccgtaggttcgttacattcgaacaaggaaggccgccatggggaacatcaccgacgatatccggcaacatttcgacaccttcgccgcactgccgttcaccgaggcggacagtctcgccctgtcccagctggcctacgcgcgcatgccggataacgtgccgcgctatcacgaggattcggcggacgtcagcggcatgattcccacggtctccatccgcgacctgctacgcgccgaatgctatgacgccatgttcggcaaggtgtggtcgccgcagatgaacgtcgatctgctgcgtgcgatgggggagagcccgcgctggcgcgacctgcgcgtcggcgaatacgtggatgaattcgacgccgaaaccaccaaacagttctcggcctgcgtcttcgaactgggcgacggcacgctgtacgtggctttccgtggcaccgacagttcgatcgtcgggtggaaggaggatttcacgatggccttccgccgtccggtcgcctcgcaggaggccgctgtgcggtatgtgactgatattgccggccgctgggccgggccgattatggtcggcggccattccaaaggcggcaatctggcggtatacgcggcggccaatgtgcccggcgaaattcagggacgtatcacggccgtgtattcgcacgatggtccaggcttcgatgaggcgttcttcgatgaggatgggtacgcgcgcattgcgccgaaaatccataaatcggtaccgggatcgtcgatcatcggcatgctgtttgagacccgcgagcatgtggaagacggctatacggtggtcagcagcgacggtgccagcatcatgcagcattttgccctgcactggcaggtcgatcatggccgattcgtacaggccgatgggctcgccaacagtgcgcagtatctggcgcgcacgatcaacggatggatggcgaaatacgatgatgagcatcgccgcaggttcatcgaaaacctgttcgccatcttcgaggccggcgggtacgtcacgttcggcgaactcacgtcgcacgtgacgcagtcgttgccggtaatgcgcgccgcggcccgcagcattgatgttgaagaccgtgacgtgatgattgaggtgcttaagggatttgccgcgacagccgccacgtcggtaatctcggccaagtagccggaggccatcaaactggttttgccagtcagtctcaatagcgcaagagctggcccctgagatactcaggggccagctcttgcttccatttccccagcggggttggcttaatcgcagtatatctcactgctgaccatgcctgttttacttactcctaatcgatgagcttgtagccgtggtcggcgactacggacttgagtttgtcgagataggtttcggcggccttggagagcttggaacgctcgttcgtgatccagccgaccaacatcgtttcgtcggtgtcgagcggcacggtgacgatcttctcattgttgaggtcgccgttgtcgatgccggtgcacaccgtgtagccgttgaggccgatgatgaagttcagaatcgtggcgcggtcggtcacgttgatctgcttgggggagtattccggccagaccgcctcctcatagaagtagaacgagccttcctcgccctgttcgtactggatgaacggatagggcttcagatcctccatggtgatgatcttcttggcggccaatgggttgtcccgtgagatgaacacgtgcaggggggcgcggaagagcggatggaattcaaggtgtttctcgcgcaggagtttgccgatcacgtccttattgaaatcggacaggtagatgatgccgatctcggactgcatgttcgccacctggttgatgatgtcacgtgtacgggtctcacggatcgtgaactcgtattcgtcggacttgatggagttgatcatctccacgaaagcctcgacggcgaacatgtagtgctgggtggagacctggcacagctgcttgcgcggcttggcatgcttgtaacgctcttcgagcaggtcggcctggtcgagaacctggcgggcgtaggtcaggaattccgcgccgtccacggtcagggcgatgccctgcgaggagcgggtgaagatctcgatgcccagctcgttctccaattccttgaccgacgagctcagggccggctgggagacgtacagggcatgggaggcctcgttcatcgagccgcactcgacgatcttgacgatgtatttcagctgcagcagtgtcataaagtctatttatatcgctagggatggtcgccacacgggtttataacctcatcaatccactatggcgacacaatatgagatgcctcgcatatcgcggacgctgtgtaacgggatatgcgccacattggtaacctgaggcaggaccagtacgatgccatccagaccttctccttctccagcatcgaccgcttctccacgccgagcctgatgaccaggctcggcgccgacgtgatgaacatccagaacgccttcatgatgattctgcgcatggtgccgcgtgccgcgtcgttgaagtgctcaccgaacagtgcgacatgccggtcgccaaacggccggtcaccgtcgtcaaggacgggtccatagacttcaactgccgcgacgcaatatttggcgacttacaggcgtacgccgagttcggcgagcgattcgcgcgcctgcgacgcgttctcgaagaggatgctgtggatgccgacctcgttggcgccgacgatgttcttggcggtgtcgtcgaagaacacgcagcgctcggccgtgagaccgaagcgggtcaggaccagctcgtagatgtcggcgttcggcttgtgcatcttctccacgccggagaccacggtgccctgcagcagctgttcgaggcgcgggtacttctcgaaggccaggtggaaggtctcatgcgaccagttggtcagaccccatacgccgtagccgtgggccttcaaatccgccagcagttcgaccatgcccggcagcgtgcggggcagcgcgtccgcgtagtggccgatgtagaacttgaagatgtcggcgagttcctggccttgttcgcgtaccacatccgggtagatgtccgcgaaatcctcgccggcgtccatgcggtcctcgtagtggaagaagccgcaggggtcgtcgtcggcgcagatgcgttccacgatttcatcggggaatcggccttcaaggcatgcgcgggtgttccagtccagcagcacgccgcagaagtcgaaaatcacgtcggtgatgggggagttggccatgatggttccttgtgtgtttgggtcgttgggtggggtctgcgatttagtgtacggggtttgtgtataggtcggggtatgtggagtttgaggcttatgtttctctccctccgtcttggttttgccgagacacctccctcgtcagagggaggtcaacaaggttatgcgatgacgtcggcgatggcttcggggatggcgtggaccacgtcgccggccacgatcgggtggccgagcgtcatgaagcgctggcgatgctcgcggccgatcagttccggctcctgccagccctgctgctcggattcggaggcgatcgccgccgccaggccatgcaggtatgcggccgaggccacggtctcggccgtggtggccacgtcatcctgctgggcgagtagggcgccggtcagaccggccagtacgtcgcccgcgccggcggtgcccagccaggccggcgcactgcccgacgcatagacatggtcctcatccaccacgatggtcaccgcgcccttcagcaatacggtggcaccggtgagctcgtgggcgcgcttcgcgctggccaacgggttcagccgcacgtcgtcggcggtgtacggctcgtgcgaatcggcatgctccgcggtgctggcggtggtttcgaaccggttgagcagtttcgccatttcgccggcatgtggtgtgatcactacctggccgggcacacgctccggcagcaggtcaagtgcgccggcatccaccacgattggcggcatgtcgtaggcgtccttgttctcatcctcgctgccgagcgcgtaatgcttgagcaatgcggcgatggtgtcccgctgcatatcgccgtcggcgccctcgacgctagcctcgggcacgccggaccccacgacccaggactgcacatgtcccttgccgatcacggcttccggcagtgcggtgagcaccatgttctgcgcgcgctccgggcccagataccggaccatgccggtgttcgcgcgggcggcggcgctggcggtgagcacggcggcaccggggtagcgctgcgagccggtcaccagaccaaccacgccccgggaatatttggaatcctcgaaccgggggagacggaccgcgtcggacgcgaacgaattatccaccacctcgacgtccggatccttgtcgtcgatatcgaatccgaaatcgaacaactcgatacggccgcaggcgaacgtggcgggcggtagcaccgcgcacggcttcatcgcgccgaacgtgaccgtgaccgtggccggaatgtacgggccaggcagagaaccatcgttcacaccgacgccggatggcgtatccacagcaagtaccagcggaaaatcgcctgacgactcacggttcggcagggcgggctcatcgggagactcgccgtcgagaccaagggcggaggcgagcgcggcgggaatgccgcgtagcgagccttgaatgccgatgccggtcatcgcgtcgatgatcagatgcgatttcctggccacggcgatggcggtctgcaatcgctcaccggcctcaccggaggaaaacccggacgcgcagccgggaatatcggctgccgggtcaagcaccagcaccttgccgccggcgcgcacgagcgcggcgaatccggcctcatgcagcgaccggcccacggcgatggcagtgacgttcgcgccctcctgggccagcgcggcggccgcgaacagaccatcgccaccattgtctccggccccggccagcagcacgatcgacgtgtcctccagcgccagatcctcgtcgtccagcatgccggccgccatgtgggccgcggcctgggcggccatgcgcatcagcggcacgcctttgtccagcaggggtcgctccatggcccggaccgtatcggagtcataggcgctgtgcagcagcagttcgcgatgatcggcgttttcggtgtattccatggcaacccctttcttgtgtttgttacttgcggcccgtgtttacaggccgtacacctcgtgggcgaacttttcgagcacggggatcgaacgcttgactttctcggtgtcgatgcagtaggccatgcggaagtatccgggcacgccgaagctgtcggacggcacgaggatcaggtcgtattccttggccttcatgcagaacgccacggcgtcgtcctctaacgccttggggaagatgtagaacgtgccgccggggcgcaccacgtcgaagccgatgccggtgagcgcatcgtagagcaggttcatgttcgtctcgtagacgttgaggtcggcggtctggtcgatgactttggctacgcccagctggatcgagctcggcgggcagttgtggccggtgccgcgcgagatctggcccatcatgggcacgagcaggtcggcgtcggtggctgtggggttcaccgcgacatagccgatgcgttcgcccggcaggctcagcgacttcgaccacgagtagcaggtcagcgagttcgcatagaagctggccgggtagggctgggtggctccgtcgaacacgatttcgcggtaaggttcgtcgctgatcaggaagatgtcgtggccgtactcggcctgcttggcggtcaggatcgcggccagacgcttgagcgtgtccgccgaatacaccgcgccggacgggttgttcggggtgttgatgagcgcggcctgcacgttcgggttgagcgcggcctcgaacgcctcgaagttgatctggaagttctcggtgtcggccggcacgatggtcagcttggcgccgatgcccttgacgtacggctggtattcggggaagtagggggcgaaggtgatgatctcgtcgcccggcttggtcaccgcgcgcatcgcgtgggacagcgcgcccgccgcgcccgtggtcgggaagatatggttgccggtgtatgccatgccgaaacgttcgttgaggttttcggcgatcgcgtccttgacggacggggatgccgagcgagggggagtagccgtggatggccgcaggatcgccgttttcgtagaggtcgaccatggcgtcggtgaaggatttcggagccggcaccgagggattgccaaggctgtaatcgaacacgttctggtagccgatttcggcaccgcggctcgtggcgtactcgctcagcccgcgaatcacggacttgccgccaagcatggccttgtattcctcattgatcatggctgttctcctcgcatggttgtactggtatgcaccacgctactactatcgcggccggtttgcgccatttgccgcgccgtacctaagccggctgttctatttgttctattagtggagtttgaaccggcatatacccttgcaataaagccatttgtagggtctgaggctttccggggttgcttgtctcatagattttcggcctcttgatatttgcggttgatagctgtgatgtgtgtgggcgatggctgttgaggcatcatggggatctcttcgactgtccgccgtcgccatgccgccatgatgcctacagaaagtcgagttgcgtatttccgccaagcagggtggtgaccggtggggggcgatcggtgggggtgaccgacacccgccataggcagcaggcagccgtacacatcccaatatctgtgggacggcagacgagtcaatcgtttgtcgtccgcgccgtccctcaagagcgcgggatggcagacaagtcaaccgtttaacgtccgtagcgtcccacaccgacgactgtagaaaccgcggaataacgccgattctcgctgcagctccatgactatgcacaaccgttcatagcgagcgctgtgggacggcgggcggaaaacggccgaatccgcgtgccgtcccacacctcgtacaatccgcgttttgggaaagcatcaccgtaaggctgacgcgcatccgcatccacagcaggagccttaccggccgtaatcccgcactcgattattttttctgacaggaaatcgaacccgaaacactaacccatgcccgccccaccgcaaacagcgaataaccaaaaaaatgcatgatctatccttggtgccgaataatgagagcctgactgtagtggctacgggtagctatatcggagaaggattcgatcagaagcgtttcgacacgcttctgcttgccgctccggtctcgtttgagggtactctctcgcaatatgtagggcgacttcatcgcgagaatgatggcaagaccgaggttcgtgtctatgattacatcgacgtgaccgtgcctttatccgctgtcatgtatcgaaaacggctgaaggcatacgcaaatcaaggatattcggtaaatcctgaccatactgacgttgataatggttatgccggtttctgatcggtgataatggtggatgacggcttgggcggtgaccccacatttgactgacgccatcggttccggtggctgtccttattttgatttgtcccgcccatggccgccgacccgtgggccatggatgcatgacctcataggagcgtggccgctcccgtcggatcccgcaagaaccatggtagcgtgccccgtcaacgtcctgtctgcgccgcaagcccccgggaggcatccgaacacatggaaaggaacgacaacgatgacgccgccgaacgaagtggtgtgggccgggatcgacacccacacggacacgcacaccatcgcattgctcgacgagcggggcaggccgctgggcgccgagacgttcacggcggacccggacggatacgacaggctgatcggcatgctgcccgggccgggcagggtcgcggccgtgggcgtggagggcacgaactcgttcggagcggccctggcccgtcgtctcactgccgccggatacgaggtgcgcgaggtgctgcgccccaggcgaagcgtgcgccgcagggacggcaagtccgatcccctcgacgcggtcgccgctgcccgtagcgtcatggccggcgacggcacgagcctgccgaaaagctcggacggctgggtcgaggcactgcgccacctcaacgcgcagcgatcccaactggtgtcggcgatgaccgcgatctccaattcgacgaacgggctgctcgtcaccgccccggaacccatcagggaacgttaccgggggttgaggagcgagacccgcatgaacaggctcgccgaatgcagaccggccggcggcctggtcgagcggagcgtgctggccgcgctgaaatccgccgccaaggcatggaaggcgctcaaacggcaggccggtctcctggaggaacgcatgcgcctgatcctcgaggaacacgccaggccgctgctcgacatgtactgcgcgggcgccgtcatcgccgcgaccctggccatcgtcgccggggacaaccccgaacgcatccgaagcgaggccgcgttcgccaaactctgcggcgtctgccccatccccgcgtccagcggcaggaccaaccgacacaggctcaacaaaggcggcaaccggcagggcaatatggcattgcaccgcatcgccatcgtccgcctgcgataccacaagccgacccgcgactacatggccaaaaagacccgcgagggcaaaggcaagctcgagatcatccgctgcgtcaaacggttcatcgcccgcgaggcataccgggcgctcatcagcatacgcaacggcgaggtcggacgcgggaccccggccgaacgcggcgccaagctgcgcgaactacgcgtcagccggaacatcacccagcaacagatcggcgaggcgctctgcgtgccctcgagccgcatcagcgagatcgaacgcggcgcacgcgaccttcccgaactcgagcaacgggccatccagtggatacactcgacaaccaacccaaaacaacacacccaaacgcttgacaatgtataggagcatcaaaatggacatgctcagtgcaaaggcggaagcgttgcgcgcttgcatgacggccgcgacgcagggcgaagatgctgcggatgcgttgctcgacacccggtctgacggattattcgaaggcagcatcgttacagccacgaattatgcagagatactccgcaaggatattgccggttgcgcacgttccctgattatctcggctgaatatgtatcacaacagggactcagcgcaattgacgatgaattgctccgactggccgacaggaaagcgctcatcgaagtttatgtccgtttgccggcgactgctgcggtggcaaccagaacacgaatagaacggaatattaatcggctgcgtgctattgggtgcattgtccggaccgccgaatcgtgttccgatttcgccataatcgatgacgggttgatttggtttggaggcatccctttgcttggcaaaccaaggagtgacgactgtgcgcttcgattcaagga

SEQ ID NO: 3172 - DNA, 6752 bp, Unknown
  R53_2m  MAG No. k141_1627
accttctccaggttggtggagacggcgacgaagtgcttcttgatggcttcggcgttcttggcgtcggaaccgtcgatggcgcccttggccttgagctcttcgagcagccaggtgcgggcttcacgggcgttggtcagggtctccagggtggtgaaggtcttggagacgatgatgaacagggtggtctccgggtcgaggcccttggtcttctcggccaggtcgttcgggtcgatgttggagatgtagcgggcggagatgcccgcgtcggcgtacggcttgagggcctcgtacaccatgacgggacccaggtcggagccgccgatgccgatgttgaccacggtttcgatcttcttgccggtcacaccggtccactcgccggaacggaccttgtcggcgaaggcgtagatgcggtcgagcacctcgcgcacgtccttgacggtgtcctggccgtcgacgatgtacttgccctcgtcttcgaccgggcggcgcagcgcggtgtgcagcacggcgcggtcttcggtgttgttgatgtgcacgccggtgtacatagccttggtgcgctcatcgagcttgacggccttggcaaggttggcgaacagctggagggtttccggcttgatcaggttcttggacagatcgaagtgcaggtcgccggcgtcgaaggacagcttgtcgacacgctcggcgtcctcggcgaaccacttcttgaggctcacgccttcggcctgaagctcgtcatagtgcttctgcagggcagcccactcaggggtctgggtggcgtcaacgggcggattgatggccataggattccattcctttcatcagtgactggagcgccttcgctcacggctcggatgcgctccgtatcaccaaacagaatactcacaaattcggacatgaacagaacaaaaatcagtcagcgatgtcggattgccatcgtttgcattatcgaacagttcgtggcgcggcacaaccgtcatcttcaaccgagcggtcacgacacaaccgccaagccgccgattggacttttcgcggagatgtcttatacttaatttcttgtgcgcggctggcgaaatgccttccgcgaaccaagccactttagctcagtcggtagagcggctcactcgtaatgagcaggtcgtcagttcgattctgacaagtggctcggatgccctaggctggctggtctgtaatggctgtccggcctagggttttgtatatcttccacacctgtggaaacgcggatatgcacgcgcgagtggcggaattggtagacgcgcaggatttaggttcctgtgtctttgacgtgtgggttcaagtcccatctcgcgcaccggcttgagcctcctggaaacattggatcgccaacgattccgggaggctcttcgtatatgcgtgaggcaattgcaagcccttgcggacgcctctacatatggcaatgccaaggcggcaaatataatggtcacagcattgtgggtctgagcctgtgcgccatgagcctgtgtgagtcaaggagagaagtgtatgtccgccattcttacgccggttggcctattgctgatcattctcgccggctatctgttcaagcggttcggcctgttcgggcagaaggattatcgcgtgttgcaaaccgcggaattcaacatcgtgctacccggtgccatcgtatactcgttcgccaccaatccgcatgacatctcgctgctgcttatttcggtattcgcattcctgtttgcttttatcccgatcgtgttcatctttctggccacccgcaagcgcaatgtgaccgaccgcgccttcctgatgctcaatggcgccggcttcaatctcggttgtttctctttcccggtcgtccagtcattctggggtgcgggcgcggtggtgccggctgcgatgttcgatatcggcaactgcgtgatggtggccgccggcaccaatgtgctcacccagcaactgctgcatattcagcccggcaaaacacttgccgaacaacacgccggttcggttcccaccttgccgtacgaaaagcccaaggatcgcgacgccaaacggcttgcccgccgcgcattgctgcgcaccatcggcaagagcttcttcggctcggtgccgttcgacacgtatctgctcatgatcgcgttgaccgtcgccaacgtgaagattcccgattggatcgcctctataacccagccgttgagcggtgccaacgcgctggtgtcgatgctgatggtgggcatgctcatggatttgccccagtccaagcatgatgtgaaggaagtcatggccgtcatcgcttggcgtataccgttcagtgtcgccttcgcgttgatctcgtggttcctgctgccgttctcggcttcgattcgcgccgtgatggtgatctgcgcgttggctccaatcgccattttctccacgctgttcaccgacaaagtactcggcaacgccaaactggccggcttctcgctggcaatcaccgcgatgatttcactggtgatgatggcatttgctcacgcgctgatgggcgtgtgagcaaatgcgcgagtaggcacacgacgggcacacggcgggcacacggtcaggcgagacgcagcccacataggttcgtcccccggccgccagctgctaccggtgcagcagcttgtgcgccagattgctcacgccgaagcggaacttgtccaccggcaacgtgaatttgcctaccatctgctcgacgtagccgttgaagccctgcttgaattccagcacgccgcggccctcgtcgttcggatcgtcgaacacgccggaaatgccgtagaagttgtagcggctcacaccctgttccacacacaggtgcagcatcgcttcgtactgaatcagcgccgaggcgtagaacggcttgtactcctccaacgaaccggaatactgatagaccacctcattggggtgactgacgaacattgaagccgctgccggcagcacatcgcccttcttggcatatccctccacctcagccagacgcttgtcggcggccgcgagattgcgcgattcctcccccagctgacgttcgatgcgcgtggtcggacgttcatcgtatttcgtctgcagctgtgcgaccttggtctgcaaggcctcgcgcttggcggtcatatccgccacatattcggcgatgtggatttccgcgagcatgaaatgcgcatccgcgccatacgcctgcttgaactggcggaaatagtccgcgccgcgcgtcgcgaacccgcggcgttcaccggtccgccgttcgatatcggcgaacacgtcgaactcgtcggggccgatttcgcgaacgtgcacgcccatcgactgcgcccgcttgacgctccattgagcgcgtttgccgaatgatgccagcagttccttgccgttggtgatgccggtgagatccttgacgtacatccactggcagaccacgtcataaccggtatggaatccgccatgcgtccagccggcatcggtgaatccggtcagcagtgcatcgttcggctcgccgtcgggctgcccgtccgaggaatacagacggtaggcgacgttaggccagcatgccacggaaacagcatggtggcgacgggccgattcacgaatcgcctcggttatggcccgcagcagagccggatcatcgctaatgccgatggggccgaaatatacggagccatctgcaccgaaacgaccattgaggtacagaatcacgcagccggctaccagattgccggatgcgtcgcacacgccaacgcattcggcttcatgcccacgaatcttggcaagacggacctgcccggaccattgctgaaagctgccctggcttgtggcttcggaaagccggtcgaactcttcgggcgtaatcacgccaaacgtatacgtcgtatctgttcgattcgcagtcgcgctcatctcgtcgtcacctgtgccttatttctgtgtccgtgctcgccactgtttgtcagcgatgcagcagcttgtgtgcggcttcggatacaccgaagcgcagtccgtccaccggcagcgtgaacttgcccggaagctcttccacgaatccgccgaagcgagtcttgaactgccagacgccgtaggaaggatcgttggcgtcgaaaatgccggaaatgccgtagaagttgaagcgctccacgccacgggcgatgcagtcaagcatcgcctcgaagtggattagggaagacgggtagtaatccatgaaacgatcgtcctcgccgctggacaggcagacgacctcgttcggatgccagaagtagacaccggcttccaccggaatgaccgggccgtccgaggcgatgatgccattgacttcgccgatggtcttttccagcgccgtgatcttcttgtctgcggtggcgatgcgcttttccagcgttgccgggtcggaggcacccttcttggccgtgccttccggccgctgttgcgcgcgctggagcaggcgttcgaggttgcgcttgtctttggaggccgcattcagcttggattgcagggtgtccagatattcgtcgaaatgggtttcgaccaccttgaactcgatcaggtcgccgaaggtatcgaacagacgctcatagtaggccagatcgcggctcttgaagccttgacgtgcggcgctcatatcgcacagcttgacgaaagtgctcagttcgccgcgttccagccggcgcacgcgcagaccggaatcctgggcgatgcggatgttcttacggcggtacttggagaacgaggccagcagttccttctcgtcatgaatgccgtcaagccccttgacgaagttccagcggttcaccacggattcgtagcccacggtgaagccgccatgtttccaaccgaagcgggccatgttgtccatcatcgtggtgtccgggtcgctggtcggcttgccgtccagatcatgcagacggtagactgcggccggccagcaggatacgctgatggcgtgatgggccttggccgaacgacgcagggcttcggtcatcgcctcaaccacctgtggattgtcataatcgcacagcggtccgcaccagaccgagccttccaaaccgaaacgggactgcgtgtacaccacgtagcaggcggcaatcagcttgtcaccgcgcttgacacccacatagtccaccggaccgttgaacgcacccatggcggccatctgcgaggtctgctggaaactaccttgcacttgagctgcggagaacgcatccagctcggcaggagtgatcttggtaggggtgagtgaggcgacgcctgcatcggattgcgtcataatcgaaccttcttacttgtcgttactctgatcgttactctgggctctggaacggcctgtgtgctgcgtccgtttaccgcgacagcagcttgtgcgcaaattgcttcatggcataggcgaccggtttgaccggcagtacgaactcgcccggaagttcctcgacatatccgttgaagccctgcttgaactccagtacaccacgcccctcgtcatcgggatcatcaaagacgccgtcgatgccgtagaagttgtagcgagacagcccgtgttccacgcagaaatgcagcatcgcgtcatgctgaatcagcgcggaggcgtagaagggcttgtactgctcgacgctaccggagaacaggtagatgacctcgcgcggatgctccacgaatagtgatgccgcagccggcagcacatccccgtctttggcgaactcggccgcctcgttcaggcgcttttcggctgccgccagattgcgggtctcctcccccagctgacgttcggttttggtggtggggtgttcggcgtttttggcggtcaatgccgccaccttggccgaaagtgcttcacgcttggccgtcatgtccgctacatattcgtcgatgtggatctcggcaaccataaaatgcgccttgttgccaaacgcttccttgaaacggtggaaatatgcttcgccacggtattcgaagctacgacgttcggcggtttgctgctcgattcgtgcgaatacccccaactcgtcgtccgacagctcacgcacatgcacacccatcgattgggcacgcttcacgctccactgggtgcgcttgtcataggacttcagcagacttttctcatcggtaatgccggtcagatccttgaggtagcgccaacgtggaaccgccgtgtagcccacggtgaaaccgccatgagtgaagccgatcgcctcgagccgttctatcagcttattgtcgggagcgccgttctggtcatccggcaaagaagctccattggtgtcgcgaagccgatacggggattcaggggtgatttccagctgtgaagcaccctttgccttggcatggcgtttcagcgcatccatgaagaaggtcaatgcttcggtgtcgtgatagtcgcacatcgggccatcatggatggccgcaaatgtagagaatcgagagcggtgagtttcgaacagcgccgccgcgacgatcttctcgccctccttgagggccagatattcgacgtcgatcccctgcgcggcgcgaaggcgtcccatcgccgaggtttgttggaaattgccttgtggatgcctggcggagaaatcatcgaactcttcgtctgtcaacttcaccagcacaaaatcacgcatgcttccctctgcctccgagtcaatcaggctcaccatgctagcataacgcgcacacgacgaatggggtccgagcagatgaggtgtgcacatcgttcgcactattgcctccacaatggctcaaagaacaatggcccgaagatgctgaacgtc

SEQ ID NO: 3173 - DNA, 21727 bp, Unknown
  R53_2m  MAG No. k141_1951
atgttcgggaccggcaggatgtggccgttggtgccgccgatgtagcggtacagcggcaggccggcggactcggcggaagcgtacagagcagccagggagacacccaggatggcgttggcgcccagcttgcccttgttcggggtgccgtcgagctcgatcatcaggtcgtccagagcgcgctggtcagcagcgtccatgccgatgaccttcggagcgatgacctcgttcacggccttgaccgcgttaagaacgcccttgccgccgtagacggacttgtcgccatcgcgacgctcccaagcctcagcttcaccggtggaggcgccggacggaaccagacccttgccctgagcgccgtcttcggtctccaggtagacctcaacggtcgggttgccacgggaatccagaatctgacgcgcgtacacgctttcaattactgccacaactactccttaaaacggttgtgtatcttgaatgacattcttaagagtagtgcgatttgtggacgttgtgaacaacacgcccaaaatttagtgttagcgctcacaatgccgatgcgccgcctgattgcaaggcagtacggaagaaatcgctcagtcgacgtccttgccattgaggtagtcgatttcactgtcggacaatttcagttcgctggctttgaacgagtcctgaatctcctgcgggtttctggccgagggaatcgtgaacagatattggtattgcgcaagttcccacgcgagcgtgacgcgctggtaggagcagtcgtgggacttcgcgacttcgcggaaccggtcgaacagatgctcgttgaacgggtcaaggaatccaccgagcggcgaccagcagacgaaagccaaaccgagtttttcgcaggtctccaacgtgtgttcggggtcgcggtgaaccggggagaactggttctggacggccacgagacgatcgcccaaaatgttgtgggcggcttcgatgtccgcgttgtcgattctggagataccgaccgctttggccacaccttcgtccacgagctgcttgagtgcgcccatctggtcttcgtacggcacctgcggatcattgcagtgcgagtagagcagatcgagcgtatcgacaccgaggcggcgggctgattccttggcattggcgatcatggtttcgggtcgggcgtcggcctgccagccgtagttgccgttgccgtcaagcgtgcgcagccagccggttttggtggctacgagcacctgatctttggggccatgccacgagtgcagagcatcgcggaccagatattcgccatagcccatatcctccggttcgccggtgccgggtgcgctgggcagataataggaccaagccgtgtccaaataacggactccggcatcgagcgcggcatggatggtctcgatcgcctgatcacggttggaggggcgcccctcgatggcgagcgccattgtgcccatgccgaggcggggaatctcatagccggcaagtgttgccgcgtgttggtttttcatcgttgtggcctccatgccaagtcatcgaggagttggttagtccagaggactacctggtcggagctcatggggccttggcccagggaaccggtgaacggggtgggtacgatgagctggtgggtgaccgggcggtattgggcgcctttgtaaatacggcccatacgcatctggatggattcgggcgggtcgatacggccgatgcgcacgcggttggattgcgcgagaatctccgaaatgccgagcttgcgggccttgaacttcagacgggccacgtcgaacagggtctcgaattcgaccggcggcttgccgtaacggtcggtaagctcctcttccaaatccttcaaatcggcctcgttgcgagcggaggcgagcttgcggtacgcttccagacgcagcttgtccgaatcgatgtactcgatcggaatcgacgcttcgatgggcaggtcgatggacacggccaccggctcgacgttctcttcgggctccttgtacttctccacggcttcggacaccatgcgtacgtacaggtcgaagcccacgccctcgatatggccggactgctcgtcgcccagaaggttaccggtgccgcgcaattccaagtccttcatggccacatcgaaaccggagccgagcgccgtgttctgcgcgatggtggcgagccggtcatgggactgctcggtcatcggcttggacgggtcgtacaggaagtaagcgtacgcgcgctcgcggccgcgaccgacgcggccacgcagctgatggagctggctcaagccgaaacggtcggcatggtcgacgatcagcgtgttcgcattggagatatcgagaccggtctcgatgatcgtggtgcacacgagcacgtcgatgtcgcgatgccagaagtcgcggatgatctggtcgagctgcttctcccccatcttgccgtgggcgatgccgacgtgcgcctcgggcaccagcgtgtggatcttgtcggcgatggacgagatatcctgcacacgattgtggacatagaacacctggccgcctcgcaacagttcgcggcgtacggctgcggtggcctgcgcatcctcgtaggcgcccacataggtcagcaccggcaaccggtcttcgggcggggtggcaagcgtggacatctcgcgaatgccggtcacggccatctccagcgtacgcgggataggcgtggcagacagggacagcacgtccacgttggtgcgcagggctttcagcgtctccttgtgttccacgccgaaacgctgctcctcatcgatgatgacgagtcccagatccttgaacttgattttcgggttcagcagcttgtgcgtgccgatgaccacgtccaccgtgccggtttccagaccctcgatggtctcgttgatctctttggtggtctggaatcggctcatggccgccacattgaccgggaaaccctcgaatcgttcgctgaacgtctcgtaatgctgctggacaagcagcgtggtgggcacgagcacggccacctgcttgccgtcctgcacggccttgaaggcggcacgcagtgcgatttcggttttgccgaagcccacgtcgccgcagatgaggcggtccatcggcacgggcttctccatgtcggatttgacctcgtcgatggtggtgagctggtcggcggtttcctgataggggaaggcatcttccagttccttctgccatggggtgtccgggctgaacgcgaagcccctggcgcgctggcgggcggagtacagcttgatcaggtcgtcggcgatctcgtggacgtgtttgcgggccttggccttggtggccgcccagtcggagccgccgagcttgttgagcttgggggcttcggcaccgatgtatttgctgacctggtcgagctggtcggtggggatgaacagtttgtccgccggggcgccgcgcttggaaggcgcatattcgatgaccaggtattcgcgagtggttttgttggcgccggtgccgatggtgcgctggcgcatttcgatgaaccggccgatgccgtgctgctcgtgcaccacgtaatcgccttttttgagttccaccaagtcgatggccttgcgccggcgtttcggcgttttggccacggccacggccgaagtgcggccggtcaggtcgcgttcggtgagcagggcgattttggcggctttgtccacgaagccgtcgatggcctgagagcggatgacgtcgaaattggcgatgccggtagtgttgatcgcgcgcccgagcctggccaaggtgccggccgcagcggcggtgatggtgacgtggaagccggcgtcgagcaggccttcgatgccttgggaggccttggcctcatcccctcggaattcggccgggttctgggcgtcgagctgcacatggccggtcagcgtggtgtccacgccgaaactggtgaggcgaatcaccggatgttcggagtattcgagggagctgatggtttccgcatagtcgaggaagctggctttgtcgaagctgatgggcgcgccggcgccgtggccggaagcggccacatgccagctggcggccaggaactcgttcgcggtttttgccaagtcttcggcggaacggcgcagtttctccgggtcgctcaggaggatcacggcgtgcttgggcagcatggagcccaccggttccagatggtccacgagcgcgggcatcagggattccatgccttcgaccggaatggcgttggcgatggattcgagcatgtcctcagcattgggaatcgaaccgaccaaggctttggcgcgggcgcgcaccgcgtcggtcagctgcagttcacggcatgcggtggcccagatggtcctgaggccgtcgccgtaggtacgctggtcggaggcgtggaattccttgatggtgtcaatttcgtcgccgaagaattcgatacgcaccgggtgcggtgcggtgggcgggaacacgtcgaggatgcctccgcgcaccgcgaactcgccacggtccatgaccaggtccacgcgcgtgtaggcgttttcgatcagacgtttggcggcttcgtcgaggggcaggtcctcccccacggtgaacacgagcggctcgacgtcgcccagtccttggacgaccggctggatgagcgagcggatcggcatgacgagaatgcgaatcgggccgaacatcggatcggtatcgctcggatgcttgagtctgcggaacacggccatgcggctggccacggtgtccgcgcgcgggctcagacgctcgtgcggcagggtttcccaggcttcgagctgggcgatgtcgtccgggtcgccgtcataccaggagcgcagcgagcccacggtctcttcggcttcgcggccggaggccacgaccagcacgaccggcttgccgggtttgccggtcacaccctgcccgatggcggcggccaaagccgggcgcaagccttcggaaacaccggccagaacggaattgtcgatgtcgtccgaaacctcgatgtcaccagtggcgagtctaaggaaggtcttgtcctgttccagctcagacaggatgcctaccagtgagccgttgatcaggtccgggtgcgtcgcctcaccggccattgaacttctcctgggtcttggcaagaccgcggaagatgatgtcctcggcggcgtcggcgccgtcagccaggaattcgggcagctgcttgcgctggtccggaccgaatccgcccagcacccagttcaccgtgttgtcatgcgcgttcgcaccgcgcttggagtgaccgacgcccatgcgcacacgcgcgtatttcggcgtgccgagggaacggtcaatcgacttgatgccgttgtggccccctgcggagccgcctgccttgaccttgatacgaccgaattccaagtccatgtcatcgtgaatcaccacgatatggtcgggctcgatctggtaataggcgctaatggaagccaccgcattgccggaatcattcatataagtcagcggcttggccagaaagaacttgacggtgcggccgtccaggttcatcacgcttttaccgagcatggccagacctttgtggtcggcgaagttcaccgtccaacgttcggcgagcacgtcggcggtcatgaagcccatgttgtgccgcgtgtcctcatattttttgccggggttgcccagtcccgcaatcagccagaaatccgatgccacaatccactcctcgtccgtcttcctatattcccgtatgcacgttctgtacgttccgtacgtcatgcgcgcgttcgcctcgcgcactggcccatgcccggccggattcaaccgtcaagattgtactcaacgccgccgtcaagccttggaatcggcaagcagcagggcacggcattgctcggcatccatcgatcggaccgatgaatggtgaaacgcttcgacgtcacgagtcacgatgacgtcggcgtcattgtcctcggcaacggcacggatgagcccgtcctcgaagtcgggctcatcggaccggtacgacatacacgcatggcgttccataagtggacggatgtcgaacaattccatcagtccaccgatatcgtctcgcgccgcccgctcctcgccataatgcttgcgcaacacgcaatacacgtcattcaatgacgataccggcgccatgatctcaatgtttggctgcgcaacggcttccatgagcaaatcaacacattgtttatggaaaggcgctcgtttgtcattgcacaaatcgagcagaatattcgtgtcaaacagcagtttcatcccgttccccaaatcgttccatacgtgcctgcgcgagaatctcctcatccgaaagatcgccttccgcctccggcaaattccggtcggcgaaacgttgaatcaactcctgctttttcctacgctcccgctcctgaatcagggagagcgtcagacgctcgaattccggcagttcccccgtatccgcaaggtagtcggtcagatcacgaatcaggtccgaataggtgcgcccattacgcttaagcactttctccgcgtcgcgcttccgttcggcattgacgcgcgccgtcaccatggccatagtcatatcgcacctccttgtaataccagtattacaagagatggggacgagtgaatcgcgtctattaggcggtgccgccagcgaccttttcgcgctgtttgccgttgaggtaccagtgggccagcgccacgaacagggccgccgaggatattgccgagcgtggctgcggacaggttatagaggatgcccgacacgtcgagcgccgcgacgcccgccgcgtcggcgccgaaaccaaacgttttggcgaccaggcccatcggcaggaagaacatgttggccacgcagtgttcgaagcccatcgccacgaatccggcgatcggcagcaggatgcccagcaccttgtcggatacggagcgcgcggcgaatccgatgcgcacggccaggcagacgagcacgttgcacaggatgccgcacacgaacagcgtgtcccagcttggcgtcactttaacatcaactccggttggaaaaaatctcagtatgtagcattcggttctcaaataggagaaacatgcagcggcaatcaacaacttgtcgtttacgacgccaagcaagggaaacagctcagacagatgacgcttccctgcaatcggatgacatattgcgggacggcagcggattttgggcgttcttggcgtggcatcccgcaagcgttatcgcacgttatctgcaccgaatcataagaatggcagaattccaatgatttcgcaggaagagttgcgggacgcgagctatgtgcatcgtttgacgtgtgtggcatcccacgtgattgcgggataccacgtcaaaacggacgaaaatcgcgtgccgtcccgtagtttgccgttatctgggataagcgcgtccgatatatggcgttcgaggaaaagagctgatccgatacaactttttagtgttataggacaccggaatccatggagagcaagggtaaaccgcctcgggcctacaggtccaaataccagtaggacatgtcccgcatggtgccggtggagtcggtggcagcggcgggcatgaggccgaattgggtgaagccgaagcggcgcatgagggcaatggagccgacgttatcggcgaaaatgatgccacaggccttgcgcatgtggcgggcccgcgcctcggtgagcagcctgtcaagcatgaacgtgcccactcccctgccttgccatgccggatcgatgtaataggccaaatcggtgacgccgtcatacccggcacgatcgtagaacacggagagcgcaccgaagccgatgattgaaccgtcttccgattccacaacaaaaacgccgtagggcggcgtatgggattcgacccaggcgcggcgttggtcgagggtgcgcggggtgaggtcggcggtggccccacccgccaccaccgcagcgttgtagatgtcggtgatggcttggatgtcggattcgacggccggacggaaggtgtatggcatgaggttcctttgaatacgcaaatagcccgtccttatgataaggacgggctatgtcagttgaggtaaccgactcccttcagtcgccttcggcgatagctcccctcaccctgagggaagccaagttacttgtcgagctcgatggccttgttgagggcgtcttcaagctcctgctgcgccttgccgtaggcggtccagtcgccgttcttcatggcggactggctgtccttcatggcttgggcggcatcgttcaacgcctgctggagttcggggctgcggtcggaagacgagccggaatccgactttccgtccgtggtgccggactgaccaccattggtatcggaaccagattggtcaccggacacgttctcggcatcgcccgcggccgcaccggaattgccaccgaacacctgatccaaggcctcatccaacgtatccgcgaatccaacctgatcaccgaatgcgaccagcgtcttcttgagcaacgggaatgaggtcacgcccgaagacttgacgtacacgggctgcacgtacaccagtccgccaccgagcggcagggtgagcaggttgccgcgcaccacttgcgtgtcgccggattgcagcaggttcagttccttggatacatcggcgttggcgttgaagttgttctgcgcctggccggggcccggtacgttcgaatccttgggcagctcctgcaatcggatggtgccgtagttcgagcctatcttgcccttctcattgccggcatccgagtcgaccgacaggaagccggtcaggatctcacgggtggactggccagccggaatgtaggtggaggtcagcgagaacaccggttccttggtgccaccggtctgcaaggtcaggtagtacggcggctgcaggatgtcctggtcctgctgggactgggattcggtcgggtcgaccggcgtctgccagaagtcctcgccggagtagtactggctggcggaggtcacgtggtacttggagagcagctcgcgctgtaccttgaacaggctttccgggtagcgcatgtggctcatcaggtcgccggagatatcggagagctggtggtactggccagggaagatcttctcccatgccttgatcaccggatcggattgatcccacacgtacaggtccacggaaccgtcgtaggcgtccacggtggccttgaccgagttgcggatgtagttggccttctgagagcccagggacgagaccgttgcggaagagacggtggtggaatccttggtggcggagccgaggtcggttatttgcgagtacgggtaggcgtcggaggtggtgtagccgtcgacgatccacttgacgcggccatcgaccacggccggatacacgcggccgtcaagcgtcaggtacggtgccaccttggccacgcgctccttgggggaacgatcgtagagaatctgcgattcgctggtcacacggtcggagaagagaatctgatcggagccgaagcggatcgcgtagagaatcctggagaacaggttgccgaccgaagggccgccgtcgcccttgaacgtggtcagagcaccttccgaaccggtcgggtagtcgaactcccaagcctgcgtgccttcaggggcaccgacaatcgagtattcggtggtgttcggcgagaagtagatgcgaggctcgtacttttcggattcggtgagcttgccctgggtggggatgccggattcgaagaattcgggctggccgtcggcggtcaccttgttgccgtaggcggccaccacgccgtaaccgtgggtgtacacggtgtggtcattgacccagttgcggttgtcattgccggccagatcgagctcgcgggcggcaatcacggtgtcctgggagacgccgtcaatctcgtacttgtcgaccgccagggtgtcggcgaaggtgtagtactgcttggactgctgcaactgtttgaacgtggggctgacgacctgcgggtcgagcagacggatctgcgcggtggtgtcggcctccttggccagagcgccctgctcacccttgtcggtcaccttgtattgctcggtcttgagcttgtcaagaccgtaggcggcgcgggtggcgtcgatgttgcgctggatgtaggtggattccatctcctgtgcgttcgggttgacgcggaagcgttgcaacagcaccggccatgccacggtgagcacaagacccaccacgaccacgacggcaatggaggtcaccggcacacgccaggccttgagcgcggcggaagcgcgcacgccgatggacgcctggccttcgagcgtgtgggagcgcatgagccagatgcccagcaccacgccgaggatggcggtcagcacggccatgatgaaggtgacggggatgttggcatgtacggcggtgtaggaggcaccggtgatgcgtgaaccctgcacggtgagctggtcgaagacgccaatcatctggcgcactgcccaagcgaacatgttgagcatcagccagatgccaagctggcgacggcaacgcttggtaatggagaacaggccgcgtccgttaaccggcatggtaatgcggataccgcccatcagcacatgcgtgaccacggaaaacacaaggcccacgcccagcagcatggccacggcggcgagcacgagcttcaggcccggcagcacgaacacgtagaagccgttgtccagaccgaactgcggatcggtggtgccgaacgactgcgcgttgaacatgagcagaatctcgctccagttcgcgttaaactgggaaccgaagatgacgccgacgatcagcgaaatcaccacggccacgcggcgagcggttttcgagctgacggatttgccgacctcgaccacatcgccgttaatgcgaatggtggaaccgtcggccgaatcagggcgtgctcgaatggccagccaggcggaaacgaagccggtcagggccatgagcagcgcgtaggccacccacagaccgattttcaccccgagctgggtccagaccacggactggaagccgagctggccgtaccacatcagatcggtgatgaatcgggacaggccgaagaacagaccgacgatgatggccaaggccagcaccacgccgatcagaatcttgctgccacggctggctcctgagccaccggacgctggcttacgggtgatacgcggattggccggaccacgtggagggcgggatgacccggaggggccagcgttggtgttgtgggccggaccgtccccatcggcctcgacatcgaggatgatcggatcgtcattgttcgcattgttgcgtcgtgaatcgccgccattgccgaacagtactgagaaaggatcgttaaaagacataactcaagcctatcgaaagggcgggaggtcggttatgccctgagcacagaatgaggcaacatcctgttctacgctctgttctacgcttgccgctatgaacagacaacggccacaacatatgcgtccctcagcacacgccacgcgccgacttcggcacaggagcattccaatcgtggcggcaatatgtgctttggcggtggtgttggccggtgtggcagtctacggatggcatgtcggatggttcgccaaatccacatcaaacggcaacaccaccactccccagacctcccagacgagtgcgttaccgcgcaccgacgttccttccccgaagaagaacgacgatccggcggcacaagcccaacgtgcggtatccgccatgacgcttgaggaacgtgtgggacagttagtgatggtgccgttgttcaccggttccgaaccctcctcgttggcttcaacaatcgccgacgaacacattggctcggccattctcattggcaattggaataccggcgtcgatacggtcaagaccgcgaccgcgcaactccaaggatatgcgccggccggcaatcgtctcatcatcgccaccgatcaggagggtggtcaggtacagcatctgactggtaccggtttcgacacaatgcccagtgccgttgagcagggcacaatgtccgctgacgcattgcgtcaatcggcaggcacgtggggttcgcaattagctgctgctggcataaatgtcgatttggcaccggtgctcggcacggtggtgggcgatcgtgcctcaaatgctccgattggcgcgctggatcgtgatttcggattggatgcggccggcaacgccgaacatggcatcgccgttattgaaggtttgcgagacgctcaagtcggtgcggcggtcaaacattatcctgggttgggcgcggtaagcggcaataccgacttcaccaccgaaggcattctggatacgaccaccacgttggacggggccgaggcaggtgcctttgaccaggcgattaccaaggccgatcctgcaatggtgatgatgtcgttagccacgtatcaatccatcgacccgaataatccggcggtgttttcttctacgattatcgacggtcatattcgcaacgtcctgaagtacacgggcgtggtgatttcggattcgatgtctgccgaagcgttgagcagctacgatgtaagccaattgggagtaaatcttgtcgaggcgggcggcgacatgtcctgcatcggtcagacggattatgtaaagccaattgtggacggcctcagcgaacgggcgaagtccgatccggctttcgcttcgaaggtgacggcggcggcgactcgcgtaatgacattgaaaatcaagatgggactggcctgaccgttcatccttgcactggcgaggattgatgcgcgctgattcgcgctaatcctcaccagccctcgtacaaatgcacactagtcctcgtacgaatcgtcagtcctcgtacgaatacagaccatgcttgccgatgtattgcaccacaccgtcgggcaccagataccagaccggctcgtcgtgttcggcgcggcggcgtacatcggtcgaggagatggccaaggccgggatctcaagcgtatcgaccttgccttcgggcaaggtcacaccgtccgggctggagtagccggggcgcgtgacggccacgaagtgagcgaggtcccacatgaggtcggcgtccttccactgcatgatttcggccacggcgtctgcgccggtgatgaagaacagctcggcgtcgggatgttgggcgcggatatcgcgcagagtgtcgatggtgtaggtgacgcccggacggtcgatgtcgacacgcgagacggtgaatttggggttggatgcggtggcgatcacagtcatcagataccgatcctcggcgttggtgacgtgcttgtccagcttgaacacaggtcggccggtgggcacgaaaatcacctcatcgaggtcatacacccaggcgacttcagaggcggcgaccaagtggccgttgtggatcgggtcgaacgtgccgcccatgatgccgacgcgcaggcgtgtatgccagttgccgcgtgcggaaagcctgcctttgccgtggctgctggccccggccggtacggacaggtcggacatgcgccgttcggtttcgccttgggtgacggcaatgatttcggcgggctcggcggattccactgttttttcggactgaactgacgcagccgttttgtggctgccggtaacaccactcatgcctggccgccctcgccggcggcgtcatcagctgattcggtttcctcttcgatttcgccggcggagggattgtcttccttgggatcgatcttgcccatgtcttcatcccattcgtcttggaccacgcgacgaatctcggcgaaggtgggcagcgggaagtccggctggtagaggcggcggacctcggccacgcgctcggtgatgcggatgagcgtgtcggtcatgccgtcgaggtcgccgtcgtgctccatctggctgtatttgccgatgtagccttccatgagttccatgtgttcgcgcacgatcttgagctgggcatcgttgaggtccacgacttcgggtgaatcggtctcgggccagccgatgagcacggcgtccgcgtattcgagcgacgcacgctgggcggcggaggcgatgccgtcctcaatctgcacgaggaacacatagcggacgatgctgagccgttcggccgcgatcttcaggccgagcttgggatcgttgaggtcgatgtcgggccgcagttcgcttgccttgtttgccgtgtcagccgtagtgttcatgttgccgtcctcgttcatgcgcgcacctggcctgttccgtaaccgatccacttggtggtggtcatctcccgcaatcccatgggaccgcgtgcgtgcatcttctgcgtagaaatgccaagctcagcaccaaagccaaacacgccgccgtcggtgaagcgggtggaggcgttgaccatgaccacggccgagtcgatgcgcttggcgaattcctcgatggccgcataatcctcggcgatgatggattcggtgtggcctgtggaatgcgtgttgatgtggtcgatggccgcgcccagatccggcaccaccttgatgcccatcttgagggccagatattcagtgtcccaatcctcctcggtggcgcggttgaggtcaaggccctcgatcgccgcgccggagatgatgtcatacgacgtggtgtcggcctgcagtacaacgttcgcctcggccagagcggcggcgatctgcggcaggaattcggcggcgacatccttatgaaccaatagcttctcggcggcattgcacacacccacgcgctgggttttggcgttgatgatgatcaggatggccttggcgagatcaccggacttgtcgatgtagatatgcacgttgccggcaccggtttcgatgaccggcactttggagttgcgcacgacggcttggatcagacccgctcctcctcgcggcacgagcacgtcgatatggcctcgcgcctccatcatggcggtggctccggcgcgtccgtactggtcgacggattgcaccagtgcggattcgaaaccgtgtgcttcaagcaccggggcgatgacgcccagcgtggcagcattggtgcgttcggcggcgtgactgcctcgcagcaacgcggcattgccagatttaaggcacaggctggccacgtccacagtgacgttcggccgggcctcataaatcatgccgatgacgcccatcggtacgcgcgtctgggtaaggcgcagaccgttgggcagattgtatccgcgcacgatttcgccgaccggatcaggcaaggtggccacatgacgcacgccttgggcggcggcggccacgcgcggcacgtcgaacagcaggcggtcaagcttgcccgcatccatgccgttttccttggattcgagcatgtccagcgcgttggcggcttcgatgtccgcggcgtgcccgtccaacgcatccgcaatggcgagcagcagttcgtttttggcttcggtatttgcctgtgcaagacgctcctgcgcgcgtgcggcctgatcggcctggcggcacaccgcgtcgaacacctcaggactcaattcatcgctcataacagtcaagcgtaactcacaacgcggctgattgcttactccgacccgcttgttatgggatgtctgacgttttgaatcgcaaacagaaccggctcccctccgtctcaggcgggaagccggtgacgtgatgcgctccggtcagcgaatcatcactaaccggtacaccacggtggattagtgaatcagcaaatcagtggatctggtccaggtcggggtagagcgggaagtcttcggcgagcttgtcgacgcgggccttcagcgcggtcacgtcggcggacggtccggcggcgagcgcggtgccgatgatgtcggccacctcctcgtattccttcggcccgaagccgcgggtggccagggcggacgtgccgattctcaggcccgaggccaccgaggccgggcgcgggtcgaagggcacggtgttgcggttgatggtgatgccgcaggcggcgagcagatcctcgccctgctggccgtccatctcactgttgcgcaggtcgaccatcaccaggtgcacgtcagtgccgccggtcagcacgctgatgccgttggccttgacgtcatcggccagtagtcgttcggcaaggatcttggcgccgtcgagcgtgcgctgcatacggtccttgaattcgggggtgccggccaccttgaagctcacggccttgcccgcgatcacatgcatgagcggaccgccctgctggccggggaacacggaggagttgagcttcttggcgtattcctgcttggcgaggatgaagccggagcgcgggccgccgaaggtcttgtgcgcggtggaagagactacgtcggcgtacggcacaggactcgggtgcaggcccgcggccacgagtccggcgaagtgggccatgtcgacccagaatttggcgccgacctcgtcggcgatctccttcatggccttgaagtcctcgatgcgcgggtaggcggaccagccgccgatgatcatggccgggtgggtttcgagcgcgcgctggcggatgatttccggatcgatgcggaaggtcacggggttcacgccgtacgcctcggcgtggtagaaacggccagagaagttgattttcatgccgtgggtcaggtggccgccgtggtcgagggccagaccgagcacggtgtcgccgggcttgacgagcgcctggtagacggcggcgttggcttgggcaccggagtgcggctggacgttggcgtattcggcgccgaacagggccttggcgcgttcgcgggcgatggtttcgatctggtccacgtattcgcagccgccatagtagcggcggccggggtagccttcggcgtatttgttggtcagcacggagccctggcattgcagtaccgctcgcggcacgaagttctcagaggcgatcatctcaaggccattgcgctggcggcccagttcggagtccagcagttcggcgatctcaggatcggtttcgcagatcggcgcgttgaaagcatcggtcgctttctgcgcaaggggtgaagcggtcatgggtgctcctttttggtatgggcgacaattgattcgccgttgccgccttactgtatggccggtttgtagccggcctgtttcatgatatggccggtccccgttcgatggcaatggtgattttcgccggtttgaccggtcggctatgcgagacggacggcccttctgcccacggcccacgctaaactggtgtggattcatcatccctttcaggcagaaggattcatcgtgacaaccaccttccattccacccgtagcaccaccgattcgctgaccgccaagcaggcgattcgcaagggcatcgccgatgacggcggcctgttcgtttcggacgcgttgggcaagaccaaggtggacgtggcctccctgccgggcaagtcgtaccagcagatcgccgccgaggtgctgggcgcgctgctgccggacttcacggccgaggagctgggccagtgcatcgccgacgcctacggcgaacagtggtccgatgagcgcatcaccccactcaagcccctgggtgacgattacgtgctcgaactgttcaacggtccgacttccgcgttcaaggacgtggcgctgcagatcctgccgcgcttcatggcgcacaccacgccggccgatggcgacgcggacgagaagatcatgatcctcaccgccacctccggcgacaccggcaaggccgcgctggccggcttcgcggacgccccgggcaccgcgatcaccgtcttctacccggaaggcaaggtctcccaggtccaggaactgcagatgaccacgcaggccggctccaacgtgcaggtggccgccgtggaaggcaacttcgacgacgcccagtccgcggtcaagcgcatcttcggcgaccgtgccctggccgagcgtctcgccggcaattcgcacgtggtactttcctccgccaactccatcaacgtgggccgtctggtgccgcaggtcgtctactacttctccgcttacgcccagctgctcgccgaccaggtgatcaacgtcggcgatgaggtcgagttcgtggtcccgaccggcaacttcggcgatatcctcgccggctactatgccaagctgctcggtctgccggtcaagcacctcgtggtggcttccgacaagaacaacgtgctgttcgacttcctgaccaccggtacctacaaccgccagcgcccgttcttccagaccatctccccctcgatggacatcctcatctcctccaacctggagcgcatgctgtactacttgtccgagggcgacacccgtctgatttccatgctgatgaacgacctcaacaagtggggcacgtacgagatcccggaagaactgctggccaagattcgtcagatcttcggcaccggttgggccgatgaggatcaggtacgcgagtccatcaagcactgctgggacgagaaccactacgtgatcgacccgcacaccgcctgcggctactacctgcttgagcagatgccgcgagacccgctgaccccgcgcgtgctgctctccaccgccagcccctacaagttcccgcgcgtggtgaacgaggcgttgggcttcgacgccaccggcaccgacttcgagtgcatggatgtgctggcccgcgaaaccggtaccaccgctccggccgccctgcgtggtcttgagaccgccgacgtgcgcttcaaggacgtcgtggccatcgacggcatggaagattacgtcgaaaaggccgcccagacgctgtaaacataccagcacattggctcccctcagagaggggagccattttttacatcagaattgcgtttacatcagtatcgcggcgactggcagtcctatggcgattgccaacagcacgatagtgccgatgatcacgctggggcgtgcgaggttgacggtccagccgacgccgaaacgtttaggaaccatgatggccggatcgtcacggttgatgtagatgatgccgccaatccagtgcaggtcatcgtcatacggcataacatcatcgtccgaatcgtcaccgccgtcactgtgccgaacaccggcatagacgcgcgccccgttctgcccgtaatacacgccgatcatcagcgcgccgaccagagccgccacagcgatgaacatgccgatgatgccgattagattgacatccagcacgccaatggcgacaagctgaacgcctaggcccaatccaccggctgtcagcagtccgatgaccagcacgtagatgctccagacccgcgagaacacaccataggcatacccggtggtggcggggtggtcgggatcaatcgggtgcttggcgtagatgatcgcgacatggctggccaccatcaccgctgccagcaccacctgcgcgagcacggcgtaccaaatcaccatcggactcttctcggcccagccgttcacattgccggcgatatccgcatgaatcggcacccgctccggcatccggtcatagcccagcagcccgaccgcaatggtgacagcgagacaaacgacttgcagcaattcccacttcaggctcagcgggtcgggattgtcccgctcacctatcaatgccgcacggcgagcactggacgcctcccatccctgattggttttgatggacagtactttgcggcgaaacacctgctgcagcacaaaaccacatatcgcaatcaccaccgctgcgatggacacggtccagaacgccgcgtcgactccacagagccgccagacggccaacgagaccagcatggcgcacacaccgattgccactacaattcccgaaaacgcgactttgtattcgcgaatgcgcgtattggtatgggcggcggccggcaccgtgacaccgaacacctcatgccggtcggtaacccatggaacccctgccaggccggcggtcactatcaccggcaacagcaagaacgcacacaacgcgatgttcatcgacacgactgtattgttcatcgttatctcccctgattttcttttgttgcaccgtcagtaacgctctgcgaggagcgcacgccgtatgcccgttcgcattgccgtttggcggcatcgaggaatgcggccgaatcaccgccgcgcgccttgtaggccaaggcaaggcgatagagttcctcgtccatccgctcatcctgtgcttcggcagttcggttcggcgcttctcccccgccgttacgctcagcgacggttgcaccggcaccacgacgcataacgatgtatccctcgtcacgcaacagcgcatatgccttgttcaccgtgtgcaggttgatgccaaggtccacggccagcgagcgcacggacggtaacgaatcgcctggcggcagctcatcgcccgcgatggctgcgatgaactgccggtgcagctgctcgtaaatcggcacgtcactgcgctgatcgatttccacaatcatggtcgcctcctcccaaaccgttctatttgttctacatcaactataacacttaccgaatacaccgcaaggcacaccaaacataacaacatatttaatatgtctgctatgatggtgcccaagttgcggcacaatggcaaggagacaatcatgtggtcagaagaggagatcgacgccttgctgaacccgctgcgttccgcgcaatcggacagtcaggacattgaggccaaggaagccgcagacggattgccggtttcgctgcccgagacgatttccgcttttgccaatggacgcggcggcaccatcgtgctgggcattgccgaaaaggatggcttcgagcccgcccaagggttcaaggcgcaacccgtcgccgaggcattggcgcagatgtgccgagacaaaatcaccccgcctataaggccagtcattgacgtcacctcataccatggttccgccgtggtcatcgccgtcatcgatgaggccgatccactggataagccatgttatgttcgcaatagaggccggtacagcggctcgttcatccgagtttgggatggcgaccgcaaactcagtcattacgaaatcgaccggcttttggaaaaccgtgcgcaacccacgtatgaccgggagctgatctacgaagccaccgtcgacgatctgctaccggatatcgtgcagggcattcttacgttatgccgcgaacgccgtccacgtgtcttcggaaaactgaccgatgaagaggcgatgagcgcgcttgggatagtcggaacaggagatgacgggaagtctcatccgacgcttgccggactgcttgtcgcaggtaactatccccagcagtttctgccacgggtgaatatcacgttcacgtgctaccccggatatgacaaggtgtttgccggcggggtgaaattcatcgacaattattcactcgacggccccatccccgagatactcggagaaaccctgaacgccgcacagaagaacatgcgcatcggaggcgtattggacggcccattccgcaaagacacctttgaatacccagaggacgccatacgtgaggccgtggtcaatgccatcatgcatcgcgactattcgccgatggcccggggcggccaaattcaggtcaacatgtacaaggaccgccttgaagtgctgagtccaggcggattatacggcgacgtaacgctgggttccatcagcgagcccggctccacttcgacccgcaatcagacacttgccaaattgcttgaatgcaccccgttccgcaatgccacagtcgcggagaatcgagggaccggatacagcctcatcaacagactgctgctggataacggcaatggcgagcctgaaatatacagcacgctgaatttgttctcggtcaccttccgctcagcggatacctccaagttgccggacagccgcagggatccccgttacgcgggttgggg

SEQ ID NO: 3174 - DNA, 9147 bp, Unknown
  R53_2m  MAG No. k141_2190
cgaccaccacgacaggcaatcaggcgaggaatgaactggcaatcattgactataaagaagtagtacaaacacgctcttgagttctcaaaccaccaccacaccagcaagacaggaaaccaaccagaagaaggaacccgccgcgctgagcggcaacaggtgaataacttacacgcaaccacgccacaacgcaaatcaaagcgcacaagaacccaaggaatcggcataacagcgcggttccttcggcgtgtcgcacagagcccaatttgctctgatagggctagcgtaacccctcgaatgtttccggaaaacatcgaatccattattcggctggcgtgtcgcacgagttttcggactgtcagctccatgttcatcgttcggcaaccacaccaccggcgcacaatcaatgcatggcaacaacgctccatcatcggatttcgttcatgaatcacgggtatacctgtagttatgaccaagaagattgctgtattaaccggggcgggcatttccacgtccgctggcatccctgatttccgcggtccagacggtgtgtggaccaagcatcctgaccaaatgagcgtttacgacatcgatctgtttctgcgtaacaaagaagaccgtgagtactcctggcgctggcagaaggaatcaccagtatggaacgcacagcccggcaccgcgcataaggcgctggtcaagctggaacaagccggcatgctgacgctgctggccacgcagaacttcgatgcgctgcatgagaaggccggcaacagcgacagcgtcatcgtgaacctgcacggcaccatcggcacctcgcattgcatgaagtgccatcaggaatatgccacggcggacatcatggcccgtttggatgaagaacccgatccacattgccatcgcaaactgaagtatcgcggcgatatgccatgcaatggcattatcaaaactgatgtggtgtatttcggtgaggcactgccggacggagcgatggagaagtcgtacagcttggccaccaaagccgacgaactatgggtaatcggatcgacccttgaggtgtacccggcagcgagcattgtgccggtggccgcgcaggcgggcgtgcccatcaccatcatgaatatgggtcacacgcaatatgaccatcttgcgagccgcttgattcatgaggatatcgccgtcgcgctgccgaagttggtggacgagacgattgcggagaacaagtagtcctcagcataacgaaagcgccggtgggtggttaagcaactgatgattgttggttaaccacccaccggcgctttcgcgccacctcccgctagcgggaggtattggagcacacttctgcgcggcctcccgccagcggtattggaatcagtagatgcgcttgggctggaatccagcttccctgagtgccacgaggatgcggtcgatgtgctcggggccgttggtctcgaccgtgacgccgagagacaccgcgttggtgtagtggccggatgccttgaactggtcgtggtcaagctgaatgacgttggcgcgctgctcggcaagcagggtggccaccttgacgagctggcccggagtatccggcagctcgacctcgaagttcatgatgcgaccgcgggcgatcatacctttctgaatcaccgcacccatggtcacggtgtcgatattgccgccggacataatcggcaccaccacgtgcgggccggtggcggcggcgaacttgcgcgaacgcaggttcaggtgttccagcgcggccagcgaaacggcaccggccgcctcgaccaccagcttgtgcttctcgagcatgagcagaatcatttcgttgatgtcgcgctcggtgacggtgaccagatcgtccaggaactcgttgatcagagcgaagggcaggtcgccagggtgcttgactgcaacaccttcggcggaggtgaccacatggtcagccggagacacacgacccgcggccagcgagtccttccaggccggggagccctccggaatcgcaccgattacgcgcacttcaggcttgaacgtcttgatggcgagcgccacgccggcacccaagccaccaccaccgagcggcacgaccacgtcagtgacgttcggcacgtcttcgaggatctccagaccgatggtgccttggccgcaaatgacttcgtaatcgtcgaacggcggcacgtaaatcatgccttccttgtcggcgagctcagcagcgtgggcggcggattcgtcgaacacatcgccgtacagcaccacatcggcgccgtaggccttggtggcatcgaccttcagcggcggggtgatctgcggcatgcagatggtggccttcgcaccacgctcacgggccgcataggccacgccctgggcatggttgcctgcggatgcggtgacgatgccacgggcgatctgctcttcggtgagcgatgcgatcttgttgtacgcgccgcgaatcttgaaggaaccggtgacctgcaggttttccggcttcaggagaatctcatgaccagtcatctcgctcagcaccggcgaagggataatttccgtatgacgggcagtccctttgagacgtttggcggccaacttcagttcggctgcatgatcacgctgcagcgccttcaaaacatccttttgttccatagcttttaattgtatggcgcggggacaccgaaaacagtggcttatctcgctaacgagcgctcatttacggtaattcccgttcgtaatcagctttcgaggggctgatttggcttcgcggggaggtctatctcctcttcgaggggctgcccgatcgtgcaatgcgtgagtatgacacatcatttgcagcggtattatgcggttttcggagcccggctattcaggcaccaaccccttgaaacggagatagacctccccgcgaagccaaatcagccccttgaaatgaagataccgcctagcaacacttataggctgacgacgacgccctcccatggtgcaagctcacggccggcaagagcggccacagcgtgcgcggcgtcatacgtgctgatcaccacgttcgactcggtgattccggcggcggccagttcggcggtttcgcgcggtagatcaacggttcggccggacatgttgaccacgaccagcagcttctcatcgccgagggtgcgggtgaaggcgtagacatgcgcgtcatccgcatcgagcagatgccagtcgccggccgccacgacaggcatgtcgtggcgcagcgcgatgagctgcttgtagaaggcatacaccgaatccggatcgtcgaattcgccggccgcgttgatcgccgcatggttgggattgacggagatccatggctccttagcggcatccggcgcagtgaaaccggcatagacagagccgtcccattgcatcggggtacgcgaattatcacgaccgcgcgcggcgatacccgccaacatcgattcgggcgactgcactttggcttcctcaaccctttgacggtaagcgttcagggactcgaggtcacggtactggtctaggcgcgtgaagtgggcgtcggtcatgcctagctcttcgccctgatatatgtacggggtgccgcgatgcatgtgcagcatcaggccaagtgccttggccgaacgcacacgagattcctccgaggagtcatcaccccaacgagaaacgacgcgaggctggtcgtggttaccagtaaacaggcttgcccagcctgcattcttcacggccgcttgataaccggccataatgctcttgagcttcggcaggtcaagtggcagtggcttccatttgacgccttcgcagtcaaaatcaacgtgctcgaataggaagagcatgtccagctcgccgttggcggggtcggtgatgtattcgttgcgctgtgcggtaacgccgggagcctcgcccacggtgaggaagccctcacggccttcgaacacttcacggcgcatttcggccaggaattcgtcttggcgagggccgtccgcgcagaacggattcgggttggaatagccttcctcacccacgggcagatcgtccagctcggaaccgtactcgccgggcagcttgccagacaggtccgtgcgcttggaaatcagcgtaatcacatccatgcggaagccgtcaacgccgcggtcaagccaccagttcatcatgtcgtataccgcgcggcgcacagccggattttcccagttgaggtccggctgcttcttcgagaactgatgcaggtagtattcgccacgctcagggcaatactcccatgcagaaccgccaaagtaggagccccactggttgggctcggcaccgggctcgccggcagtggtgccgggacgggcgggacgccaccaataccagtcggcgtgctcatcatccttgtttttggacgcttcaaaccaggcgtgttcatcggaagtgtgattgacaacaagatccatcacgatcttgagcccgcgcttgtgggcctcggccagcagctcatccatgtcgtcgagtgtgccgaacagaggatcaatgtcctgatagtcggaaatatcgtagccattgtcgtcttgcggagacttgtataccggggatagccacagcacatccacgccgaggtcggccagatagtcgagccgtgacgtaatgcccttgagatcgccgaggccgtcgccgttggtgtcttggaaggaacgcgggtaaatctggtaaacgaccgcattggaccaccatggattcggggtggcaccgttggtgcggatggaatctggaattactgtgcgttgtgaagtggtcatcgttggctcctccattatttatggtctacattgcctgttgctcatagtctaaaaagcgctgaattacatttccattggggaactgcgttggtgtgccggaaacaaaaaccgcaaagagccggaaggcactgctacggctcaattctcataagctgcacatgctatttagcaacatatgggccctttcgctgtttgtggtgggtgactgtgccgtggggtgatgttggtcgggtaggttggaggcatggatgcctctcacctgttcaccgccgcgcttcggctgcggtcgccttggaggatcgggtctgcggacttccgtgacgccgacggcgacgggcgggagccgcacatcacgatcggcttcgagcccggcagagggttcatgctcctgttcgaggcgtgggtgtggctatatcgcctgtgctcgtggatgatgcactcgaggctcgaacctatgaaggagctcgcccgcttgttccgccgccataatctacctgacctgcggcagctcacatattaacggttcttctgattgcgacgcgcaagagcaacttcgggcgcgcttggattgcctgcttgaacccactggtgcggggatagatgatttagttgacacgcctgcgggaatctggtggggatttcgctggcacaccggatttcaagcaaaccccgcctcgggaaccgctccggacttcggcgttggcccggttcgtatgtcaatcgattgccgtctgaaccgggacagaatccgctgtcccggttcgcgatttttgtccttttttacaaacagggacaagccaatctccgcagttcatatgctccgtaatacaaaatcggcggaatagagccgatcccggaatcaacatgttgtcccggttttcacataaaacgattgacattcataccgggacaatgaaaattgtcccggttcgtgaaaatcgcccgaaaccgcgaaccgggacagcggattctgtcccggttcgcgcgtcaaacggttgatatgcggaccgggacaagccagtggcacggcgacacagcagatgcgctcaattgcaccgtaagccgtacggtttcgtcactttttcattcgcacaacgagcaaaaccacatgacctttgtgcgccaccgccacatcaaccgaccgtcgcctttattgtggcggtttccagtatggcaacaggacagaaaagcctcctccggtgagagccggaggaggcttgggtggaagcggacctttacttcacagagtcctgcaattcaggactggcctacggccagacccaacatgacctcgcgagtacgcgacctatccggccgcccgggccgggaaacagcccacggggctgtttccttaatcggctcgtctcgctcgacgcggtgaagtaaagcagcgcctgcgctgttttacttgaccgctcccctcatcacaccaccgacaacccacttttgagcgaaaatgtagacgatgaggatcggggccatggccatcaggtagctggagaaggccatcgggtagttggtggcgaactgcgagctgaagacgtactgggcgagcgggatggtctggttcgactggtcggtcagaatgatcaacggcaggaggaagtcgttccaggcccacagtgcggtcaggatggcgatggtggcgttaatcgggctcatcagcgggaagatgatggtccagaaaatgcgccacgtggatgcgccatcgattcgggccgcctcttccagcgaaaccggaatcgaacggatgaagccagtggcgatgaacaggttcgtgcccaggccgagcaccgtgtacaggatgatcaggccgacctggttgtccaggtgcagggagcccatctgcttcgcaatcggcagcatgacgaccgggaacggcacgaacatggcggcgatgaagaagtagtacaggaagcggaagaagcgcttatccatgttgcgggccacagcgtaggccacgaaggtgttggtcagcaaggtgagcaccacggcggccaccgtgatgatcgcggagttgagcgcggccttcgggtagttgaccttggcggaggcgtcggcgaagttgtgccactgccacgaggtgggcagggcgaaggtgccggcttcggccggagtcttcagcgcggtgacgatggtgaagtagagcgggatcagaatggtcaggctcagcacggccacggcggcggtcagccaccagttgatcttgtggtccctgcggaacttggcgggcttgccggacttggacggggtaactgttgcagtagtcatttcttatcctcccctaaatcagatctgttcctggctgcgggagatgcgcagctgtacgaaggcgatgatcgccagcacgatgaagaagagcacggcgtttgcggtctggtaggcgtactcgccaccggtcaggccacccttccagatgaggtaggtgacggtttcggtggaggagttcggaccgccctcggtcaaggcgacgacctgatcgaaggtgccgagcgcgttcttcatggacagcacgaggttgatggtgaagaacggtccgatcagcgggaatgtgatcttccagaacttctgccaagcgttgacgccgtcgatggcggcggcctcgtagatttcgtcgtcgatggtctgcaggccggcgaggtagatgagtaccgagtaggcgatgccctgccagacggcgaggaagacgattgggatccagctgagttgctcattggtcaacagcgaggtggacagccacttgatgcccagcgccttgccgagctcgggcagcgggttcatgaagatgtacttgaacacgtagccgatgaccagcacggagagggtgtaggggatgaagaagacggctcggaagccattcttgaaggcgatcttcgagttcagcagcaccgacaggaacagggcgatcacattaatcagcaccgtgatgagaatggcgatgaggaacgtgaacaggtaggcgtggcccacgcggttgtcttggaagagggcgatgtagttcttcaggccgatgaacttgtaatcgccgtagccctgcgagttggtgaaggaatactttacgccgtcaagaaatggcaggtacaggaagaaggcgaaaatgatagccgccggaaccaccatccagtagtaggcggggtccaccttgcgggtggagaaggcggagaccttcttcttggccggtttcttggcagcggtcttggttgcggttgcgtgtgacatgatgttctcctctcctaccgatcactcgaaggtcctggcttggaccttgtcccattcggtctgcatctggttcaggaagcggtcggtgttgccggaggccaccatggtctgcaggtagccgccgatgttgatggacgaaggaatgtagtggtcgcagaagtcggccagtcggttttcctcgaagaacgggcgcacggtttccagcgcatcgttgccgaagtaggtgtccttcagcggcgtgatggcggactgggcgtcggcgtaggcgtcaagctgatccttctgcatgaggaactcgacgagcttcatcgcttccttggggtgcttggtgttcgcaccgatggtgagcatcacgtcgtcgccggcggtgaggatctgctcgctggcgtcatcggtggccggcatctgggcgaaaccaagttcgatatcggggttgatcagcaggatctgcgggatggcgtaggtgccgagcgggatgatcgcggccttgccttgggcgaagttctgcgtgccctgctggtaggtgacgccggtgtccgcagtggagtaggtgaagagctcggattccttctcgactgcggtcttccacagttcctggaacgtggtcttgccttgcttgagctcggtgtacttcgattcgggaaccagcgtgccggccagggaggcgagcggtgcctgggtggtccaggcgtcggccacggaaccctgcagcgggttgatgccggcgtccttgaaggtgttgagcatatcggtgaactcgctccaggtggtcggcggattctccgggtcaaggccaaccttgcggaacagagccttgttgtagatgtagccggaggcgttacccgcgaagggcaggccatacaggcgcttcttggaggaatcggtggtctgcaccagattcttggcgatctgcaccatgccggggttgagggtgtccacaatgggttcatcggtgaagtcgtagaacacaccggaggcggcgaagttgccgaagctgatgtcgccgttgaaggtgatcacgtccggcacacgattcttgacgaaacgggtgcgcagatcggtctgggcgttggcggagttgttgatgttgaccttgatggtcgggttctgcttttcaaaatcggcgaccatggacttgaactggtcggcggcctcggacttgaactggaagaaa

SEQ ID NO: 3175 - DNA, 7018 bp, Unknown
  R53_2m  MAG No. k141_2193
acggaacgctacacggtcgagcggttcaggcagtgcaagaagacggaacgtcatctcgcgtggttgaagagtcgtaaggcgggtgtgggcgggtctgacatgagcacgatcctcggccttaacgcttacaaaacgccttacgaattgtggcttgagaagaccggccgtgtggaaccggaggatatttccgacaagtgggcaatcgtcaagggcagtgccttggagaacgagctcaggaagcgtttccgctcgaatcatccggagatgctcgtcacggacggtacggacaagcagttcatcgcccgcgagaggccatacctgcgcgcgtctcttgacggcatcctgcaaggtggggacgggagtttcgggatcctcgaaatcaagactgccggcaatcgtcgagcgggggactggcatgacgaggacggcaacctccgaatcccgccatactacttggctcaagtcgagttctatgcgctcgtcactggatggacatggggctacgtgtacgcggccatcggagacgacgagccggtagagatcccgttcgaggccgacgtggaggatatggccgcgatcgacaaggccgcatccgacttctggcatttcgtcaccaccgacacgccaccgcagctcaccacaggcggggacgtgcagaaggcgttcccggaacccacgccggacatcgtggacgaaagcgccgacgatgacctgtacgacctgctcgcaagatacgagagcgccaccggaatgctccatgacatgaaggccgctcagaaggaattgcaggagcagatcatcctgcgcatcggctcgcatacgggcgtgcgctgcggcaacctccaagccacctacaagccgacgacccgcaaggaatacgtatacgtcgtcaaagccaccacataccgcaaattcacattcaaatctaccgaagaaaaggagcaataatcatgggacagatcgcacagcaggcgcaaggccagcagatggtcgaaatgacgccgaagaagaacctcaagatgctgatgaggaaaagctggccgcgcatcgccagcgtcgtcggcaacaacatcagccccgaccgcctctaccagatgtgcgtgtccgcgatcaacaaaacgccgaaactcgcggaatgctcgccgcaaagcgtgctctcatgcttcatgacctgttccgcgctcggactggaaccgtccaacgtggacggattgggacgagcctacgtgcttcccttctacaacaagaaatccggcggaatggaagccacgttcatcatgggctaccgtggcatgatcgacttggcacgacgcagcggccagctcgtggacatcagcgcccgagccgtacaccagggagacgaattctcatactcgtatggtctggacgaggagctgcaccacgtgccatgcgccaaccccggcgaactgacccacgtgtacatggtcgcgcatttcaaggacggcggacactacttcctcgtccttaaccgtcaggagatcgagcaggcgagggcacgcagcaagagcggcaacttcggcccgtggaagaccgattacgaggccatggcgaagaagaccgccatccgtcgcgccgccccatacctgcctttgaccgtgcaggcgcagaccgccgcctccaatgacgacaccactcctgactacggcgacgtgttccagcctgtgctcgaggacgatatcgtcgacgaagccgatgacgtgaacgccgaagtcatggagccggacatgtcggacaccggcgccgagcctgagacggaagcaaaggacggtgagtgatggacgagaagattcgcaagtacctgcaatggctggacagtaagtgcgccgaagctgaaagagctaaggaattgtgcctggacttctcttacgacgatgggcgtggggacgcttacggcagggcaaaaggcgaattcatacacatcttcgacgtgaaggatggtgagtgatggccggagagaccgttatcacgatcgtcggcaatctgaccgccgacccggaaacccgcacgactcagaatggtggcacggtctgcaatttcatcatcgccagcacgccacgccaatacaacagccagtccggccagtgggaggacggtccagcgttgttcctccgctgcgccgcttggcgtgacctcgccgcgcattgcgcgcagagcctatcgaagggcatgcgcgtgatcgcgcagggacggttgcggcaacactcctatcaagctcaggatggctccaaccgcatcgtgatcgagatgcaggttgacgagatcggcccgtccctacggtacgcgaccgcgcaggtcacgcgcgccgacagccaacggtccacgcgaccccaacccacgggacaacgggaagacgcccccgcgacggacccatggaccgccgaccgcgccaccctatcaggcgcaggacgattcgctgcggaccgtcccgcgacggacccgtggtcggacgcggacggtgaattctgatgctcgaatggatcgagccaccggacgtggaaccggtctgtccgaggcatgggtgcgcgttgtatccggcgcgccccatcccatgccccgaatgcgaaatcgaagccgaagaagaggaggccgaccattatgagcgagattgatatcgccatcagcaagccactgtggtggacacagaaccgtcgaagccgcagctgggcggtgacctaccgaaggaagaagctggtcaagacgatgagcctgctcaccttcagcaatctcatcaacggcggcaaactcaaaaagcccgagcattggccggtgcacgtgacagccatcatccacccgctcacccacggacggttcgaccccgagaacgctgcacccatggtcaaggcgatactcgacggcatcacccagtcaggctactggcccgacgacaacgccatatacgtgacaggccccgactaccggctcggcgaacccagcacgcagaagggcgtctaccacatcaccatcagaatcgaggacacgaaatgagctgtcaatacaaggttttcccggtgttttggactggcagtggcattaatcgttgcttgtccaatatggagttgcttgaaaaagctctgaatgatggttggaagattgtacgaatggacaccatcccgccactggaagtcccatgtgccgcactcagcgccacgaacgtctacattctcgaaaagcaaagcgaggacgcgaaatgagcaggactgataccaccgccatgctgtcacaactggtggagagaggtagacgatgagcgggacccgccgatatcgtaagctctccgccgaggcgttgggcacgctgctgaggcttatctctgaggatgagttgacgccgaagcagatcgcggagcgcgccggagtgtcacgccaacaggtctacgagtaccggaagaaactcaagaaccatgagcagaccgcgccgttgaccgacatgtccacgcttgtgatccatcagcgagtcgtcttccgcccggacatgaccaacgagaacccggatgacgtgaacgggccgagcctcatcgacccggacagcagcttcgaatgttcccgatgcggccagtccatgagccgtgaatggttcaccatcgaaggcaaccgaatcaaaccggatttccgctattgtcccggctgcgcgggcgtggctaccccatacagggatgacacgataagccccgatgtgagggagtccggagatgggcaactggcgtgacaaggccgcttgccgtgacatggaccctgacttgttcttccccgccacgcggcaggaggaacgattggcgctcaaggcctgctccacgtgcccgtcgatacgcgaatgcgcacggtacgcggcggaacatgcacggataaacggctacccgttgcaaggcgtatggggcgggataaacagaagcaaaagcaacaactacaaggacaacgaaacggagataagcgaatgagtatcgcggacgatgaagccgagaaggcgtatccgaccagatactggggtggaacgcacgccaaggaacaattctgctgcgacacggacgatttacaggaagcgtacctgcgcggccgcaatgcgccaccggccgatgccgaggtcgaagccgtggcgaaacggctcctatggaacagctgcgaatgggatggcgacgatgactatgcggcatgggacgaggaagacgcatgggattacgcaggccgcttccaccgatggcaggaagactatatccgacaagccagggaactactcacactggcacggaaggcggcaaacgaatgagcaagacgatcaagtatgtggaatgcgcccactgcggagaggttgtcggcacatattacgtgacatgcccctactgcgggtacaagctcgacgaaccagaaccgttctgcccgctattccccaactaggacgcgaaccagcccggaaaggagattgaccgatggcaaggcgcggatacgtgcagctcgtcaacggcttctacgacaacgacaaggtgcgggacctcgtgcgcaggggccgcgccgactctgtgggcgtgtactgcatggccctctcgttgtgcggcgacaggctcacggacggtttcatcccacgccgcgccatgctctccaacatcggcgccacccccgaacaggtgcgggcgctcgtggacgaggggatgctcgaagaggtggacgagggctggataatccacgactacaccgtccacaaccgtaccaaggaacaggtgctgcacgcgcgcgccgccgccaaggaacgcaaaagcaaatcccgatgtcacagcgatgtcacaagcatgtcacagcgtgacagtgttgtgacatcgggacaaacaccagaacaccagaacaccagaacccaaaagaaagagaaagaagaatattcttcttctttctccaaagaaacaagcgtgaaggatttcggtgattcgcgggagtgcggcgaaacggacaggacactggccgcggaatatccgaacctcgacctcaccggcgcatggaacgcattcgtcaaccgccaccacggcgaaaccagaaccgtcaacgactggacgcgccaatggaaaggctggtgccaacgcagggccaacatgagcggcataccaccctcgaaaccacacacccacacatggaaatgccgccacgtgctcgaaaaactcggacgagacgagaaaaccgccacgccagatcaacaagcctgccagatggcgaaacaactcaacaaggaggaaaacgcgaaatgaacagcagaaccaccacccatcccacgcacgaagaactagccaaagcatggcgagaaggctacgccgcagggtggaaagaccaggaatgcgacttcccgcaatatacaagcgaaaacccatacaaggagaccaacaaaatcggaaaggacggtgagtgatgggcggattggacaaggtcgagaaacgtctgattgtcgcactggtggtatccatcatcgcaacgctctttctggcgggattcagcatctatgcgtcttggtatgtgggcacgcatcatgattacgggatgaagacggtcaagaccggcgacgtgacatgggcctgcctgacagaccatggcacgaccatcggctgcgacacagtggaggaataccagtgaacgacgtaggcacgttggacacaagcatctggaccggctacatcgtccggccgaagggtgatatgagactgtacacatgcagagtgtacgaaacgctccaagaggcatcggatgtggcacaggagcgcgccgactcccgccaccggccgtatgaggtgctcgtaacctgcgatacttcgcagcgaatcattaagaccatcgaaccaaggaaaagcaaatgaagaaaatactcgagaacatgatcatcaaatggcatcaggccggatacacgctcgacgaaatcgcgccactcatgccacaagtgcccaaagccgcaatcgcggccatcgtccagcagcacgacaaggagacccgactttgaccgactgccagcactgccacaagcccatgaaaccggcgtccgcgaacatgctctgcgcaaactgccgtgaagactactggcagctcatccaccaactcggacacacccaactaccagccctgcgaagcatcatgctccgccaggcacacatcggccccacaagccacacgccaaacaaaggcaacgcgccactcccgatcgacacccgcgcgcaagacctcatcgccgaatcggaagcatggctcgccgaacaagcaggcaaaatcaggacgcaatacggcaacctgccatggaacaaggcatggcaacgcatcatcaccaacaaacacaccatattgacgatgagcaccgcagcagacgactacaccaacctgcaacacatcaccagacacaacgaacaagccctgacaccggaagaagagctcataatcctcggcacctgcccaaactgccacagcatgctcaccggcacgccagaagccgaatcggccacatgcccagactgccacagcgaatgggcggcaccagcaatcaaagcagcccgagacgaaagactgtggcaagtgcaaatcaccggcacacccagcgatgcagccaaggagttgaaacgatacggcctgaccgtatcacgcaacctcatcagccaatggctcaaacgcggcaaactccacgccacgccgacggaacacaagcggcagtacacgttcaacctcggcgagttggccgcactacttgactgtcaccgttgaaatgctatactgtcgtatgtttgtagaatggttcagccagaaaatggttgggccattattcatatccagcttcggtagctcagtgtcagagcacaagggatagcacagatacccagggcggataccaagccggccatggcttccatggtcctttgaatgcccatgacaagaaaacagtgcccctcatcgatgtcgtgggttcgattccccacccgaagcaccacaaggcggtgaccacatgccaagagtccgcaagaccagccgtcaattcgaaaaagacaagg

SEQ ID NO: 3176 - DNA, 7496 bp, Unknown
  R53_2m  MAG No. k141_2219
actccaacatcaacgacgatgtggaacgtttgcgccatcaggccacggccaacctgctgaccagacgcgactgcgtggtcgtggccaccgtctcctgcatctacggcctgggcactcctgaggaatacgccgggcgtatgctgtttctcaaggaaggccagcagatcaatcgcgacgacctgctgcgccggttcgtggccatgcagtacaagcgcaacgacatcgccttcacgcgcggcaccttccgcgtgcgcggcgatacggtcgaaatcatccccgtctacgaggaactggccgtgcgcatcgaattcttcggcgacgagatcgaccgcatctccacgctgcacccgctgaccggcgacgagatcgacgaggaaaacgaaatccacatcttcccggcctcccattacgtggccggccccgaacgcatggaacgcgcgctcaaaaccattcgcgaggaactcgacgaacgcctggcagaactgcgtaagcaaggcaaggagctggaagcgcagcgcctcaacatgcgcaccacctacgatctggaaatgctcacccaggtgggcgtgtgctcgggcgtcgaaaactattcgcgccacttcgacggccgcgccgccggcaccccaccgcacacgctgctcgacttcttccccgatgacttcctgctggtcattgacgaatcacacgtcaccgtgccgcagatcggtgccatgtacgagggcgatgcctcccgcaagcgcacgctggtcgaacacggcttccgtctgccctccgcgatggacaatcgaccgctcaaatggccggagttcctgcagcgcgtcggccagaccgtgtatctgtccgccacgcccggcgactacgagttgggcttgtccgacggggtggtcgaacagatcatccgtccgaccggcctgctggacccgaagatcgacgtacggccggtcaaggggcagatcgacgatctgctcgccgagatcaaggcccgtgtggccaggaacgagcgtgcgctggtcaccaccctgaccaagaagatggccgaggatttgaccgactatctgctggaacgcggcatcaaggtcgaatacctgcattccgatgtggatacgctgcgccgcgtcgaactgctgcgcatgttgcgcgaaggcaagatcgatgtgattgtcggcatcaacctgctgcgtgagggcctcgatctgccggaagtatcgctggtggcgatcctcgacgccgacaaggagggcttcctgcggtcctaccgttcgctcatccagaccatcggccgtgccgcgcgaaacgtgtccggcacggtgatcatgtacgccgacgagaccaccgaggccatgaggcaggcgatcgacgagaccgaccgccgccgcgccaagcagatcgcctacaaccaggaacacggcatcgatcccaagcccctgatcaagaagatcagcgacgtcaacgacatgctcgccaaggaggatgtggacacccagaccttgcttgaaggtggctaccgcaacgcgggcaaggccggcaacacacacctgggcgtgccggtactcgatcccaacgaggcagacaaacgccacgaggagatcctgaaggccggcctgcccgcgcaggacctcgccgacctgattcgccaactgagcgaacagatgcacaccgccgccgaacaactccagttcgaactcgcggcccgtctgcgcgacgagatccgtgatctcaagaaggagctccggcagatgaccgaggcggggcgatgacccgtcacatacatgggttagtgtagggaatcatggcagaaaccccactcgcatttgaaatcatcaccttcgtggtgctcgcgctgttcttcatcgtcgacctgttcgtcatcgggcgccgaccgcatgtgccctccaccaaggaatgcgtgcagcatatcgccttcttcgtggtcatggcgctgatcttcggcggatgcatctggttcttcgccggctccaagcccgccatcgagttctattccggctggctcaccgaatactcgttgtccatcgacaatctgttcgtgttcgtcattatcatgtcgaacttcgcggtgcccaagcagattcagaagtatgtgctgtccatcggcatcaccatcgctttgatcttccgtggcattttcattctgatcggcgcggccctgatcacccgcttcacatgggtgttcttcctgttcggcgccttcctgatctacaccgccgtcaaactggtgctcggcggcgatgaagacgaggaatatcacgaaaacggcatcatccgtaatctgcgcaagatcatcaagatcaccgacgactacgacggcgagaagctgcgcaccaccaagaacggcgtgcgttactggaccccgatgctcatcgtgttcctgaccatcggcaccaccgacgtcatgtttgccttcgactcgattcccgcgatcttcggcctgaccaaggatccgttcctggtgttcacctccaacgtgttcgccctgctcggcctgcagcagctgtacttcctgctgggtgctctgctcgacaagctcgtctacctgcctgccggcctgtccgtggtgctgggcttcatcggcgtcaagctcatcatggaggccctgcacggcaataccttgccgttcatcaacggcggcgaaggcatccattgggtgccggaagtgcccacatggctgtcgctggctgtgattgtggtcgcaattggcggcgcatccgtggcttccgtgatcaagatgaagagcatggaaagcgccgagaaggcctgaaatcgttagagaatacaacccttaaacccagtcaacacaacaatgtgagcgctcacaacacaccgtgaagaaaacttgtcatgagtcggctcgcgctagtagactgggtttcggcaaatggggcaatcgtgcctcgaaccaaattgaacaagaataggcaggcattcatgcgtaaagccaagatcgtagacaccatcggtccttccaccgaggattacgacaacctcctgaagctcgttgaagccggtatggacgttgctcgtctgaaccgctcccacggcacccccgaggatcacctcaaggtctacaacaacgtgcgcaaggccagcgaagccactggccgcaacgttgccgcgcttgttgatttgcagggcccgaagattcgctgcggttggttcaagaagaacgccgatggcgaagacaaggttcagctgcagctcggccaggaattcgtcatcaccactgatgacgtcgagggcgacgagcacatcacctccaccaccttcaagggcctgccgggcgattgccacccgggcgacccgatcctgatcgatgacggcaaggttcgtcttgaggtcaccaaggtcgagggcaacaacgtgtacaccaaggtcgtcgtggccggtcctgtgtcctcccacaagggcatcaacctgccgggcgtcgccgtctccctgccggctctgaccgagaaggatgaggctgacctgcgttgggccatccgcaccggtgccgacatcatcgccatgtccttcgtgcgtttcgccaccgacatcgaccgcgcccacgagatcatggacgaggaaggccgtcgcatcccgatcgttgccaagatcgagaagccgcaggctctggagaacctcgaagagatcgtcaagaccttcgacggtgtcatggccgcccgtggcgacatggccgttgagtgcccgctggaagaggtcccgctggccaccaagcgcatcatcgagctggcccgccagtatgccaagccggtcatcgtggccaccgaagtcctcggctccatggtgaactccccggtcccgacccgtgcagaggcctccgactgcgccaacgccgtcctcgacggctccgacgccaccatgacctccaacgagaccgccgtcggcaagtacccggatgtgaccgtggccaccatgtcgcgcatctccggctacgccaccgaccacggcttcgaccgcatccccgagctcaagaacctcgacatgtcctccaccggcgccgtttcctccgccgccgtggacctggccgacaagctcaacgccaaggccatcgtcgcctacacccagaccggcgccaccgtccaccgcgtctcccgtgagcgtccggccgccccgatctatggtctgaccagcaacgagcacacttaccactggctggctctgtcctggggcaccgaagccttcctgctcaaggaggactaccacgacaagtcccgcaaggatctgatgatctacacggacaagatcctcaaggacgccggcaaggttgctgacggcgacaagatcgtcatcctgagctctgctcagggcgatcaccagccgggccgcaccgactccatctacgtgcacaccgttggcgcttgcgactgatttcaggccgctggtagctgctgacagctagcacatagcacgcgaaagccccccatccagaaagtggatggggggctttcgttatccgttatgttgcgattgtgcggtgattgcaatggcacgtagtcaccgcgatgatcgagcgtggtgactagtcgttgagatgatcgagcgtgccgctcttcagacgcagaatggcgaccatggtcttggcatccacaatcgtgccattgaccaccatctcataggcatcgtccaccgacaccatacgcacgtcggaacgcggagtctccgggccgatttcctgacgggaagccggggtaagtccggtggcgaagaagattgcggtgtgctgggtggaatagctcggcgtgttcataaaacgggtgaactgcgtaagcttggaggcatcgaaaccagcctcttcggccagcttgcgcttagccacatcggtcgggcgttcggacgggttgttggcgtggcctgccggaatctccaacgtccaacgatggttggcgatgcgatactgctcgaccagcggaatcatgccgtcatcggtgacggccagcacagccacagtgtcgccattgttctcctgaacaaagtagcgttcaaacgaaccgatctgattcgactcataggagacgtgatcgacattgaaataatgcgtctccacaatctgtctacgggaaatctccttgaccggagaggggcgccagggatcgaactgacggtaagtttcgttgctcataagccctcctaacaaaagcgatacatcgaaactacagcccattgtaagcggtgaaaccacgcagaagaacgggcaacacacgggtacgccgtccacgatatcgacgtgtttcgcctgttttaccggggggaaatggaggactggcgcgtgtcttgtgtcgcaggagtcgaatcggtatgctactctcttcagagtgcttaggcacgccctcgtatcccaattggtagaggaagcagcctcaaaatctgcgcagtgtgggttcgagtcccaccgagggcactttagctaggagttcgctgaaattattacgaaccccattgttgggtaattcaagaaagaggttggcatggctgcaaggaagaagtccgaagaaccgagtatcaacgtcgatgaggtgctgaccgacgaagaactcaaggccgtagccgatgaaagcgaacctgctgagcgcaaggccgtggccgaggatggtccgcgtaccgtcgtcgtggccgaggatgaagccgtgaaccgcatggatctggtcgccatgctggaagacaacggttatgaggtcgttggtcaggccgccaacggcgaggaagccgtggaactgacccgcaagtatcgccctgatgtggtgtgcatggatgtcaagatgccgcgtatggacggcatcgccgctgccggcattatctgcgatgagaacatcgcccctgtcgtcatgctcaccgcattctcccagaccgatctggtgaagaaggccaccggtgccggcgccatggcatacgtcaccaagccgtacgaggaatccaagttgctgccgaccctcgaggtggccatgggccgtttcgccgagatcaacgatctgctggacaacgtggagcgcagcgaacgcaagctcaaggaaaccaccgaccagctcaaggaaaccgaagagaagctcaagaaggccgaagacacgcttgaggagcgcaagctcgtcgaccgcgccaagggtctgctgatggacaaggctgacttctccgagcagggtgccttccgttggattcagaagacctccatggaccagcgcatccccaagaagcgcctggctcaggccatcatcgccaagtacggcgatccgaagccttctgattcgggcgaacgctgattatcggcatcaccgtgctgagtcgtaaagcaacacaaacacactatgggagaggccagcgtgaccgtacccaccaatgaaacattgctggtggtggacggccactcgctggccttccgtgcatttttcgccctgccggtcgacaacttcagtacttccagcggccaggccaccaacgccgtctggggttttgccaccatgctcgcgcaggtgatcgatgcggagaagcccgaccatctgggcgtcgccttcgatgtgaagggcggcacattccgcaatgagatgcttccgcaatacaaaggcacccgtgaggcggctcccgaagagctgctcacccagctgccattgattcaacgcatgctcacggccctcggcgtcacctacatcgagaagccgggattcgaaggcgacgatgtgatcgccaccctcgccaccatgggagacaaggccggctaccacacactggtattgtccggagaccgagacgccttccagctggtggatgacaacgtcaccgtgttgtacccgggccatcacttcaaagacctgaagcatatgacgccgcagtccatcatcgacaaatacaaagtcactcccgcacaatatccggatctggcggcgctccgcggcgaaaccgccgacaatattcccggtgtgcccggtgtaggcgatggctttgcggccaagtggatcaaccaattcggttccctcgacggcatttgcgagcacgccgatgaaatcggcggcaaaaaaggcgaatcgctgcgggccaatatcgaccaggtcaagctcaatcgcaaagtcaacgcactggtacgagacgtcgatcttggcgtcgatattgaggatctgacattcggcaccgtggacgtggcacaaatcgacgccctgttcaaggagcttgaattcggaccgcgtaccaggagtcgtgtactgaaaaccttcaataccggtgccaaggtttccaacacatacggagccggcgagtctacgaataatgaacaggacgagcaggataacagtctcgatctgaacctgccggaacccacgagcatcacctcttcggagcagttcgacgaatgggtcaaggcccatcgcgccgaggtcaaagttcccggtgaaatcgccgatttcacggtttccgactatggcgtgggatcgcagcggcatgccgtctgcggcgacgcggtcggccgcgcttggaccgtggccgcgtggggcgacgaa

SEQ ID NO: 3177 - DNA, 7912 bp, Unknown
  R53_2m  MAG No. k141_2249
tcgccaaaaagacgacgccagaatatttgggagagattcatgaacacacgtcatgtcacttcactggtcgcggccggtgcggcaatcgtcatgctgctcagcggctgcggatcgaccggcatctccaattccagtaatgcttcagattccaacatcatttccgtgtacggcagtgagccggcacacccactattccccggcaacaccactgaggccggtggcggcaaggttgtagaccagctgttcgccggtctggtgacctatgatgcgcggggcggcatccacaacgaggtagcagacagcatcacctccagcgacaacgccacgcattacgtcatcaagctcaagagcggatggaagttcaccgatggcactccggtgaccgcgcactccttcgtagacgcttggaattacaccgccaacagtgccaacaagcaggccagcgccagcttcttcagcacaatcgaaggctatgatgatctgcaaaagccggacgtggaccccaaggccacgctgagcggcctgaccgtcgttgacgacaacaccatcgatgtcaagctcagccagcccgactcggcattcccggtcaaggccggcagccacgcctacatgccgttgcccgaatccgcgtttaaggacccgaagaagttcggtcagcacccagtgagcaacggcccatacaagttcgtgtcctggcagcacaaccacagcatcgaaatggtgaagaaccctgactacaagggcaatcgtgtcgccaagaacgatggcctgaacttcaagatctatacctcgcctgattcggcatacgccgacctacgcggtggcaacctggacttcacgaacacgattcctgacaccgcacttacctccttccaatccgacaagtcgctgaaggcatacaacgagcccggtggcaatacgctcaccttcaccattcctgaatggctggaacacttcggccagaacgaggaaggcaacctgcgtcgtcaggccatttccatgtccatcgaccgcaagaccgtcgccgagaagatcttccacggcaccgccacgcccgccgtcgacttccttgcagccccgatcagcgcctactccaaggaactcaagggaaatgaagtactgaagtacaacccgtccaaggccaaggaactgtgggccaaggccaacgccatctccccgtggagcggtgagttcggcattgcatacaatgctgatggcactgcgaagaactgggttgaggcaatctgcaactacatcaagaacacgctggatatcgatgccaagagcatcccgatgtccacttccgacgaattcctgtccaatgtggattcaggcaagatgacctccgcataccgtagcggttggggccctgattatccatccgcggacaactatctggtacagctgtacgattccagttcggccgacggcaagggcggcaacagcggcaactacaagaaccccgagttcgatgccatgatggacaaggctctttccgccccgtccaccgaggaagccgacaagtattatcagcaaggtgaggagattctgctgcaggaccttccggctatcccgttgtggaaccagaatgccaccgcagccagcacctccgcagtctccggcgtcgcattcgactacggcggcggcccagtgttcaccgcactgaccaagaagcagtaagcagtaagtaataaacagacagcgctagccccccgctggcgggggctgtcggcaaagccgactgggggtggtctcaaacagcagaccacccctaatcttgttatatgagcgagctcccgtaagcgggagcaatcgagaacatacaggagcacataactatggaattcaccgtatccggcactaccgtgcgattcgatgaacgaacaatgcagttcgcttttacgcgcgacggtgccgaatggaatacctgcgctgattccaagccgaccctgcaatgcgcgcaaggcaccttcgcgttcgcggatgccacttccatcacccatgagcagcgtgaaaccggcacgggaaccggcattcgcagcatcttcaccggctttgggcacagcgcatactcctttgaaacctatgtatgggtggagcgtgcctcaggcgatgtgctcttcgaatggattccgctcaatgagcaaggcctgaacatcaccaatgtgacgtggcccgcagccatggacttcgattgcgccgacgaccatgacacgacactcatcacccatgagcaaggtgtgatgatccccaacacatggcctaccgccgtaagcaccaaagatatcgccttcgacggccgcttcgaaacggctggcggttacatgccgtggttcgcgcagctccgcgcagacggacacgggtatatcgccatctgcgaaactccatggaatgccggttacggcatcgaccatcccagcgatggcccgtacacccatatcaatacttggtttgagccaagcctcggcacaatgaattatcgccgcgtggtacgctaccagttcctcgaccacgccgatcacacggcggtgtgcaaggcctatcgttcgtacgtcaatgaacgaggtcgcttgcgtacgctcgtcgaaaaggcggcgcgcaatccctccgtgcgtgacctgattggtcgttcatgggtgcacatcggcatcaaaaccaaagtacagcccgactcgtactactacgataaggaccaccccgagaaaaacgagtcactggtcaccttcgcacagcgcgaaaagcaaatgcgaacattgcacagcatgggtgcaggccgactgtacatgcacttggatggttgggcacagcccggatacgacaacgcacaccccgactatctgccggcctgtcaggaggcaggcggctgggaaggcatgaagtcgctggtcgacgcctgccatgagcaaggcgatattttcggcacgcatgaccagtaccgcgattactacttcaccgcgcaaacctttgatgccaacaatgcgattcgtctggcagacggtacgatgcccgaacacgcacgctgggcgggcggccgccagacctacctgtgcgccgagctcgcaccggactacgtacgccgcaatttcgccgaaatcgccgcgcatggcatcaagctcgactgtgcatacttggatgtcttcacctgcaacgaaggcgacgaatgctcgaaccccgaacaccgcatgacccgccgcgaatgctttgaccgccgcgccgaatgcttcgaatatctgctctcgcacggcatcctctcctcgtccgaagaggtatcggactgggcagtgccaagcctgatattctgccattacgcgccatacgacttccagatgcgctcacccaacgagccgcgccaaggtgtgccggtgccgctgtataacctcgtctaccatgattgcgttatcgagccgtggatgatggagcgtgtggtggacggcgacgattacatgctgtacgccttgctcaatggcggagctccatacctgattcgcgatgccgcatacatcggcgttgacggcgacatggacgacgaacagcgcgctcgcacggaaaacgacatcgaacgctgccatacggtcgctgcattccatgagcgggtcggcatgcaggaactggttcgtcacgagttcgtggatgatgatccgctggtgcagcgttcggtattcgcggacggcactgcggtcacttgcgacttccatacgcaaacctatcgcatcaccgattgaccgcatcactgactgaaaaaacaatgacacacagtgggttccgatggactggtggcaaattgccgccgataagcgggtaatatagccaacagtgtcaccgtcgaaacaggagtagtgaaatgccgaatcgtgcagaacgccgtgcccaagccaaagcaggccgcaggggagtgccgtcgcagtatgaccagacccgtggccgtggccgttcgggaatgattgacgaatatcagctgcagcagaagtcccagcgtctgcaggacggcaccgacggcaccgaatggaagcccagcggcggtacgattgcggacaccgaaaccctgctgaccactaacccgaactacacgaatccgaagatgttcaaggcaccgcattcgctgcgtcagtggttccgtgtgggcagctggacgctgatcgctatcgcgattatcgcgttcttcgtggttatgtggctgccaagccatccgatgtggctggtcatcaccgtttccgcggtgttcattgtgggtgtgctgagcctgttcttcaccgctggcgattccaagcacaatccgaatttggatcagaacggcacggcagtctgatcttttgcccggtaaatccggcttgaaaagcaaaacgcacgacggaagttgtgcgttttcttgtatgcggtgccctaaagtaagaagtgcttgagtttctttctgacgcacgaaggagaggcagtccgatgaaagttgatattctaacccgcgaatacccgccgcatgtgtatggcggtgctggcgtacacgccgaggagctgtccaaggttttggccgagcgcattgacgtgaccgtgcgtgcgtttgatggcaagcgcactgaggctgatatccccgcgattcccaatgccgctaatgccaagggcagtctgaaggttgtcggatacgatacgccgtccgagcttgccgatgccaatccggcattgaagaccttcggcgtggatctgcagattgccaacgacgttgacgccgatatcatccacgcacacacatggtatgcctgcttggcgggctacatggccaagatgctgcacggcactccattggttattaccgcgcactctctggagccgttccgcccatggaagcgcgaacagctcggcggcggctacaacctgagctcttggggcgaaaaggaagcctacgagaacgccgaccgtgtaatcgccgtttccggcggtatgcgcaaggatattctgactgcttacccgaacctcgatccgaacaaggtggttgtggtgtacaacggcatcaccatggccgacttcgctaccccggcaccagacgatccgggttggaaggtgttcgagcgttaccacatcgaccgttcgaagcccaccctgctgttcgtgggccgtatcacccgccagaagggcctgccatacctgctcaaggcactgcacctgatttccaaggacattcaggtggtgctgtgcgccggtgctcctgacaccccggaaatcgccgaagaggtcaagatcgcgttcgccaagctggatgaggaacgcggcaacatcgtctggattgaagaaatgctgccgaagcctgagctgaatgctttggaacacggctgtgatgccttcatctgcccgagcatctacgagccgctgggcatcgtgaaccttgaggccatggcctgcggtctgccggtcgtcgcatccgccactggcggcattccggaagtcgtggtcgacggcgaaaccggctatctggtcccgatcgaccagctgcacgacggcaccggcacccccaccgatccggacaagttcgtgcacgacatggctgccgccatcgacaggatcatggccgaccccgaactcgccaagaagatgggccaggccggctacgaacgcgcccgcgacgtgttcagctgggagaccatcgccgacaagaccgtggaagtctaccagtccgtgctcgacgagcagaagaagtaagtagcgctgcaacgagtgctcccctcagtccggctgcgccggccagctcccctcagggaggggagctgtcaccgcagtgactgaggggagtcgtcagaccgcgaatcataggtagtatttcactcatgacaaacaccgtcctccaactcgacaacgtcgaattccggcgtaaccgtcgcgtcatcatcaccgacgtgaacctcaccatcaacgcgggggagcgttgggtgctgttcggtccgaacggcatcggcaaatccaccgcggtcggcatgctggccacccgcaccttcccctcggaaggccgcgtattcatcctcggccatcaactcggcaaatacgacgtattcaaactgcgcacccgcatcggtctcgcctctgccgacctgggccggcagttccccgagttcgaggacccgctggacgccgtggtcaccggcctgtccgccgtgaccgggcgctggcgcgacacctacacgcaagaggaatacgcccgcgcccgccagctgctgcgcgattttcgcgtctcctatctggaaggcaaggagatgtggcgactgtccgaaggcgaacgcacccgcgtattgatcgcccgtgcgctgatgggcgatcctgagctgctgatcatggatgagccgactactggcctcgacttgggtggtcgtgagcaggtgatgcgcacgctgagccgaatcggcgaagagaactccgagcgtgccgtggtgctggtcacccatcgcttggaggagattccggccggtttcgaccacatcgccattatgggacgcaagccgattcccgctgaggacgccaccgaagcgggcgtggactcaatgggtaatcccggtgctggcaccatcgtctacaccggttcgttggagaatggcctgaccgacgaacgcttgtcggaattgttcggtatgcccatcgaagtccagcacacccacggccgctgggccgcctacgccgtgtgatgcttgtaggtttttaggcgggattttcttcgccccctctggaggggctgtcagcgtaaactgactgggggaggtccaaccagttacgaaggtaaccatgacaaccaatagcaaactcgtattcatcgatatcgacggcaccctagccgacgaaaaccacgtcgtacccgaatctgccaaaatcgcttgcaaacaagcccaggccaacggccacaagctcttcatctgcaccgggcgttccgtgccgaaaatcgagcgcagcatcctcgacctcggtttcgatggcgtggtttccgtggcgggcgctcaggcgaatatcggagacaggctgctgttccagcatctcgtccctcctgaagcggtcgatgcggcgatggcgtattttgccaagcatcatatcgagagctaccaatggcaaggtgcggatggcatgtacatctcggaaggctaccgtcaacatctggaatcgaaaggcaagacctggaatcgtggcgaattcgcgcgattctggcacctgttggatgaggtggaggtaccggctggctcgactttgggacagacgattcgtgtgagcaaggggtcatacttcacctcgccgaatcctgacgtgactttcgaggagactcaacatgatttgagcccatggtttgagctcgtgcatggttcgtatgacaagatttccccgaacaatggcgagttgctgattaatggcatcgacaaaggtaccgctgtgcgcgacgtggcttttttgctgggctatgccattgccgacaccatcaccatcggagactccgacaacgacactgccatgctcaaggccgccggcacatccgtagccatgggcaacgccattcacggcatccaagccttctgtgacttcaccaccaccgacattcaccagaacggcctggccaacgccttcaagacgttggaactggtgtgaggctatgtcgtttgctctcagacgaaggatcctttcgtgctgtagtatcgctattgaagcattaaaatctggaatgtcatttacagaagttacttattacctcaatcagctttatttcatgcatcaaggaacgtaccccttcgtctgctgcacacggaagctaccagatgaactcacaaactgcaacctatcctgtagtttccattcaatccaagctatcaacggtagggttattgcaatagttccctcatggataaaaggcaaatgttttcgcttaccagaaagtctcttagtcttttccaataagaaa

SEQ ID NO: 3178 - DNA, 3145 bp, Unknown
  R53_2m  MAG No. k141_2391
caccaccgtccggtccgggttctgccgctcgcgacgctccggattgaagttcttgaactcgatagcgcgcgtgtacggcacgtccgcgtcggagaaattcatcaccgggcaaccgaaatggtcgccctcgtcgtaacggacctccttgaagtccaccgtgcgccacttcaggtcgccaagctcgtaaccgaagtaacggtccaccggacccgtgtacaccaccggcacgcccgcggccttcagcgccttcttgttgtacggctgggattcgtcgaagaagtccacgcccagcgaaaccgtgatgcgcgggtcatcgatcatgcgctccatccacttggtgtagccgtccgcgggcaggccctcccacgtgtccttgaaatagcggttgtcgtagttgaagcgcaccggcagacgcttgacgatggccgccggcagctcggcagggtcggtctgccactgcttgcccgtgtagttcttgatgaacgcctcgtacagcggtcggccgatgagctggatgcccttgtcgttcaggttggccggatcggtgccggccagctcgcccgcctgcccggcgataagcttctgcgcctcggccggcgtgtaacgcgcatggaagaactgattgatggtgcccaggttgatcggcagcggatagacctcgccgtcatgcgtggcatacacgcggtgcacatagttcgtgaagctcgtgaaacgattgacgtagtcccacacacgcttattggacgtgtggaacaggtgcgcgccatacttgtggatctccgcgccggtctcctcatcaaagtacgagtacgcgttgccgccgatgtggtcacggatatcgatgatgcgcacgcgcgcgccggtgtgctccaccgcctgctgcgccaccgtcagaccgaacaggcccgcgccgacgataacgagatcgggatactcaacagaatctgccatgctcaggcaatccttccggtaataagcgttcaagcgcaaggttcgattcgtcattatcctaccgatgagacgagccataccaaaattacgagctcaaactcaatgctggattgtcacatatttcattccacacagatttatggctcttcaacgaactcatcaacgatttgatcctccgtctcgccgaggaacacctctatgccccatactggtcacaacagatactcgatgagctgaggagagacctccaattacgcataggagaagagcgttcggcgcaacgtatcaatgcgatgactgccgcattcccaaaggctctagtcactggttacgaaagcctcatcaaaaatatgacatgcgacgagaaagaccggcacgtacttgcagcagcagattatttacccgcacaaaccttggtcaccttcaacacgaaagattttcctgaaacttcgacacagcctcttcgcatcgaagtaaagagacccgatgatttcttcctcgatgtattggatctcgatccaggaagagtggcaagagtttgtcacacggcactgctgagctataaatgatatccacaaacgcctgaagactacgcagacatgctccggaaaagcggtgtacccgaatttgcgaatcgcctctaccccattctcgatgccttgagtctgaattgacttccacaggtgtcttcatcgtcaataatcaaacatcctcgagcaaaagtaccccattaaacgttgcgcagctcggctaggaagcgtgccatactggatacgtccgcatatacaaagaggaagcataagccttgccgaacaacgccactcccctcatctccgtgatcgtgccggtgtacaacgccgaagactacctgcgttactgcattgattcgatcctgcagcagtcgtatacaaacctcgaggtgattctggtggacgacggggccaaggattccagcccggccatctgcgatgagtatgcgacgcaggacagccgcgtcaccgtgatccatcaggaaaacggcggcatcgccaaggcccagaacaccggcctcgatgccgcgcatggcgagtacatcgcgttctccgacaacgacgacatcctcaaccgccgcaatatcgaatacctgctgcacgcactgcaaagcaccggggcggatatgagcaaggcccgctggcgccagttcggcgtctcccagctgggcgaggtgtccaaagaggctgaggcaggcgcgcaggcgcccggcaaaatcaccgtgttcgagcacccgctcgccgcctaccagaccgtgttctgcaagagtctgcgactgcttggcagcaaactcggccgcaataccgaggcccgctacttcaacgaggcgaactggtgccgcctatacaagcgcgagctgtgggacggcctgcggttccccgagggccattacgcgcaggatatccgcatggcaggccccctgtacgcccgcatgggcaaagtggccgacatcgattgcgtgctctactactggcttcaggagcccgactcggtgacgcactcaaagcgaaccgccgcattctggcacgataacgtgctctccgcagccgagaatttccaattcactctggagcagggcatcaccccgtgccggaactacttcggtctgaccgccagcgtgcgcgatgaaggcaaaggcctcaaggcgctcagctccgaagaactacatgacagcgactggcagaaccatctcgatgacgtggccaccatgcgcgccctgatcagcaagctgagcatcggcgaacgcctgaaatgcgcggtacttgccacgattcgctcctgcgagaacgttgtgtatgacaaccgcattcactcgatgaagtagagcaatagccgaccagcaaacccttatcatcagcaagctagggcgcgctggcttaccttcctatcgtcaactatgactagtcccagcaggaatactggcaacaccgggagcacataccgtccctgtattccttggaacactccgaatcgacccatcgattccaagtcattccaagtcattcccacaaagagcacgaacgctgctatctcagcggctgcaatcactagggccaagatcaggaaccgatactttcccacccatgcggacggtgccatacgagcagccccagttgtcttcaccgtatacaccaacgccgcaagccaaaccagtacaagcaca

SEQ ID NO: 3179 - DNA, 4659 bp, Unknown
  R53_2m  MAG No. k141_2440
gatccggatgcgttcctgtgccgacaagtgggaatacactttcctcatgggcgcaacaccttctccagttagaacctgaacacttccaaccatagagcgggtgttgcgcttctatctagaacccgggttcggcccggggcaaaaccgaaaacgtagaatgaaagggcaacgttccacctacagaaagaaggaacattatgacacttgcatttgttgtgccgggccttgatgaagcggccagtgagaaggccatcgccatcctgcagaaccgactgagccaggagcaggaggccgctctggtcctgaagcacgcacactggaacgtgaccggcccgaacttcatcgccgttcacgagatgcttgaccccgaggtcgaggccgtgctggctcaggccgacgagaccgccgagcgcatcgccactctgggcggcaccccggacggccgcgcggacgccatcgtgcgcaaccgcacgtggaagtcgttcgacgccgagggccgcgtgggcaccgaggagtatctcaaggcgctgatcgagtactatgacgccttcatcgccgacgaccgcaaggccatcgccgagctggacgagctggatgtgatcagctccaacatcatccaggaccacgtgcaggaactcgaaaagttccagtggttcatgcgctctcacctggcataagtaaaagcagtattccgtggctcccctcaaagaggggagccactttcgtctcacgtgaaatagagagtctccacatacataagttggaaaagtgtataaaactccccattttgaggttggaaaacgtagccaaaaccgcattcttatggttggaaaagtgtaaaatatgcgctataaacagttggaaaacgtgcccagcatagatgcaaggcctacaaatgactggagattctcatgctgcgaagaaaaatcgagacacagctggaagcttggagatccgcgccgaaacgcactgcactgctggtcaccggagcccgtcagattggcaaaacctatatcatcaggcactttgcccaacagcattacgaccatatcgccgagctcaatttcatcgagaaccctgacctcgttgcattattcgatcggccccgcgatgccaaaaacctactgatgaggctggaactggccgtaaatacgccattagtacccggcaaaaccctgattttctttgacgaggtccagcgttgcaaggaaatggtcaccgcaattaagttccttgtagatgatggtcggttcaattacgcgctttccggctcgctacttggagtcgagctcgaagatatacgctcggtaccggtcgggtacctgaccgagctggatatgtatccactggatttccaagagttctgctggtcgcagcatatcggcaacgacgtattcgatatgcttgccgaatgctttgccaagcaccaggaagtggatgagttcattcatcaaaggctcatggagctatactccaaatatctggtcatcggcggcatgcctgccgcagtcgactcgttcgtggcaaacggcagcgttgcggacgtgcgcactatacaagagaacataaagcgtgaatatcgccgcgatatcagccaatacgcgcgcaaagaagaccggctgcatatccgcgctatctacgatttggtgcccagcgagttaaataacccaaacaagcgctttaccttcgccaaaatcgaaaagaacatgagattccaatcggttgcttccgatttcgattggctggtcaatgcggatgtagccgtcgccgcgtacaacgtggacgaaccgtgcacaccgttggagatgagcaaggaacgtaacctcttcaaactcttttacaacgacgtgggtctgcttaccggctcgtttctcaagaaaaccgcgctcgacgtactcgacggcaaccctgatatcaactacggttcaatctatgaaaatgcggtggcccaagagctacgcgctcacggatttgacctgtactactacaacagtaagaagcttggcgagctcgatttcctcatccaagaccgcaacgatcacgtactgccgattgaggtgaagtccggcaaatcctacaaacgccatcgcgcaatggacaacgtgctcgcccaccctgaataccatctcaatacaggctatgtgcttggcccgtgcaacgtctcagtcgaagggaatgtaacctacctgcctgtatacatggccggcatgttccataacgaatgacgggccgcacacttagtcaacaagtacatgtcggtcagatggttcggactggtcagagggcccgctctgatcagttaggtcggtctgaacggactggctgggctggtcggcctgagtagcccgtttggaccgatccggttcgcccttgctggccttcacactgcttcagctccagctgaagttcgctgatgcgccgttcgagttcgtcgatgcgccgtacttgtggcgaagtgagactgaggggagcctacaaaatgctcacaggccgagggcaccggtcacggccatggcctcgtgttcgggatcggcctggccgatgtgtacgttgacgtgaatttcgtcatcgcccggctcttcgagaatgtcggactgggattgcagcatgctcggcttcatgaagtggccttggcggtgggaaaggcgttccatcacctcgtcgaatgtgccctgcatgtagacgaacaccacgccttgacggcgcagcttgtcgcggtagatcttcttcaacgccgagcaggtgaccacggcgggctcgccggcggccacgcgctcgtcgatccacgcggcgatggtgtcgagccaaggccagcggtcttcgtcggtgagcgggtgtccgacggccatcgagatggtggcgcattcgaaccatgcgaacgaatccgatcaggccatcagccacatcgccggcactgaagcctgacctgtcatcgtcacagcaccacgcggcggttgaggtcgcggcgtagcgtcttccagccgggtaggtaggcggtcatgcggcgttggaatccggcgccgtggccgctttcccacagatgcgtcatctcatggaccaagacgtattccaggaattgcggttccatcactcccaattgaaggttcagacggatgcggccggttcgcggcgtacacgatccccagcgcgaggtcatgacccgtagcgtgatatgtgtgggctgccggccgatgaccggcccccacttggccagcagctgtggcaacgcggcgttgatcgcggccgccgcttgtcgtttgcgttcgtcggtccagatttgggagcggtcaaaatacggttggacattcgtaccggcttggcccggcccggcgtcaccaattcccggacgactgatatcaccggttttcggacgaccggcaacgcctccatcatggccgctgacaccagctacgccacgacctccgttctcgaagccggcaccctcgttcaatgccatgatggagcgccgttgcgcctcagccatgcgctgctgctgggcaagaatccacgaatgtcgctctttgacgaaatccgcgatacgactctcgctcatccgcatcggtgcggagatttcgacgcggccgctcggcggtttgatgcgcagatacaggtttttgatgggtttgcgcgtcaggtgcagatggatgccgtcaatgtccaacgactgcccggcggcagcggaccgaacggatttcggcgcaccggacttcggagcggtggattgacgacggcgataaggcatgcaagtcattcttacacaacggcggacaacaagcggcacacaatgccgcccctcacgaatcggcaaccggcgctgctacattcaatccgcataccaactgcccacaccggagaaggtcgcgcaggagaaggcctcgctgctcgagatcgacgacagcttccagaagatcgtcctcgtacgcgacgtggtcaaacccgaccgcgacgaacacggcatcctcacgatgagcgtctacgatttcctcctcgacccggacagcctgacgatgtgacgccggacggccggcaaatgccccggaacgcagcccccccactcctcgaacaccgccttcgcggtggccgaggacaccatgacgagacagccgagcatgatggcacccagcagagggtgccgaagttcgcgatgacgtactgccacaggtccgacccgtccgtgtagccgtcgaagcgcagcgcctcgacggggacgagaaatccgtcaagcgcatgcgcggcgtcagatacaccgtcctgaagaaccccggcaagctgaccgacagacggtccgaggcgtccgggaacctgcgggacacggaccccaagggccggccctaccgttcatgacggctcagggaacccctccggacgatgcccaaacgaccggccgaccaggccgggaccgaactggaccgccgggtgttccgggcgtcccacagccgcatccccgagatcgtcgaactcgcccgaaagatccgccgtcatgggcccgacatcctcgggacaatcgaattgggctgttcaaacgccaggctcgaggcgtccgacaacaggatcaaggtcaccatccgcatggcctacggcttccaccacgcgaacaatcccatcgccctcgtcatgctccgccgcggcggactcgacatacgcccaccacaaccaaga

SEQ ID NO: 3180 - DNA, 17898 bp, Unknown
  R53_2m  MAG No. k141_2501
acaaccagaaaaccgcccttggcgacgttgcctcaggcggttttccagcggaaggagagaaaggagaaagaaggaatggaaaggtgccatgcgggcataacacaacaccgcacatggcgaaactatcgaatcagcccatcgggcgcactggcatcataattgatgtgtacacgcccgatggagcgaattcaatcggtcagaccgatggtcactcgacctcagccagggcatcaatgatgtagttgttgatggtggccttgacggactcgaggtgatcggacttggtggcggcgatgagctcggactgcggcttgtcgaggctgtaggcttcgaggtcggccaaggtgacgttgccctcgtcgatgtccttgccgatgccggagtcgtaggagctgtagcgctcggcctgaagattctggatgaagccgtcctggttcatcttgtcggcaaccagcaggccggcggcgtaggcatccatgccggcgatgtgggagcggaacaggtcctcctcgtagaaggaggtacggcgcggcttggcgtcgaagttcagaccaccgtgaggtccgatggagccggcctgcaggacttcccacatgacggcgacggtctcgtacagatcggtcgggaactcgtccatatcccagccgatgagcttgtcgccctggttggcgtcgagggaaccgaggaagccggactcgcgggccacgcggatctcgtgctggtaggtgtggccggccaggttggcgtggttgccttccaagttcagcttgaagacgtcggtcaggtcgtggttgcgcaggaactcgatggcggtggcggcatcgaagtcgtactggtgcagcgtcggctccttcggcttcggctcgatcaggaactgggcctcaaagccgatttccttggcgtaatctgcgcacatgtggaagaacttggcgatgtggtcggtctcgcgcttcatctcggtgttccacaggttctcgtagccttcgcggccaccccagaacacgtagttctcggcgcccaggcgcttgccgatctccaagctcttcttgagctggccaccggcgtaggcgtagatgtcggcgaacggagaagtggcggcgccggacacgaagcgcgggttggtgaacagggaggaggtgttccacagcagcttgacaccggtggacttcatattctcgtcgatcttgtcaacgaccttgtcgaggttggcgttggtctcgcgcagggtgtcgccttcgggggcgatgtcacgatcgtggaagcagaagtactcgacgcccagcttctggaacagctcgaaggcgtagtcgaccttggccagagcctggtccatcggatcggtgtacttgtagtacgggcggtgcgcggtgccggtgccgaacggatcaaccagttcctggttgaaggtgtgccaccaagcaacgccgaagcgcagccaatccttcatcttcttgccggcaacgaccttgtcggcatcgtagtaatggaaggcgaagtcttccttcggtcctttggcgcggccgacgtactcgatcttgtcaacatcccacagacccatttgggcgctcctttgcagtaggcgatattacggattgcaggaccaataataaaacgaacgaactaagtttgtcaaatgattgaattaatacgccgcgtctcagcgtgttgctagtcattgcaatggttttcgaatgcagtcaaggcacagatagtatgggcaagccaagaaagacaactcagccaagaaaacgagacttgataattgacgtcacgcaattcctcgccggccaccgctgaggccggctccaccaccccgccaactccaacagcaccacccccgccaacaccaccgccatggtcatcaccctgatgatcggctcgtttgtggccatcctcaaccaaacgctgatgatctccgccctgcccacgttgatgcacgagttcgacgtgcccggcagcaccgtgcaatggctgaccaccggattcatgcttaccaacggcatcatgatcccgatcaccgcgttcctcatcgagaccttcaccacccgccagctgttcctgcacgcgatgggcatatttgcagaatgatcttggcgttaatgcactggtgtccggtctggtgatgatgccgagcggcatcgccatgggcatcctgaacccggtggcaggcaagatgtatgaccgtatcggtggccggccgctcgccttactgggcttcgcgatcatgacgtctgcggctgtgctgctggtcaccatcatgaacacgcacaccgcggcggccatgcgcaccggagtgccggaagcggcggcatcggccattggcgtgcgggcttcgttccgcacggtcgccattgtgtgcgcggtctgtttggttgcgtcactcttcattcgtgatcgcggccgccgacttggacagcagcgttaggcgaatccttcaccgattgctggccttcttgatcagcgcgcccaaagtaccggcttggcgcgcggcttccacatcttcccagtcgagaccggtgtctttggccctcccgtagaaaaaccgcaccagaccggcaaagtccggtttatatccggtttcccggaatgaacgggccagcgaatcaccgatttgcgggtcatcaggccttcgtgcctcatagatcgggatggaacaggatcgccacacgcctctcacatgtgcgatgcgattgacgatcatgccgccgtgcgcaccatcgtattgcgaggcggcatgtacgtccgccacctcgtagacaccaccatgaatgatgtcctcaactgtcagacgacctttgaccgcgctggcatcgcgaatccagaacatcgaagcgaaattggtgtcatcaagttcgcgaaaatcacgtatctcgcgtgtgccgatacgttcgtccttgtcatacatgaattcggccaaggctaggaatggcgagatacctgcgcccggaccgtactgcaattcgatacgtaaatcttcggattcattgccggtcagtccaataccgctgacggcgcagtcataggcaaaccaatcccagaaccaccattcgatcctttgcagcacctgcttcggatactttttgcatgggttcagattcacttcgcgataatatatgcgtctcgcttcggcatagacggcgagattgcagcgtttgaacatctcggctacgtctttggtgtccagcattgccggcaaaccggcattttcggcagtagtagtggttgcggtgctcatggtgtttccccttcatgtgatgtggacggcgggctacgttgcccgccgtgaggcacactgtatgacgttcgtgcggcggcccgcaagcccgcatggcgagatggtggataagtggaaaacccaatgattccaaggggtatggaatgtgcataacagtggctaccgtcggtggataaccgcactttcttgcaggttatccactgatcgcgcagctgttatccaccgtctctgggttatccacatcgtctctggcgtgtcatccactgtcagcagtcgatttctgcttcgtttggcgtgtataagtgcacggtgaagtgtataactccgcgcattaggcatatttgctactgagaaaggtcccgaaatcgccttcgaacgcatagctacactcagcagatgtattcagcatggcaatagacccacttaggcaccggcgaatgattttccctcgcttatagagtcggcaaaggcccaacacctgtcccaacgccgacgctactgcactggcagcgtcggcagaggaccacaacttggcacagcaacgacgctaaaaccgcccagcatcgttacacgtccaagttttggccgctaacgacgcttaatgaacgcttagcgtcggcagcaggtcacgcactggttctccaccgacggtaacgctccttagcgaagccagcccgccactctttggcacatcaccgacgctgagagaacctacagcgaagccaaccagccaaccgctggcaacatgacaccacccacacccctcagcgaagccaaccggccagcgcatggcaccccaacaccgctgagaacacccaccccaccagtgcacataaaaaaaaactggtcatagcggttgcgatgtaattgcatcgtaatcgcgatgaccagcctcgggggggctgcaacgagcaccgaatgaatcagatgatgatgccgttgcagtgatcgacttcgtgttggatgatctgcgcggtccagccggtgaaggtggcgtggcgggcgcggaaccgacggtcctcgtagttgacctcgatacggcggcagcgcagtgtgcggcgttcaccggtcagcgacaaacagccttcctgggtgtcgaaggcaccatccgaagcggtgatcacggggttgagcatcaccgtgatacggccaccgagatcttcgtccacgaagacgatgatgcgcttgctcacgccgatcatgttggcggccatgcccacgcaccgtgaacggttggcctccaacgtatccacgaggtcctgaatagttgcctcgtcgccgggcccagccgcttcagacggcgtgcgcaaaaacgaccgcgaagtcataatagggcgttgcatgttggaatcacgcttcttcgtgccagtggatgttggtgataagcggcagggagatgccggtaccgagcgacatgaccagtcgggcggcgagcagcatcgggaagttgaccgcgagcgcgcccagtaatgtgccggcggtgaaaatcacgatggccatgatgaacagtgttttggtggcgaatttgcgcaccatgaacggcgagctcggaatcgacaccgacagcaagagcagataaccggtgacaagccactgcaccaccgaggcgccgatggagaactcctccatcggcgtggagtaggcgatgttcagtgacgtttccgataggatgccgaggaaggtcaggatcgcgagcgagacgaccgcgatgacgagtttgttggagaccggttgcttgccgccgttaggcagctgtgttgcggaatgagtcacgatcttgttctctcctccattcattcagatattctgactacgacgttggaagtcttcctgcatgagtcgcagagcctcggtcaaggtgcgtaccgtggtttcgcactggtccgaggtcaatccgcccagcagttggctcaaatgcgcgtgatattcctccatatagatgcggcggatatccaagccgcgttcggtgagcgtgagcgtcaccgcacgccgatcggcggcatcggcgtgtttgacgacgagtccgaggtcggccatttcgccgacgagcttggtgatgctcggcgtagtgacgccgaggaatgcgctgacgtcgcccacgcgcgcggtgccggtatcttgcccattcggttcgttgatatgccagacggcgtcgatcacgtggacatagcgcggtttcatacctttcggcaatgccggcatcagttcggtgatggtcttggccttccagcagacatccaggaggctccgcacctcattcaccggaagcaagccggtcttggtatcggttcgggaatcgcacatcgctggcccaacctccaattagttactaatagtcattaccataagtaactatatgcaggctctagacaaacccaacgacctgcgcgcccgtgtcgagttccgtttcggcataaaaaaaagccaggggatccctggcttgcaatgcacatatcgctgcaggtttgccgggacctatatgttcccggcaacaacagccgtatatacgttaccgatcagtgctgccctcatcatccttggcacccgccgtggcggcctcagtctccttggcgttccacccggtgacggcattccaaccactccatccgatgaccactagcaagcacagcgagaagacaatagtggcccaattgaacagcgagccatcgttattggcctcgaccagtgactgccagagccagataacgcaggccaagcaggtcaatgcatacatacgggaggtggagcgcgcggtgagtttcatggcggaaaaagtcctttgattacaagaatgacggcagataacagtgtgggatccgcaccagcggcaccggcacgaatcccacatcgaggaggagaaaggggaaggtcagctcttcttgcgcttggatatgatgtccacggcgacggccagcaggagcacgaggcccttgatggtcttcaccacggcggtgtcaacacccataatcgacagaccctggttgataacacccatcacgaatgcaccaatcacagcgcccgggatggtaccaataccaccggtgacggccgtgccaccgatgaagcaggcagcgatggcgtccatctcgaactccataccggcctgagcagttgcggaagccagacgggaaagcatgcagacagcggccactgcggacaggaagcccatgtggacgaacagcaggaagtccacgcggcgggtgttgataccggagaggatggcggccttgcggttgccaccaacggcgtacacgtggcgaccgaacacggtcttggtcaggatgaagttgtagatgaagaccagcacaccgacgatcaccagcatgatcggggtaccaccctgatcagcgttaccggaggaagccagcaggtaggtgacgaaggcgatgacgaccgcgacaagcacaatcttgaggacggtcaggctcatcggctcgggcaccaggccgaccttggccacacgggcgcgcttgcgcagctggctccaggcaaagccgacaatgcacaggatgccgagcacaatggtcagaccgtcgaacggaccccaccagccaaggatgttgggcaggtagttacgggcaatgccacggaattcgagggaggtaatcggcacggattcgccgacgatcacggtggcgagaccacggaagatcaacatgccggccagagtggtaatgaagcccgggatgccgatgacggcgacccagaagccctgccagacgccgacgatcaggccgacgaccagagcgatgacgatggcgagcatccagttgactccggcgcgttccatcagcagtgcacacacaccaccgatgaaggctaccaaggaaccaaccgaaaggtcgatgtgggtggcgatgatgaccatcaccataccaatggccaggatgatcacgtaggcgttctgctggatcagggacacgaaggagttcggcttcagcagcacacctccggtcaggatctcgaaggccacgacgatgatcagcagtgcgccgacaataccgtattgacgggcattgttggcgaccgtggccagcaggccggtcttttcttctttctttgcaggtgttgcagttgcggcgctcatcaggctgccacctccctttccttggtcatacccttcatcaggtattcctgggtaaatccattcttctcgacattgtcggtgacgacaccgtaggacaccgtgtaaatgcggtcgcagataccgatgagctcaggcagctcggaggaaatcacgatgacggccttgcctgcatcggcaagcttatcgatgatttcgtagatctcatacttggcgccgacgtcgatgcctcgggtcggctcatcgaggatgaggatgtccggctgcgagataacccacttggcgagcagcactttctgctggttaccaccggagagggtggagacattcacatcgatgtcatgacacttgatgttgaagtccttgcggtactgttcgacttccttgcgctcaaggttgtcgtccacaaccccgcccttgctgatcttggtcagggaggccagggatgcgttctctcggatgttctgcagcaggttcagaccgttgcccttacgatcctcggtggcgtaggcgagacctgcgtcaatcgcggactgcacgttgggcatcttgacttccttgcccttgacgaacaccttgccggagatgttggaaccgtaagagtggccgaagatggacatggccatttcggtacgacccgcacccatcagacccgccagaccgacgatctcgccggcgtgcacgttgatgttcgcatggtctacgatcacgcgctccgcgtcgagcggatgatgcacggtccaatcctcgacgcgcaggtattcctcgcccggggtattggaggggtggttcgggtacaggttgtgcagcggacgacccaccatcttgcggatgagttcttcctggtcgagcggcgtctccggcgtcacgtacatcacaccgacggtcgaaccgtctcgaatgatggtgacattgtcggcaatggcggcgacctcgttgagtttatgagtgatgatgatgctggtcacgccctgctcgtcacgtagctgacgaaccaggtcaagcaggtgggcggaatcctcatcgttcagtgcagcggtcggctcatcgaggatgagcagcttcacgtccttggacaatgccttggcgatttcgacgagctgctgcttgccgacgccgatgtccataaccctggtatccgggtcttcgggaagtcccacacgatcgagcagcttcttcgcctcggcgcgggtcttgtcccagtcgatcacgccacccttggcctgctcgttgccgatgaagatgttctccgcaatggacaggaacgggctcaacgccagttcctgatgaatgattacgatgccgtcggcctcggaatcattaatagtatggtatttgcattccttgccatcaaaggtgattttgccggaatagctaccgtatgggtacacacccgaaagcacgttcatcagggtcgatttgcctgcaccgttctcgccgcagatggcgtggatctcgccgcgatcgacggaaagattcacatcggtgagggctttgaccggaccgaacgtcttcgtgatgttttccatcgtcaagatggtgtcatttgatgacatgtcatcactcctcgtcacagttctgtgttcatggacatgcggcgcatatcggctatgcgccgcatgtcattgtgtttgtttacggattgcctgatgaggactacttagtcagctcgtcgaagcgatcctgggtgatgtagttggccgtgaccagatcctggaggttgtccttggtgatgttctgggggtcaagcagcttggacggaacgtcgatgttgttgttgttgaacttgccgttcaggccggagacttccttgccctcggcgatctcgacgaccatgtcgtacacggcgtcagccagcttgttcacgtccttgaacacggtctcgccctgcttatccttggcgatgttggcaactgcgatctccatggcgtcctgaccggtgatgtacggccaggagtcggtgcccggcttcatgtcgggacgcttggattcgatggcgttgatcacaccctgggcgatgccgtcgtacggagtgaggaccgcgtcgagcttctcgccgtgggcgtaggtggagtcaaggatggattccatgtccttctgcgcctgctcggtcttccagctcatcacggagatcttctgccaatcctcaacggtgaagtccttggtcacgccaccctgaccgtgctgggacggggagacgagcacgcccttctcgaagtacggctgcagcagatcccaagcgcccttgaagaagtacttggcgttgttgtcatccggggaaccggtgaacagctcgatattgaacgggccggtggcgccatccttaagcttgagctggtcaatgagccacgtggcctcgagcacgccgacctgctccagctggaaggtggcgtagtagtcgacggcgtcggtgttcatgatcagtcgatcgtaggcgatgaccttggcacctgcatcgcgggccttctcaacggcggggcccactgcggtgccgtccttggaagcgaccacgacgatcttggcgtcgttgttgaccatgttctcgatgtcagcgttctgctgggccggcttatcgtcggcgaaggacaggatgaccttgtatccggccttctccagcttggccttcaggttgttgccgtccttgttccaacgctcttcggacttggtcggcatcgaaatgccgatagtggcgcccttttcgatcttggcatcaccgccagttgcctggccgctacggctgccaccgcaggccgcgaggcccgcgcacatggcaacgcctgccaccacggcgacgatcttcttagtgaacttcatttgttctccttcatcttcgaggggatggcgaaccctccttggtcgcccgaacctgagaataacctcaggttcatctcatagaataccgtattgagttaagttgtcaaactcaagaaagcgaatttcctgtcgtttatgttcaaccaatgaacgcaatgtcgatttttcgcgcatcaccaggcgacacgccgaaaaatccacgctctgcgcctcgctgtgcctcatgccggtaacgactacactgaactcttatggcaacaaggcttttcggttcgcagacctcgcttcgcgaggcaaaccgcgccaacttgctggccagcatccacaagttcggcgccatgacacaggtcgaactggcagaggtgacaggactgtccactgcgaccgtgtccacgctcgtccatcagcttgtcgacgaagaccagctggagaccaaaaacaccgttcgcaacggtcgcagagccactctggtgacccttgcacggcatcagggcctcggcgtcgggctttggatcgcgcgacgtcatcttacgctttctatcgttgacttctcgaagtcaatcatcgctgagcacacgctccccctgccgttaggccacaaggcggacacaacgctggaacgcgccatgctgctcatcaatgagaccctgagcagcatcgacgccgaagccagcgagctggtcggcatcggcgtggccgtggccgcaccggtggccaccagcgaccacaccatagcgattcccggcattctgcccggatgggacggcgtcgatatcacggccccgttgcgcacggcgttcaacgttcccgtatacgtcgataatgacgcgaatttcgcggcatacggcgaatcccgtatgggcgtggcggcaggcaaacgcaatttcgtatatatctcagccaacgacggggttggcgcaggcatcgtcatcaacggcgaaatcatgcatggcgtgaccggcctggccggtgaaatcggccatatccaggtcgacccgctgggtgccatctgttcgtgcggtaaccgcggctgccttgacaccgtcgtggcggaaaacaggctggtgcagttgctcagcgtcacacacggcaatatgacgctggatgatctggtgtcctttgccaacgaaggcgaccccggttgccgtcgcatcatcgccgacacggccgtgcgtatcggtcaggtggcggctgatctgtgcatcagcgtggatccggaggtcattgtgctcggcggcaagctggccatgaccggcgacgtattcatccaaccgttcaatgaagcgttgcagcgcatgctgttccctgatgccgtggcacccatcgatgtacttgtgtcatcccacccgaacgacaactgcgcgctaggcggcgcattatgcgccatcgagttctcggttcgcaatgacgtcagccagtgaccggcaccaggagaagagtgagaagaaggaacacaccatgaggaattcgagcacacctcctctgctgcggctggaggacatctgtgtgaagttcggcttcgtcgaggcgttgaaatcggtgaatctgtccatccaacgccaggaggtcgtcgccatcgtgggcgataacggcgcaggaaagtccactctgatcaaggtcatcgcgggatttctgcagccgggattcggccatatctatctcaacggcgaacaggtgaccattccctcgatcagggaggcggaccgcatgggcatcgcatcggtgttccaggggcaggagttctgcgacaacctggacgtggcctcgaacctgttcctcggcaaggagatcaatcagattggcatacgcgatgacgattcgatgaactcgcgtgcccgttccgtgctgaagaccctgagctcggcgattcgggtcggctcccctatcgcatccttatccgtcggccagcgccagaccgtggccatagcacgcacgctgctcaatgacccgcagcttattctgctggacgaaccgaccaccgcactgtcggtgatgcagtcggcggaagtgctcacatatatcaagagactgcgctccgaaggccggtccgtggtgatggtctgccacgatctgccggatgtgttcgcggtatccgaccgcattgtcgtgatacgtcaggggcacgtcaccggcgtgcatcgaaccgtcgaaacgtcctatgaggagattatcgccgaaatcgccggcgtgaccaccgaacacgagtacgaggaaatcgctgagaacccggaattcgattccatggtcaggcagcggaaactcatcgaccgcactatcagcgcggcagtgagccatggcaccggccatgactcaccattagactaacgtcccgttgccggagcgacatcgtcagcgcagagccaggttggccgcgccgatcagaccggcatcctggcccgcagtggccgcgacgatcttggcatggccgcggtaggcgctgccttctaggaaacgctggtagttgtagcgggccggctccagcaggatgtcgcccacggccaccacgccgccgccgatcacgaacaggtccgggtcaagcacggcggaaacggcggccatggtgcggcccagccattcgccgatcttgccgaacgcatacaggccaagtacgtcaccttcctgagccgcttgggacaccatcggcccctccagtttggtgatgtcgccgccgcacagttccagaagacgcttggcgtcctgaggacgacggcgcacggcggacttggcgaagttctccagcgaggttcccgaagtgtaacgttcggcgcagccgcgcaggccgcagccgcagtggtcgccgtccgggaccatcggcaggtggccgagctcggcggccatgccgaaggagccgcggtagagctggccgttgatcacgatggcaccgccgaggccggtgcccacggtcagcgcgaccatgttggagctaccctggccggcgccgtgcacgaattcgccccatccggcgcagttggcgtcgttttcgacgatgaccggcacggcatggtcgatcagcgcgccgacgtgctcggacagatcgtagttgatccatgccggaatgttggcggagaaggtgagcgtcttgcgatccgcgctcacattgccggcggcggagatgccgacggcctcgatatcggtgtgcccggcggccacagcctcgcggtacacctcggcgatgtgctggttgatggcgtcggcgtccatcggcgtggggacgcgccagcgctggatgatgctgtcattttcatcgcagacggcggcggcgatcttggttcctccgatatcaatggcgagcgtggtcatggcttactccttgaagactttcgtaacatgcgagatagcgaaaatagtagcgagccgccatgacctcccaccgcggtttttccgtggttcgtcatgcgtcgcgaacattccgccgatgcgcttcctcatgcatttcacccgttgcaaacgggcgcccccttaacgccggcatcggtgcggacggcgtgtcgaatcggatgcaatcactttcaccgtccttgcggatggcatcgaagaacggcaggaaacaaaaaactcccgacatgcatcgggagtttggtggcgaccccggccggacttgaaccggtgacctccgccgtgacagggcggcgctctaaccaactgagctacggggccgtgcgtgcctcgctgaggcacaagaggatatgttacagcatcatcggattacgacacgccgtctgatacatcgttccttccaccggcgaaccgaccgcaggtgtggtggacggcatgcggaccatatcgttcgaccgcgcacgaccgcactccccataagacagtagccgtcatgcgtcaacgcacgttgtgcgacaacgcggcacgacgcacggccaccgaggccagcaaaccgatgaacagcatgatgccggcgaccagaagcgtccactggccgccttcgacgaaccctgaagtcatcgcatcggcaatcttcggcgcctcgtcgccgaattgggccgccggtccatcaccgctgcggaacacgccgatcactccacccgccgaaccactgaccgcttgggccagaccgtcgccgaccttggcgggcagcccgagggattcgagccgcgccggcaatgttccgttgacggccatggccaacgacgcgccggagatggccgaaccgacggcggtgccgagctgccgaaccgtggactgggtggccgacccttcgccggactgcatgatcggcacttcggagagcaccacgctggtcagctgcgcggaggcgaagcccagacccagaccgtacgcggccatgggaacaagctgccaccacaccgacaatcccacaggcataaggaccgcgaccaaggcgacggcgatgatctcgatcacaagaccgagttgaatcacgccggccggggtgagcttggcggccatgacatgggcctgcgcacctgcgacgatggaccccaggcccatcacggccagcatcgcaccggcctgcagcgtgttgagcccgcgggcgttgatgaggtacagcggcagcatgaacaccagcgcgaattcgccggcggcgatggccgcagccgccagattaccccacgagaacgtcctgatgcgaaacagggtcatgtccagcatgaccggccgaccggctttgccccgcgcggattcgaagacgatgaagacggccatcagaagcgcgccggcgatcaggcagatcggcaccggcgacaaccagtcacgattccagctcaacccgccgagcttcaactgcgttgaggtctgcttccaccaaccgtaggtctcgccttcgataagaccgaacaccaacagggccgaggtcagggcagacaacaccacgcccgggatatccacaccgacgcgacgggatcggacatcctgcgcggcatccgcggcaccggcgaccgaggcgttcccaccggtctgcggcaccaggaagatggccgacacaaagaccgcgatgcccagcggcaggttcaccaggaagatccaacgccatcccaaggtctcggtgaacacgccaccgagcagcggaccaagcgcggcggccgaactcatcaccgcgccccagacgccgaacgccgcggcgcggtacttgccacggaacagggcggacaccgtggacagggtgttcggcatgatcatcgcgcctccgatgccctgcagcacacgggcggcaagcagcatccccgccccctgcgaggcggcggcgagcgccgaactcgccacgaagatcacggtaccgacttgaaacaccagtttgcgccctctggcgtcgcccaacttgccgaaaggcagcaacaacgcggcaagcacgatgttgtagagcgaggtgacccactgggcgtcggtcaggttaatgccgatgtcgtcgatgatggtgggaatggagacgttgacgatcgagctgtcgagcacgatcatggccaatcccagggccatcacccacagcgcgccccacggcggcgcctgggcaggcagtggcgacgaggccgtcggattcgttgaagagatcgaagacgcatcggcctgagtctgatgctgagatcgggatgcatgatccataacggggtttcctctcattgccatgattgcggcgaccgacacgcctatgcgccattcacggtacatccgcggcctagaccgtctcgccggatttcgcgggacattccgggcgttcagccatgggcgtaacctcggcggatcactgaagagaggagcaccaaagacggccgcactattccagatgcgtcatttcgaaatgaaagcccggcagaacgccggaatcgcaacgatcgacaaatcgccagacgatacagggccgggctctcgctcaggaaacagggcatgcccagcgcccatttaccggcgtcggcaatgacggcatcgccgccgccgtccacgtctcctcccgatgaccgaatcgctaattcccgcccgccagaaccccattgcatcgtgtagacgggatatgggataatccacaaggtgcttttgcttgggaccgaggcgccgcgatgacacggaaaatccagggacgggcggcatcaaacgggtcgttcggaacccccgaaaccggacgcatcgttccacagtgtgtcatcacggaatccaagcccggcaaaacgttgaaattgcaacgataagacaggataagacacttatatggcagaattcgtatttcagatgatcaaggcccgcaagtcttacggcgaccgcgtgattctcgatgacgtgaccctgagcttcctgcccggcgcgaagatcggcgtcgtgggcccgaacggcatgggtaagtccaccctgctgaagatcatggccggcctggagaccgtgagcaacggcgaggccacgctgaccccgggcttcacggtcggcatcctgcagcaggagccgccgctggatgacaccaagaccgtgggcgagaacatcaagatggcgttcggcccgattgccgagaaggtcgcccgattcaacgagatcggtgaagaaatggccaacccggacgccgacttcgacgcgctgatggaagaaatgggcaagctgcagaccgagatcgacgccgccgacggctgggacctcgactcccagcttgagcaggcgatggacgccctgcagtgccccgatccggacaccccggtcaacgtgtgctccggtggcgagcgccgccgtgtggccctgtgcaagctgctgctcgaagcccctgacctgctgctgctcgacgagcccaccaaccacttggacgccgagtccatcctgtggttggagcagttcctgcaccagtacaagggcgcggtcattgccgtcacccacgatcgttacttcatggacaatgtggccgaatggatctgcgaggtcgaccgcggccacctgtacccgtacaagggcaactactccacctacttggagaccaaggccaagcgtctggagatccagggagccaaggacgccaagctcgccaagcgactgaagaacgagctcgactgggtgcgctcctcccccaaggcccgtcaggccaagaacaaggcccgtctggaacgttacgaccagatggagaacgaggcacgcaacaacaagaagctcgacttctccgagattcagattccggccggcccgcgcctgggctccaccgtgctggaagccaaccacatccacaaggccttcggcgagcgcgtgctcatcgacgacctgtccttcacgctgccacgcaacggcatcgtcggcgtgatcggcccgaacggtgtgggtaagtccacgctgttcaagaccatcgtgggcctggagccgctgaccagcggcgagctgaagatcggcgacaccgtcaagatcagctacgtggaccagaaccgtgagggcctggacccgaacaagaacctgtgggaagccgtgtccggaggcctcgacttcatcgaggtggccggtgtggaggtgccgacccgcgcctatgtggccagcttcggcttcaagggcgccgatcagcagaagctgaccggtgtgctgtccggtggtgagcgcaaccgtctgaacctggccctgaccctgaagcagggcggcaacctgctgctgctcgacgagcccaccaacgatctggacgtcgagaccttggaatccctcgaaaacgcactgctcgagttcccgggctgcgctgtggtgatctcccacgaccgttggttcctcgaccgtgtcgccacgcatatcctcgcgtgggaaggcgacgacgacaatccggccaagtggtactggttcgaaggcaact

SEQ ID NO: 3181 - DNA, 9883 bp, Unknown
  R53_2m  MAG No. k141_2520
gttttatcggcagacatgtgcgattggcgcatcgaaaccagcgcacagttgttatcgagaaccgttctctgcgcactgtttcgcgccctcccgctaatatgggggcgttcgaaagggagtttcatggcatcacaccgcaaaccgtccgtgcaaacctacgatccgcgcacggtcaaggagcatatcgtcgagacgccgctgaacgaggagatgagcaaatccttcctcgagtatgcgtattcggtgatttacgcacgcgcactgcccgatgcgcgcgatggcttgaagccggtgcagcgccgtatcgtctaccagatgggcgagatgaacctgactcccgaccgcccgtatatgaagtccgcccgcgtggtgggcgaggtgatgggcaagctccacccgcacggtgattccgcgatctacgaggccatggtgcgcttggcacagccgttcgcgatgcgtctgccgctggtagacggccacggcaacttcggctcgctggatgacggccctgcggcctcccgttacaccgaggccaggcttggcccggcggctctcggcatgaacgcggatatcgatgaggacaccgtcgacttcacgccgaactatgacaacaagctcaaggaaccgaccgtgctgccggccgccatcccaaatctgctggtcaacggcggctcgggcatcgccgtgggcatggccacgaacctggccacccacaatctgggcgaggtggtaaacgccgccaagttcctcatggcgcattcggacgccaccctggaacaactgatgcgttacgtgcccggccccgactggcccaccggcggcacgatcatcggccgcgacggcatccgtgaggcctacgccaccggccgcggcacgctcaccacgcgcgccgccacacatatcgagcatgtcacggcccgcaagcaggccatcgtggtcaccgagctgccgtacatggtgggcccagagaaggtaatcgaacgtatttccgacggtgtgaagaaccgcaagctggaggggatttccggcgcgttcgatctgaccgatcgtcataacggcacgcgtatcgtcatcgaaatcaaaaccgggttcgacccgcatgcggttctggtgcagttgttcaagcacacaccgttgcaagacaacttcgccatgaacaacgtggcgttggtggagggccgtccgcatacgatgggtctgaaggagatgcttcaggtgtgggtggaccaccgccgtacggtgattcgccgccgcagtgaatatcgcaagaagaaggcgctggaacgcctgcacctggtcgagggcctgctgctggccatgctggacatcgacgaggtgattcaggtaatccgcacctcggatgatgcggatgccgcgaagagccgtttgatggtcgttttcgatttggacgaggtccaggctcagtacatcctcgacctgcgtctgcgccgactgaccaagatgaaccgtatcgagcttgaggccgaacgcgatgatctgaagaagcgtatcgaggagctgactcggatcctggcctccgccgagacgctcgaccaggtggtcactgacgagatggacgaagcggtcgccaagtggggctcgccgcgccgtaccgtgctgctggatgccaacccggatggcacgttgacgccggtcgtggcgcagggtgccggggcttcgggcgtgtccaagtccgcgctcgaagcggtgaaggccgccaccacgatttcctccgccgaagccgatgtggccgcagccgcagccgcagccaagaagaccggcgaacagtccgcgctgaccggagccttgaagatcgaggacgagccgtgcgtggtgatgatgagcgctaccggtttgattgcccgtaccacgccaagcgcgatggacgtgttcaatgcacggtccgcatccgatgaacgtctgcgagacgatcagatcaccacaatcttcgagacttccacgcgcgccacgtacgggctggtcacgtcggccggccgcctggtgctcgcgcatgtggttgatttgcctgccttgcccgctgccgccacattgtcgctgaagggaggagttcaggccgacgaactgatcggcatgaccgaatccaccgatccgattcgtggtgagcgtgtgattacggcgattgccatggagcagccgacgtccggcaaggccagtgccaaggatgagagcgaggatggcggggccgccgaggccaagccgttgccgtcgctggctatcggtacccgtaacggtgtcatcaagcgttggaatcgtgaggcacccaccaccatggattcctggcccgtcattgatctgaaagatggcgatgaagtggtattcgccgccgtggccgaggatgacgaccgtctggtgttcatctcctccgattcctcgctactgacctttgaggcgaagaacgtgcgcccgcagggtcgtaccgcgggcggtatggccggcatcaagctggccgagggtgcccgtgtggcggccttcaacgtggttcccgccggcaaggtggcatggacctatgaagagggcgagaacggcttgacttccggatccggtgcagtggtgctcaccgtggccggcgattccgatgcactgcccggcaccgaaaacggcgcggcgaaggtcactccgctggaaatgtaccccaccaagggtcgtgctaccggcggcgtgcgttcccagcgcttcctgaagggccagaacacgctgattcttgcctgggtgggcctctacccgttgcacgcttccacatccgcaggctcccctgtcgagcttcccaagcccgatatgcgccgagacggttccggagtggacctcgcctcccccatcgccttcattgcgtaacctcaattaagctccctctgatgggccgagccgtaaagcaaacaccccagtggggtgtttgtaggcgaggaacgaacgacagtgagccaaacaatagagaagagaccctaaacccgacctacactaagcatcaaggaggtggcgatgagactactggttgccgtatccaatgaaccgttggcccgcgccattcgtggtgccctacttgccggtcgtcatgaagtgtctttggcaagcaccggtagtatcgcgctcgccgctgtcgccaaggagtcatttgacgcagtgattcttgatgaatccctgctcggcagttccaccaagcagctcatcgaatccctacgcaatgcccgtgcctccgtcaagattctgctgctgacttcgacgccactcagcaaaaccattggcgaaggcagccgctggcgagcgctgcctgacgagtacgcccctatcgaagagacgccctacagctccttcagcgcggattcacgcgcaaacaactcagatgccgaagccgaacaacgctcggacaatgccgccgctagcgcacaagctaacgtacgacgcccggatgccgcgctgagcaaaccattctccgatggcgaactgctctcatacgtcggctcgcttgccaccgactcccctgccatgatcattcgtggcaatctcacgttggacaccacgaatcgcaaggcctactacgcatccacgcgcagcgcaatctcactgtcccgtctggaatacagtttgcttgaagcactggtcaaggctgatggtcagttcgtcaacaccagcgaattggtcaagctcgtcggtggcccattcttcgagcaacaagggctcctcaagaacgccctctacacactggataagaagctcacccgcgccggcctcatcatgacccaacgcggctccaactaccgcattcgatagttgggctcaatcagtacagccgcatgcctcggggaacgggggtgaagccggactggtggaggatacgggcgaaggggtgacgcgcgttgaggggttcgccattgatgtcgctgaacgtcacggaaccggtgccattgcgtttgagggcgtaggccagttctgtggcggccttgcgcatctgttcgtcggaatcgttggcagcgggttcatggtcgaccgattgatcgaacgccgtcaggtgcttggctttggcagccgcgtatagtagcgtgccttgcgcattgagcacgaccatggctccgatacgacgtgccggtttacccgcaccggcaggcgcgtccggccacgcgatggcggagccactgagatttgcggggtcgagcacactcaatgccaccacggactggccgcgatgctctgacggatgacgcaacgcatccacggtgtcgtgctcggcaaattgggccgcaccgaaaccacggacgaacatgcctcgtaccagtcgaccatgctcctccatgcgcttcaataccggatacaacgctgagtagccacccggaatattatccttgtcaatcaccggctgcgcgatgacgccatacctgtccagcaacgtctcgaccagtgcgagtgcccgttcggtctggtcagtgtcttcggcttcagcttgcccgatcacggcagaccacaaacctcctaacgtcatatccgtcgtggctcggcgaatcggagcgacacgcccacgacgacgtgatgcagtggatttacgcgggcttgctgcgcctgcggttaatgcacgcaccggcgcgaagctggaattggtgaccttaccttgccagaccaagctccacaaggcatccttgaactgctgttcgctccactcttgcggaatgatttcgccggtgtttggattgatgtccggctccgcggcctcattccacacacgtttggcggcatccatcagttgacgggcatggaacgctccccctgagtccagtgcggccagaatcacttccggcatggtggcgtctgaggcgttcgatgtcgtaccatgttccacatcgctgagcaatattgaatccgccggatagaaagcaacctcaccggggtccatcgcactggttcccccggtttttgagccgacccagaccacatcgccgctggtcagcaactcatccagcaatgcaggttggtagtctcgtactcgtgcggggaataccgccgactcccagagtgcagtgggcagtgatatgccctccagctgctcgataacgcgcatgagcccgtcagcaccttcatatcgttcgccgccgaccggcccgataccttgtcggtcgacaagaaacatctggaacgcctctggttctactggcttgactgctttacgcgccttggccaatgagcgagaccgaatgcgacggaatacgtccttatggagccactgttggccttgctcgtcatcatctacaaagtggccttgcagcaactcgcctttggcagccagcacatccagagtgtgcacggcatccgtagcatcgaggtgtaggtcggctatgagctgatcggcggtgaaaggaccatgggttttggcgtaacgggtcacgcgaccagtcacatcatcgtcggcaagttcattccagaaagtgcgctcccccagttcctgttcgacttcgcgaatcacgtccggattcagcacttgtgccatgtcggtggtgccgagcaagcgttcgagcacgtgcggatcgagagacaacagtcgcgcgctgcgctcggcctgaggttggtcatactggtacatcaccacgccgacgaagccaaagagaatgttctcggcgaaaggcgatggcgattcggtctccacgtccttcacggtaatgatgccggattgcaatccggtcatcacctcgttcagggcaggcatgtcgtatacgtcttgcaaacattcgcgcgcggtttccagcagcagcgggaagttcttggccatgcgtgcggattgcaggagctgtgcggcgcgcagtcgctgctgccataggggcacgcgacggcccgggtcggatcgcggcatgaacagtgatcgggcggcgcattcgcggaatcgtgcggcgaatagcacggactcgcccacttgacgttctacatctgctttgaggtcttctgggtcgaaaaggaacaggtcttgaacaggaatatgtccgtcaccgtccggtagctgaatgacgataccgtcatcggcggcatatacctgcccatcgaaaccgtagcgttggcgcagtctgcggctgatggccatggaccacggttcgtgaacgcggcggccaaaggggcttaacagcacgatgcgccatccgccgtcttcatcgcgggtccgttccacgatgagggtttggtcgctgggaactgtgccggtgatggcttgttgctcggagagcaggcgggccaggttggtgatggcattggggtctaggccatctcggtggaggcgagtgaggattgttgggatgaaggttgggacagctggaccttctgcggcagacctcccctcagtccgattcacgtctaatccggcggcgatttctcgggtgaagcgggctatggtacggctgaaaccgtagtcacggccagcgccttcaccgtgccagaacggcagacgggcggtgcggcccggagccggagtcacgaccacacgatcacgggtgatctcctgaatctgccatgtggaggtgccgagcgtaatgacatcgcccacgcgcgattcgtagaccatctcctcatccaactcgccgacgcgacgctggcctttgccggcgtccgcctcaggcaggaccacggtgtacagccctcgatcgggaatcgtaccgccagaggtaacggccactttctgcgaaccgggacgggcggaaatcaggccattatcctgattccataccagtcgcggccggaaggccgagaattcctcgctgttgtattcgccggacatcatgccgattgccgcatcgaacatgtcacgtggcagttcggcaaacggcgcagcacggcgcaccgtggcataccagtcatcagcgttcaaatcgtgcatcgcggcagcggccacggtctgctgggcaagaatatcgagcggattgcgcggcacggccaatggttctatatcgccggcaatcatggcttccagacttgcggccccagtgacaatctgctgacgggtgagcgggtagaacaatgcgtgagagacgccaccgacctgatgatcggcacggcctacacgctgcaatccggaggagaccgacaatggcgtatcgacttgaatcaccaagtcgaccgaacccatatcaatgccaagctccaaactggaggtggccaccacgcagcgcaattcaccacgcttaagccgttcctcaatcattttgcggcgatctttggagaccgacccatgatgagccatggcgatgacatcatcgccctcatgtgagccgacaagcatggtggtggagccgaccacagcatcgtaatgtgtggagaacccttcgcggccttccggagagcccaaatcacgcacagtgtcgggattggtgccatgccgggtctgcgcatagagatcattgaggcgcgcggtgagcttttcggccacaccacgcgaattgacgaacaccaatgtagtgcggtgcgcgagaatctcatccaaaatgctgcgttccaccacgggccaaatggaaccggaggtacggtcgcccgccgctccaaccaacgcggaggaatcgaacgcatcactcgcatcagaatcgtccccagaagtggaagaaacatctctatcatccaccggcacaatgcccctgcgttcggcaagtcgctgcatggccggcgtgacaccgctgatatgcggagcggaccgttcagcatccacgccaccgacacgctgcttggcattcacggaatgcaaatcacgcatgttttccaacggctcaatcatgcgcaaatccattgcaggccgcccaccgggattcacgatggtaaccggttgcccgccgcccaggaatcgcgccgccttttcaggcggattcaccgtagcggatagaccaatgcgctgcatatgacgatcgccgcggccagcatcaacggcggcatcaccgccctcatcagcatctgcaacgatcgcatctcgcttgcgcgattctgcgacaaggttctccagccgttcaaggcttaccgccaaatgtgcgccgcgcttggtgcccgctactgcatgaatctcatcgacgatcaccgtatcgacagtgccgagaatccgccctgctttcgaagtgagcaacaagtacaacgattctggcgtggtaacgaggatatccggtggatgggaggctatgcgccgccgctcctgtgcggtggtgtcgcctgaacgagtggcgaccgcgatcttcggcacgggcagcccttgcgcctcgcattgtgcggcaatgccctccaaaggctgttctaggttcttggccacatcgaccgcgagcgcctttaacggcgagatatacagcacacgcacaccggcacgccgcgtacgtggcacggtcatcaatcggtcgatggctgagagaaacgcggccaatgttttgccggagccggtaggggcgatgaccaagacattgcagccggaatggattgccggccatgcttgagcctgtgcctcggtcggctgaccgaaggcatgctcgaaccacaccttggtgggttcggaaaacaggctcaggctttcgtacatatgtacgattataggtcagctgaagtaggcgatgacttcttcggcagtgccgtaggcgttttgggcaccaagcttggtggccgcataggcggagacataggagccgatttgcgcggattgcagcagcgtatgaccagcggccaagccagccagcacggtccccatgaacgagtcgccgcaaccggtggtgtccaccgcattgactttcgcgacggatacgcgatgccaacgtccgttctcgatcaccaccgaccccgacgcaccaagcgtcactatcgcccggtcgaatccgtaatcggtgaatcgtccggcgacctcataccagtcgagtgattccacatcgccgtccggtagacccagcagttgagccacttcatgctggttgaccagcagaatatccgtggcttccaccagttcgtgaggcagctcgtccataaatggcgagtcgttgagcagcacggtcacgccagcgtcatgcgcggtctgcgcggcggcgataacggtggaaatcgggctctccaaacacagtcccaataccgcgcattcggcgatggtcgtgcgatgtgattgcacatagccggcacttgccttggcattggaacccggcgaatagacgatggtgttctcgccctcagcgctcacggtgattaccgtggtgccgctggggccttcaacgtgcaggatatcggcggtgtcgacgccggcctcatccagcttgcctaataggaagtccgcgttggagtcctcgcccaccgcgcccagcaactggacattgacaccgagacgagcggcggcagacgcctgattcgcgcccttgccgcccggcagcactttcatggcaccaccattgacggtttcacctggcttgggcagtcgtttagtggtcacggtgtaatcggcgttcatcgagccgaccacgattaccgaacccggcgcatccttcagcgcttccaatcgttcccgtacgggctcgggtatttgttcatgttcttcttcacttatcaccatgggctccaagcatagtaggcggcgggcccaattgcgccgcatatgatcagccgcgcaacgtgcgaagacgctcgtgcatggccaccatcagcaccaagagcaccagcaaataccacgggtagagactgattgtcacatattgcgcgatgatgccgaacagtggcggcatgagcagtgagcccacataggcgcaggccatctgcacaccgacgatggcctgcgatttgtcttcgccgaagtaggtcggcgtcgagtggatgacgcacggataaatcggcgcgcacccgaagccgatgaccaccagcccaacgaccatgccaaggtggtgaggcaatggcacgaaca

SEQ ID NO: 3182 - DNA, 28689 bp, Unknown
  R53_2m  MAG No. k141_2521
cctcataactccaccccataggtcctcagtcacccagcacttggtgtcttacgtctgagtccctaccggtgtgctgcaacaattgccgtgagcccttgatgtgcggccagatattcatgcaacggctggctgtatggcatattcagctcgccgtaattggttccggcacggaaggcgggataactgtcgccgccctgaagcagatatgaattggatgcgataatcaccaggtcatcgtccgcaatcggtcgaccgtcaacggcgaggttcacgatacgaaccgccgcatgttcgtcggcagcacactcgtcagcgtcagcgttggtatcagcggcggcatcagtatcagcggcggcatcggcattgccgctcccaccggtcgtaccgcattcggcataccgatacgtcacgttcgaggagatgccgagccagcgccgctccagtcgcccatcgtcacggtggaattgctcggcgagcactctcttcacatcgcgcccggtgagcgtctcatgcgcggccttgaactgcaaggccatgagactatccacctcgcgcacggtgactttgccatcgccattcatatcaagccgtggagtccgcagactgccattattcgaaaatccgattaccggcaaacgatttccggcatacacatgcttcatgattgactcgcggttcgcgtccgccaccagcacaccgaccgtattcccgtgcttatccgaaccttgtttgtcgaaattcacgccggaggccaaggtgccaatcaccgcgttgccggcatgattcgaatatgttgccgccgcctggtaaatatgctgagcgcgcgatacctcatcgttcgcctcagcaccggcagacatccaagcggcttgcgccggatgcgcattaagcccttccacgcccagcacgccgtcaaccgccgtatggctggtgccattgccgaggtccacatcggccactcgcaccgtggcgcgacgcccggcaccggtgatgatcaaatcctgcacggccatattccgcccgaagctgcccgcctcgtaaataggcgcgccaccagcggtcgtaccacgcttgatcgcgtgactgtggccggtgtataccacatcaacatctcgcccaatatcggcggcggctgaagcatcggcgtgcagcaaggccaccaccgcatccacctttccggagcgtttgagttcacgggccacgcgattgatcgcgtccaccgcccgttcgtcaagatcggcatcacgcgtaatctgcggagtggctaccgagccgagcgcatcagtaagggcgcccacgaaaccgatccgcttgccgttcaccgttcgaatcgtagagtcacgtacatggctcagcagtccgtcaggcgacttactggcggcagacgtgttggcgcacagccagtcgatgccattgctgggatcagcgatgcgattgttgaaatcggcgacaccgcggtcgaactcatggttgcctaccgccgaaatcgtcaatccccacgctttggccatgtccagcgtgggttggtccttctccaccgccgactcatacggggaacctcccaccaaatcgccggtcgataccaagatcatattgccgggattatggctgtcggccacggtgaaggcggtggcgttgtccgcaccacgttcgatatgcccgtgaaaatcagtgatgtcggcgatggtcaccgtacgggtgccggaagatggattatcgccggaaaaaggaacggctcccgtggttcccgcacaagcataaggaaccaccagagccgtaaggataagcgctactgcaccaaaagcgatccccgatcgcttgccggcccaccgccggttcttcatattcctgctcacaccagtcacgctaggatcgtcgattgaacggccatgcctagaaaggcgactctcaggtgaattcttagcggcgtcttgggatgggaaaggcctgaccccgtactatcagggtcaggcctttgcaacccgtgtcactacgaatgcgtcggcaaggggagattactcggcaaattcctcgacgcagatctcagctaccgcatccacgcacgcctcggcaatcaggcggccgcgttcggcgcttgagccggccggattggcgagtccgccgtgagcgggaacgtcaccttgacgcaccgggtagcgtacataggatttcgccgtggcaccggcttcctcgaccatacggtccatgtgcaccagttccggcgcgtagtggagcatcaacgaagtttcggtgacggccgcatgctccaatgcccagccggggaacaccaatccatcgaacaccttgtcgataaccgactgcggaaccgggtcccaccaattggtttccacgatggtggccactcccccggtttcgcgggtgaccaggtcgatggcctcgacgatgaacgcctcgttttcaaaatgcgcgttcatgacgacgatcttggtgaagccatcggcgatgagttcgctcagcacgtcgtgcatttgggtgatcactgtcacgccgttcatgtcgatagtacccgggaacagcggcccgccaccggagagcggcttggacttgtatccgtagctcagggtgggcagcacggtgccgtcgatgcgttccgccagatcttcggcgacccgcgtggcgagtaccgcgtcggtaccgatgggcagatgctggccgtgctgttcggtcgaaccgatcggcacgatgacgggatgagtcttcacctccttgaattccggccaggtcatgtggtccatacggcggttgctacccattgcagtactcctttgggttggtggtggattggatggtcaatgaatgcgcccggctccctcgggaaaggagccggagctgaggagatcagatgtgattcagatccttgtcggtgttttcatgggaaagaatcatcgcgaccaaggcgatggccgcaacacccaccatgtaccaggccggggcgatggatgaaccggttagggcaatcaggccagtggcgatgaacgaggccgtaccaccgaagatggcattggccagattgaagctgaacgcgaatccggtgaagcgcacggaggtggggaacgtctcggtcaggtagctggacagggtaccgtcgttggcggtcagggtggcgcacattgccagctcaaccagcagcacgggccagaactgggaggtgttgaggatgaggaaggcaggaacggtgaggacgatgaacgccacgcaagcaccgatgagcaccttcttgcggccgaatttgtcggagatgtggcccatgccgaacaccatgaacacgtaggcgaccaagcagatggtggtgatggtgccggactgggtggcgtccatgccgacggtgtcagacagataggtcggcaggtaggtgagcacggtgtagaagccgaccgcattcagcacgcaggctccgaagctgatgatcagggccttgagatggttgtggaagagttcggcgagcggggcgaacatgccgctcttggaaacgacttggccgtcagcggaggcggcgctcttggactcaagagcatcgttcattgactggtacacgggggaatcggagagcttggtacggatgtacagcacaatcaggccgagcgggccggccagcaagaacggcacacgccatccccaaccgaccatcgcgctggagttcatgttggcggtcatcagcgtggccagcgtggagccagcgagcagaccgatggcggtggacgccggaatcagcgagcagtagatgccacgctttgaggtgggtgcatattcgccgaggaatgtggccgcaccggcatattcaccggaagcggagaagccttgcaccatgcgcagcagcagaagcagaatcggcgcgccaacgccgatcaccgagtaagacggcaggcagccaatcaggaagctcgcaccggacatgaacataatcgagtgggccaatgcggctttacggcctttcttatctccgtagctaccccagaacagtgcgccgattggacgcaggatgaaggatagcgcgaacacgccgaaggtctgcagcatggcgacggtgtgattgtcggttgggaagaacaccagggcgatggtggtggcgaagtacgaataggaggcgtagtcgaaccactcgatgaagttgccaaggaaggaagataccgcgactttcctgaccatggcctgttcttcagtttgaggggtgaaattcatcagtcgtgcagatgtagtaatcgttgcggaactcatgatgtcaccgtcctttcaaggatgtgctgttcgtgtgactgaatgggattcaagtgggaattcgtttcgcagcaggtcgaccagcgccgcgatagcctcgactatgcccttgagtatttgctgaaacgtgaatcgtcgattaacccgttcggcgtagaagtggacaggttgcccagtggtgctggcgcattattcaccatgctgttcttgccatgatttcgtgagtttggcggcgaatagcagcatcgaccagttcggtttgtcgttatagtcgacgccgaccatttgtgtcactttgtccagtcggttgtacagggtttgccgtctgatacccaattgctcgcacgcgccggttttgctatcgaggttgtcgaagcagacgcacagtgtgtccagcaacaacggagaggcggcgacctcgaatccgatggtctgcaccacgagcatgcgcatcgccttgtccatatcagaggatgcgacgaaacggtcgacgagtgcggacatggtacttacgattcgcccgtatgccggttcctgattggcgatgtcacgcaataccgcgaacccgtcgaccagcgtcaccgtgtccaatgccactcggccatgcaccacgtacacaccgtcgccttccagtacggcaagcgcatccatgcaatggcgtccgaatgcggccgcaccgtctgaggaatcggtggtggagcaccatccgaccatcaagtcaccttccagcatgcaggagacggcgcatcccgaccgttcttcgaaccgttcgaccatcatcgatacatggttgatgccttccaccaccgatctgaaccgaaaagcgaatggcatatagatgcatgatccggcaaaacccagcgcgtcgagcatcgcatgcgcttcctgcgcctcaaatgtattgacgtgcacgccgtcggccgggcccatactcagatgatgcatcatgcccatgcgcgcgccgccgtcaatatagagggcggccaccggagacacgatggtggcgatggcccgacgcatcgtggcgtcgaaagtcatggtgcgttgcgtgatctccaatgctcccaccggccgggagcgactttcaagggcgatgacggcgctcgattcgttgccggcatcgaacgcacgacccgctcgagcggccaacagaccgtcaccatcgaaaatggcgacgctttcgccgaacagcgacgcaatggtttcggccacagcctcgatattgccggtacgggacaatccctcacgtaatgaagtggacattgtgtccacctccaattgcaagtgcatctgttcgtgcacgatagcggtattgacactctgacagatgtcgacaaaaggtacgcgagatttcagaccaatcaacgtcaacccatgcagcctggccgcagacaccagttcgtccggcatccgcaccacaccctccaccagttcgaccaccagagcggcgacaccagcctgtgccaggcttgctacatattgtcctaacgtgccgtgccaatcggcggcgagcagagcgttaccctcgataatcagcatctcaccgcccgaaaggaaactggagacatcctctcgctcgttggtaaacacccatcgcactggcgtatcgaggtctttgccttcgacctccaccacaggatcggctcgtttgaactgcgtgttatgaagcgcactgcgaatcgatacagtcatacaatctgtccattcccccgcggaacaccggtcgttccggttaacctcaccgcaaagcgtgctgttgacaataacctcagttggttacgcgggcagtcggttcacgtaaccgttcggcaacacaccagttgaaggagcgacgatgactaccacactgttcaccaacgcacatatcgccaccggagaacccggcagcacggctgcaagcaccctgccattgcaggacattctcgtcacggatggcgtgttcaccgcattcggccccggactcgcgcaacaatatgaggctcagggtggtgatctggcggccattgaggtggtcgatctgggcggcaaacttgtctgcccaccgttctgcgatacgcatctgcaccttgattacgtattcacggcccgcaagcccggtgcggtgaatgaaagcggaaccttgtttgagggcatccagcgatggagtgagaccaagtccgacttgacggtcgacgagatcaagcagcgcgcgaaaatcggcattaagaaagaaatgctgcatggcgtgcagctcattcgctcccatgccgatgtgaccgacccgaacctgacctcattaaaggcgctgctggagcttaaggaggaattgaaggatacggtcactctccagatcgtcagcttcccgcaggagggcatgtactcctacgagggcccgcatggcgaatcgggggccgagctggtggaggaaggactcaagatgggtgccgactgcgtgggcggcatcccccatttcgaacagtgccgtgagtttggcgagcattccatgcacacggtagttgagttggcttcgaaatacgacaagctcatcgacgtgcattgcgatgagacggatgatccgaattcccgttacgtggagctgctttcggcgttggcatataaggctggcattggcccgaaggtcaccgccagccacacctgttcgctgggatcggcggacaacgcctacttcttccacctgaccaagctgcttaaggcggcgcatatcaacttcgcctgcgcccccaccgagaacctgtatttgcagggccgtcaggataccttccccaagcgccgtggcatcacgcgagtcaaggagctcactgaggcgagtgtcaatgtgtcattgggccaggattcaatgcaggacccgtggtacccgctgggcaatggcaatatgatgctcattcttgattatgtgctgcatttggcacagatgatgagctttgaagaaatcgacgatgcgttgaagttcctgaccgtcaacggtgccactacgttgggcctgcgcgatatgtacggcttggaaacgggcaagccagcaaacttcattgtgctggacgccgatagtgtgttcaacgccgtgtatgagcgctgctcggtattgcgttcggtgcgcgccggccgcacgctgtttacccgcgaggagaccatcgacaccggactcgccctgctgcaataacccgacaacaaacagtagttccccttgacaggggagctatcgccagaggcaactgaggggtagaccaaaaacgtgcacattatgtgtgcgtaggtctacccctcagtcagcttcgctgacagctcccctgtcaaggggagctttgctggtatgcgctagctacgctatcgaaacggactacttctgcggagcgtcaccggaatcggcgggagcggattcggctggttcagtggccggagtggcgtcggctggagtctcgccatcagtggaggcaccggcttcggacgaagtttcggcatcggtggcggcaccgtcttcggcgggcttatcggcggcggccggctcctcgaacttctcccccttgaaggtgaattcgccgaggataccctcgccttccgcatccacaatcacgcgctgaccgtcttcgagatcgcccatcagaatcttctcggagatggcgtcctcgatgtcgcgctgaatcacgcggcgcagcggacgggcacctagcagcgggtcgaagcccttctgcgcgagcaggtccttggcggcgtcggtgagttcgagcgacatgtgacggtcgaacaggcggtcgttgagctgcttgacgtccagatccacgatctggcgcacctgcggctcggtgagctgcttgaagacgatgatgtcgtccagacggttcaggaactccgggcggaactgctgcttcaattcggagctgacctggtccttcatgcgctggtagctggactcgttgttggcacccaggttgaagcccgtgttggcggccttggcgatgtctcgcgtaccgaggttggtggtcaggatgatgatggtgttcttgaagtccaccttgcggccctgaccgtcggtcaggtggccgtcatcgagcacctgcagcagcgtgttgaagatgtccggatgagccttttcgatctcgtcgaacagcaccacggagaacggcttgcggcgcaccttttcggtaagctcgccgccctcctcgtagccgacgtatcccggaggcgcgccgaagagtcgcgaagccgcgtacttctcggagaactcggacatatccacgcgaatcagcgcgtcctcatcgtcgaacaggaattcggcgagcgtcttggccagctcggtcttgcccacgccggtggggccggcgaagatgaacgaaccggacgggcgcttcgggtccttcagacccacgcgagtacggcggatagagcgggacagggcggaaaccgcctcgtcctggccgatgatgcgcttgtgcagttcggcttccatgttgagcagtttcttggactcggcctgagtcagcttgaacaccgggataccggtggtggagctgatgacctcggcgatcacgtcctcgtccacgaccatcttgacgtcggactcgccttcgcgccaggagtcttccttctgcttgcgatcggcttccagcttctcctgcttgtcgcgcagttcggcggccttctcgaagtcctgacccttgatggcctcgtccttgtcggcggcgatcttggcgatcttctcgtcgagttccttgagctcaggcggggcggtcaggcgcttgatgcgcaggcgtgcaccggcctcatcgatcaggtcgatggccttgtcgggcaggttgcggtcctggatgtaccggctggacagctcggcggcggactgcagcgcgccatcggtgatggtcacgtggtggtggttctcgtaacgggaacgcaggcccttcaggatctcgatggtctcggcgatggtcggctcgtgaacctgaatcggctggaaacggcgttccagagccgcatccttttcgatgtacttgcggtactcgtcggtagtggtggcaccgatggtctggagctcgccacgagccagcatcggcttcaacatgtcggaggcacccagcgcgccgtcggcggagccggcgcccacgatggtgtggatctcatcgatgaacagcacgatatcaccacgggtcttgatttccttcagcaccttcttcaggcgctcctcgaaatcaccacggtagcgagaaccggccaccatggaaccgaggtccagcgagtagacctgcttgcccttcagggtttccggcacgtcgccggcctgaatcttctgggccaagccttcgaccacggcggtcttacccacgccgggctcgccgatcagcaccgggttgttcttggtgcggcgggagagcacgaccatgacgcgctcgatctcgttggtgcggccgatgaccgggtccagcttgccttcggcggcttcgacggtcaggttgcggccgaactgatcgagaatggcggaaccggacttgttctgcttgtctgtcacgccgccggcgttggccagatcgcccttgccgtcaccggtgccggtgccggagttgccgcgaatcatatcgatggtcgcgctgcgcaattcgcccaaatcgacgtccatcttgatgagcacctgggtgcccacaccctcaccttcgcggatcaatccgagcaggatgtgctcggtgccgatgtagctgtggcccagctgcagggcttcgcgcagcgagaactccaacacctgcttggcgtgcggagtaaaggggatgtgcccgttcggagccgcgttgcccttgccgatcatttcttcaacctgcttgcgagtggcatccagctccacgcccttcgaggcgagcgccttggcggccacgccctcaccttcgcggatcaggccgagcagcaggtgttcggtgccgatgtagttgtgctgaagggccctcgcctcttcctgcgccaacacgatcacgcgccgtgcacggtcggtaaaccgttcgaacatgcttgtccttcctcaattgacattccgtcttactctaccgattcacgatgacgtttattcatcggattccatgaattgcgccgtaagaggataagaaaacgatatgctggttctagattcacccgtagtcgattacaaggaggctcgaaatgagtgaagctgcaaccaagcccgacatcgttgtcggcgtggatggttccgatgaatcctttgccgcgctgaagtgggcgcttgaggaggcttcgttaaccggtcagagcgtcaacgccgtgtttggctggacgcattcgtgggatatggggtccgaaccggacagcgacgaggcctgggccaaggtccgccacgatatcgccaacgagctgcgtgtgtgggtcgacaaggccgctgcaggcatcgacttcgatccggcgaatctgaagctcacctcggtgaaggcctccggcacttcggccctgctgcagatcggccatgatgcgcagcagatcgtggtcggccgccgctcgctgagccgtgtggcccgctggttcatggggtccctgtccgcttcgctggccgaggctgccgaagtgccggtgaccgtggtgcgcatcgccggcagcgaggatgagaccgtgaccgatgccatcgccaatgccctgacgccaggagaccagccggtccactacacgcagcctcagccggtggtcgaggaggctcgccgcccggtggtggttggtgtggatggttccgagacttcccgccgcgcgttcgacttcgcgctggaaaaggcacgactgcacgacgcgccgctgcatgtgatgttctgctggcagctcaaggatttgggcgttattccgggctatgagaacgccgtggcaccggtgaaggtcggtcagcgccgcgccgaggagattctcgccgggctgatggccaaggccgagattcccgatggtgtcaaggtcagcgcgaatgccttccatattcccgcgtccaaggggctgattgcggcatctcggtacgccagccatctggtggtcggttcgcgcggcctgtccggtctggacgcgcacttcctgggatcggtgtcccgtcagatcgtgaacttcgccgaatgcacggtgactgtggtgcactgatgcaccgaaatcggcatggagtgctaacgcacgtctcggtgatgggcttgcagggaggaattctttattcctgcaaccccatcaccatctactttttaggaaacatcttcgctgagacctataagttgatccgagagtacattctgctgttggggagcaggattggcgtttattttattcctcgtccgccctgttctggcgcagctgctcaatgagatcgatgacggtttcgagttcaggagtcacatcgtctgaaggacgaacgttatcctcttcgtcgtccatctcatcatcctcatcatcatcggcaacggtgttgttgaggatgtcctcttcggtggcctcgtcgtcagcatcagacttggactcgtcgctggaatcagctgcatcaacatccacaacggaatcggatgcgttctgtgcaacggactcatcaccggcagactgggattgcgaggtcccgtcgcctgccgcctcctcagcgggctcagtatcgacggcgttcccgtcaacagtcttctgtgcttcgatatcatcaccggcaggctcgcctgtcttgtcggtttcgccttcggcctcgtcctgggcaacctgctcctgcttgcacggacggttggcaaccacgtcgatatgcagatcgtcaaaggctggcttggactgcacccacagctggcttggctcgggaggttcgatttcggaatgctcaccgcagccgtgatccagggagaccacgcggccgtcatccggactccacttgttggcgcacacgccgaacatacggtcgagttcgcccgcgagcggcacgaagaaaccacaggtggagcacaggttgccttcggcggttttggtgctcaacgctttggggcctcgcggaccttcataccagcgcttggcagcctgcgcacgacccaacgaggtcagcacgtgacggcgggtcagtcggaaggtctcgacggcatcgttgacatcctgcagcgaggattcctcgacttcgccttcctcgatgcgctcgtcatccggatcggtaccgatcgaatcggtgggagccagatctgtgggctcaaggcgatctttccaaggaatccacttgggcggcatcaacgcgccctcagtggggatcaaggaggattcgttgacggtccaggagtcgatctcctcgtcgtgatacagcgtcaccgaccattgccatccttcgtagccacggatattcgcggcgaagcggaagtcagtgacgtgatcctcaagatcatatgaggtaacgaaatcccccacctgatcgctctcgtcggccacttcgagcagcacggcgcgcgcgatggcgtgagggtccggtgtcacgatggtttcggtggtatcagtcatagatcagatcagtcctgtacatcgaattgatccgccaccgcacgcagcaacgtggccagctttttgctgtcggcagcagatgggtaacggtgacggcgcaacgtattgccggccgcatcaagcatcttgataaggtcctcgcagatggcggccatgtcatccgccttcgggcgggtggccttgaccaagctgggagtggaggcgatcaggcgaacatccatggcctgcggcccacgacggccgtccaccacggaatactccaccttggcccccttgcgcaacgtggtggcgccagtgggtagggcctgagccggcaggaacacgtccttgccttcctcactggtgatgaagccataacccttggctgcgtcaaaccaacgaactcgaccggtgggcattgcgaaccttccttaatcctcaatggaaatagtaaaccgaaggtacagtttacctcacagggcttgacctcacgctttgggctgagtcgcctgagtcttacgctcagagctgaaccaagaagtcttctgtttggcgtccttggttttgccggtgggccgcttgggctcaggagcgacgatctgctcaatcggcagcaccacggtgaaggtcaggcctcccccatcggtgccggtggcgcagataaagccgtgatgtgctttgaccacggattgcgcgatggccatgcccaaaccggtaccacccttttcgcgggcacgggatgggtccgcggtgtagaagcgttcgaaaatcttcgagcgcgattcaggcggcacgccggggccatggtccacgaaacgcaatacggcgtatcgatagccggtctgcatcgaggcacctacttcggcggcgtcgatgaaccgccgcattgacgcgtcgctggcgggcatgcgagcgagctgtcttggatcgatggcggccggcatcacaccgagcgcggcctcggcaggcgaatcggcaggcgtgtagcggtggatgttgcccacgatgttggtcaccacctggcgcagtcgagaggcgtcgccgggcagcacgacctcgggccaatcgccttcggcaaggttgaattcggcgggatggttcaaatcgcgcgccggttcgagggaaatctgcatgcggcgaacggcacggtccgggtcgagcgcatgcaagtcgtcgacggcgtcggtgaccagcgacgagagtttcaccgtgccggtcacatcgatgccgcgcccctcatcgagacgggccaaagacagcagatcctcaacaagaacagtcatgcgctggctggaccgttcgatatgttcgatggactcgtccgcacgctccaaggcaccaggcatatcgcgctgcatcttatacagctccgcatagccatggatggcggccaacggggtgcgcagctcatggctggcgtcggagacgaaccgtttcatcttgtcggtggtctcctcctgttcatggaaactggattctattcgggtgagcatggagttcagcgatgcggccagggagccgacctcggtgttttccggcgcggaaggaatacgttggctcaggtcgccggcggcaatctttgcagcggttttctcgatgcgcttcagcggcgtcatcgtgtgctggatgatcagcgtggacagggagccgccgagcagcaccacggcgatgccgaccacaatgcagtatcgggtgagtgtgttgacggtgtcgatctggtcggccagcgacaagccgatgtacaccacggcacggtccttgccgttttgctggaaggtcaccggcagaatacgccatggtgccctcgccgtgacgatggcggcatggttggcattgacagtggggttggccagtaccttggcgatggtgtcagaggaattggagtttccgttggccggatcgttctggctgtccgcactgtcggactgcaccgtgatgatctgcttggccactgcctgcgtagtgaatgcctggccgagcgtgatgccactggtatcaccataggtaggaagaatcggcaccgatacgataccgtcctgcatctgcggcatcagcggggtcacgaccagaggattgccctctttgtctttggtgccgtcggtatattgaatctgcagaaagtacgagttcggccccgatgagtcattttttgacagcagatcgatattgttgaccaccagctggctttgcgagcttaactgggtgtcggttttctgcagcatgtagttgttcaccaacgcgcggatggagaaggaaatcaccgacacgccgataagcagcacggcgatggtgcaggccaccagcttgctgctcaacgagatacggtcgatatgccgcatcagcatgtttttcttacgttcgcgccgctcttggaaatgggcggcgaacggcggcattgcaggcatgggattcgtgttcggggcggcgttcggcgtgctgctcggcggtacgccgcctgactgcttatcggggatactcatgagattgcgatgcgttatggatggggcgactagttcttcggttcgcgaatcatatatccgatgccgcgcttggtttcaatcagcgaagtcaccttgcgcttgccgccttcgccgtcgtcgacctcgatgccgtcgactttcttgcgcaggtaggagatgtacgattcgacgatggctgcgtcgccgccccagtcgtattgccagacatggtcgagaatctgtgccttggacagtactcggccctcattgtccatcaggtagcgaagcagcttgtattcggtggggctcaggtcaaccggctgccctgcacgggtcacatcgtgggagtcctcgttgatttccaagtcggcgacgcgaataatcgggtcgtcttccacctgttcgcgggtacggcgcagaatggcgcggatgcgagccacgacttcctcgaggctgaacggcttggtgacgtaatcgtcaccgccgacggtcaggcccatgatcttgtcttgggtgtcgtcacgagcggtgaggaacagcacaggggcgttaatgccttcctggcggatgcggcgggtgacggtaaatccatcgatgtcaggcagcatgacgtccaacacgatgagatcaggctgcactttttcgataacctcaatggcttcggaaccggaagcggcggtgtttacctcgaatccggcgaagtgtagggaagcgaccagcagttctcggatggacggctcgtcgtcgacaacaacaatcgatgcttcaataggcttactcatgcttcctagagtgtcgcgctcttctgggcgtttcctgaatgtcatcttggagttcggccttggaatccttcttgatctccttgcgccgacgaatcaccaccatgaccacaatgatgatgaccagcgccaccaacaccacacccatgatgattatgcctacggtcaccgtggatgatgaggtggaggcttttttggatttcacgatttgatccatcattgccgttgccgcgccagaccagctcggcgggttttccagtaacggctgctgtgcggcttcggatagcttatcgacggttttgttatcgagaagccacttatcggagttcttggacacgacgaccaccaggttgccgtcattcgaggccacggcaagcatcactgtgttcggcttgggattcatggactccatcacggttgccgcccagtcttccggtttctgttgactattgaaactggaaagatacagcagatgcacgtgtacaccggtttccttctcggttttggcgatggcatccgcgacttcggccgcatgggagcccaggagattttccgtatccgtgatgttctcggtgatggtcacgccgctgtcggtgctgctgctggagctgtcagagctgtcgcccgagttatccccatatgcatttgcggttatccacattgcgttcatcgctactgcagcaagggcgcaaatggcacaaacaagccattttcggaccatattcccgaaggccgaacaggacggctccgaagataggaccacaatagttgtttttccgtcttcccgattcgttgttgacatatcctccaccttagcggccggtattggcaagcggccgccatacataccattaaccctctagaaaaggagcaacgatgccccaatatcaggtagattccgagcgaatccaatcatcctcggccgcagtggccacttcgatctcgcagatcaggcaggccgtgggcggcatgtacaccaatctcaatgccttgcaggacgcatggcgaggttcggcggccacccagttcaccgcggtagccgaacagtggcgtgcggcccaacagcagatggaggcctcactcgagtccatccaacgctcgctgacgcaagcctccaccgtgtacgctgacgccgaaatccaagcttcgcgcctgttcgccagctagtttcttggctctcctccctgaggggagctcgatcgcgaagcgaaactgagggagtatccctacaccgcagctccccttagtctcactgcgttcgacagctcccctcaaagaggggagccagaatacaaaaaaggggactcccgaaggagtcccctttcagctcaatcagctagcgatcgcttgcggatcagtagcccatgtcggcaccggcggccggggcagcaggcttcggctccggcttgttggcaacgacggcctcggtggtcaggaacagaccagcgatggaggcggcgttctgcagagcggagcgggtcaccttgaccgggtcggtcacaccggcggccagcaggtcttcgtaggtgtcggtggcggcgttgaagccttcgccatcaggcagggagcggacggtgttgatgaccacgtcaccggacacgccggcgttctcggcgatctgcttgatcggggcttcgatggcgcggaacacgatggcggcaccggtagcctcttcgccggtcagggaggcgacggcctcggccttctcggctttggcagcagcctgaacgagggccacgccaccgccgggcagcaggccttcctcgatggcggccttggcgttacgcacggcatcttcgatgcggtgcttgcgctccttggcctcaacctcggtggcagcgccgaccttgatgacagccacgccgccggccagcttggccagacgctcctgcagcttctcacggtcgtaatcggagtcggtgttctcgatctcagcgcggatctgggccacgcgagcgtcgatgtcttccttggagccagcgccctgaacgatggtggtctcgtccttggaaacgatgaccttcttggcgtggccgagcacggaggtgtcgacggactcgagcttcaggcccagttcgtcggagacaacctgagcaccggtcaggatggccatatcctgcagcatggccttgcgacggtcgccaaagcccggggccttgacggcgcaggacttgaaggtgccacggatgttgttcaggatcagggtcggcagtgcttcgccgtcgacgtcctcagcgatgatcagcagcggcttgccggtcttcatgaccagctcggccacgtgcacgatgtcctgctgggaggagaccttgccggaggtcagcagaatgtacggatcttcgagcactgcggtctggtcgtcagcgttggtgacgaagtacggggcgatgtagcccttgtcgaaacgcatgccctcggtgaagtcgaggtccaggccgaagcggttgttgtcttcaacggtcacaacgccgtcctggccgaccttgtccagagcctcagcgatcttctcgccgacctcagggtcggcggcggagatggtggcggtagcagcgatctggtccttggtctcgacgtccttggcggcggcgacgagttccttgacgatgacctcggtggccttctcgatgccgcgacgcagggcgatcgggttggagccggcgaccacgttcttcagaccctcgtgaaccagggactgagcaagcacggtcgcagtggtggtgccgtcaccggcgacgtcgtcggtcttcttggcgacttccttgaccagctcggcgccgatgcgctcgtacgggtcttcaaggtcgatttccttggcgatggacacaccatcgttggtgatggtcggagcgccgtaggtcttgtcgagcacgacgttgcggcccttcgggcccagagtgaccttgacggtgttggcgagcttgtcaaggccctccagcatgccctgacgggcttcctcatcataagagatgatctttgccatggttgcgtattcctccaaatggctaggtataccggttatcactcgcaagcgtcgagtcgtgacgaccagccgtcagctgccgattatcactctcgacctccgagtgctaacccagacattagcactcgcgaccgccgagtgccaacatcatcggcggcgattgcgctttgggcatgaaaaggccccaaccgtcgaaacggtcagggccttcaatgcacatccttgcgtgcgtgttgctcactcggagcgggcttcacccgaagacagcttgacaacatcctttgcctgcgtgcctttgccggacgaagcgggcgtatactccacgcgatcgccctcgtacagcatcttgaacttattggtgctgccgtcgtccttgatttccgcgtagtgcacgaaaacgtcctcgctgccgtcgtccggctggatgaacccgaaccccttcttggcaaggaagaacttcacggtaccttgtgccatatctgatctttcctttgttcccttaggcgtcgcgacacaaaacctatagggaacgtagaaagaaccgcatcgcgctcccctacctcgcgactagatgacgattgtacagtgacgagggaacaatcccaaccgcagtggcacattttcggtacgaattatttcatagacgtgagaacgctcacagttttcgatgtattccacgccgatataaggggcgcatcaacaatgctagttgagcagcaccaccgtaatgggaacggcgagtccttgcacctgctccacagccgaaatgccaagcgtggtcgccacatcttcggcggtggctttatcggcttcattctgataccataccacggaagaagccggcaatgtgccgcgcggattggtcgcctcgacgctggtgtaaccggcggtctgcagcacatcggcctgctgacctgcatatccttggattcctgtggcgttgaccacacgcacctgcgtggccttattcacagtcgcggtggctccggactgctgagactgctgatcggagtcttgattctcattcgaggatgtcgtatcactgttggtatcggattttgccgaatccgaagtcgagtccttggacggatcggtcgaagtggacgaggaatcatccttggtactgtttttggtctcagccttgctggacgaatcggacttggaagcagtcccggacgtggtcgcagtctgggacgatcctcctattgcattcctgtattccccggaaatccatgcccagaccccgacaccgcacagtgcggccaccagaataacgacgatgaacgggcagaggcgggccactgccgaacgagcgccacggtgaactcccaccggtcccttcggaggattgtcgaaggaatccggttcataggattcgtaggtcatcatgtcgcgtgccataatcgccctttcttcctgtcaaaactacccatgagtgtaatcggcaaacaactcatcagtccaccacaccacgcctcgtgcaccggatatgcacgtttgactacagtggtgagtcatgatcaaaccattgagcgaactggtagagccggggtgggcccatgccttggccgacgtggagcccgccatccaccatatgggcgattttcttcgtgcggaaaacgccgccgggcgcccgtggctgccggcaagccacaatattctgcgcgcgttcaccatcccgttcgattccatcaaggtgctgattgtcggccaggacccctacccgaccccgggtcacccggtgggtttgagcttctgcgtggcgccgaatgttcacccgctgccgaaaagcctggtcaatatttataaggaattggttgacgaccttggggtgcccatgcccaccaacggcgatctgacaccgtggacggaacgtgaggtgatgttgctcaacagatgtctgaccgtcggcgtcgggcggccgaattcgcatcagggcaaaggctgggaggaagtcaccgaggccgcgattcgtgcgttgaacgcgcgcacggacgccgacggcaagcccaagccgctggtggcgattctctgggggcgtaatgcgcaaagcctcgagccattgctgaccaatgccttcattatcaaatcgcctcatccgagtccgctgtccgcttcccgcggattcttcggctccaaaccattctccagagccaatcaagccctagtcaccatgggtgccgacccggtggattggactctttagacagaccaacagtcattgtgagtagttacagtgagggcatgactttgttccccacgcaaccgaacataccttcgccgaccaccgccgcacgaccggtcaccgttcccgcgcccggcgtgtcggctccgctgggtgccgatgacgccaaacgcgcacgtatcctggccgacgccattcgggcgaggttcgcccagacactggtgggtcaggataatctacgcgaatcgcttatcgtgaccttggtggccggcgggcatattcttatcgaatccgtgccgggcttggccaagaccacggccgcccagacgctcgccacctgcgtatccggctcgttcaaacgcgtgcagtgcactcctgatctcatgccatccgatctggtgggcacgcaggtcttcgattttgcgtcgcagaagttcaccacgcagatcggcccgattcacgccaatttcgtactgctggacgagatcaaccgttcgaatgccaaaacccagtccgccatgcttgaggccatggccgagggtgccacgaccatcggcgggcagcgtatcgccttgcccaagccgttcatggtgatcgccaccgagaatccgattgaggaggagggcacgttcaacctgcccgaagcccagatggatcgtttcatgatgaaggccgtcatgacctatccttcgcccgacgaagaggctcgcatgctggccatgctcacccaccgtggctccgatatgatcggtcccgacaccatcaccggcgaacgcatttccgtgtctgacgttgattttctgcgcaaggcggcacgccgcgtgcatgtttccgacgcgatcatgcgttatgcggtcgatatcaccgccacgtcacgaggtgccggctcccgccccatcaagggactgtcgtccttggtgcgtttgggtgcctcgccgcgcgccaccatcgccttgacccgtatcggccaggcgaaggcgttgctgtccgggcgcgactatgtggtgcccgaggacctcaaggcgttcgctcatgaggtgctgcgccaccgtattatgctgacgttcgaggcactggccgatggcgtggtcagcgatcagatcgtcgacaagatcgtcgaaacggttcctgttccgtgagttccgattccgttcgcaagaaaatcgaggcccttggcactcagctgagcctgcctaccgtaaggaaggctttgggcgtgctggagggcgaacacgcatccgggcgtcgtggcggcagcggcgatgcgatggatgtgcatgcctatgagccaggcgacgaatcccgtcttatcgattggaagaccagcgcccgccaaggccgccccatggtggtcgagcgcgagcgcctgtcgacgtcacgggtctggttgctgatggacgttggcctggagatgactggcgtatgcccttccggagaacgcgcatggcaggttgccgccaatgcgctgcgtatgttcgccgcactgtcgttgcgccggtcggacgatatttcgctggtgttcggcgatgagtccagcatcacccgcgtgccgttcaacggtgggttcgcgcagttcgaacgcacgctggacaaggcgcttgatcgtgattgggatcatcaccgtaatatcgacgcgctgctggaatatgcgcgccgtatcaaggatcgcgaggcattgatcgtattggccaccgatgagcatgcgatggaggagcggcatatcaccacgatccgtcgtattacccgcacccatccgatggtgctgatcgatgtggcgacgatgaatccgttcaaggccgtctcatcccgccacgctcccgccgacggcttgagtgcacggcgtgtgccggcattcctgcgcaacgccaaggcagcggccgaggtcgatactcatcgcgcgtatatggccgcggctttggaacaggagctcacccgtgccggttcccatatcattcgagccgcatccagcgaatccatgttcgatcgtttcgtcgccctggtgtcccgggcattggcccgcaccacacgcaatagactgggtactgcacccgaactggtcggactgactttggcgggtgatctatgatgcacagcatgttccccatcatcccgctcgccactgatcccggcgatctcaggcccgtggagtcgttggccttgaccactcccctggtgatggccatcgtcgcatgcctgttgctggcggtaggtctgatcgcgttgatcatcatgctggctcgccccgcacgcaaacctcggaacagcgaccgtgcgcgtggcactcatagcaatgccagctccaaggccgagtggcgtgcccgcatcgacgatgtggtggcccgtcatgaatccggagcactgccccggcatgaggctttcgtcgaattggccgtcatcgcccgtgatttcgccggtgccgcatcaggcaaggagcttagttccagtacgctgaccgatttggcgtacctgaatcgcacgcccgcgaatcgccaaggattggacgcattgaagcagaccattagcgcgttgtatccaccggaatttgccgatgatgcccgcaaccgaatcgcccagacgaccagcgtgcagcaggccgccgagtgggtggcgaatctggtggaaaggtggcgttcatgatgctggcatggcattggccttgggccgctctggccggcgtcttggcagcgctggcgattatcgtgctgattgtcgtgttcgcccgccgtaacgccgccgacgacacccctgtattctcgatggacgacgatctcaataccgagcacgcttcccgtctgttccgtcaatggcgcgctttgggccgtctcgccatcagcgtgctggtgcttgcgctggcgctggccattgtgctggtggctcgccccagccaagtggatgccggtgacgaacgcgcttccagccgagatatcgtcctgtgtctggatgtgtcgggatccacgctcccctatgatcgcgaggtcatcgatacctatttggaactggtcaagcatttcgagggggaacgtatcggtttgagtatcttcaactcgacctcacgcacggtgttcccgctgaccgacgactacgaactggtcaccaaacagttgaccgccgccagcaaggcgctgaaaggcgtcgagtcgcaggatgacatcgataagatgtccgatgccgaatatcaggacatcgccaattggctcgaaggcacgcagaaccgcaaggacgccacctccttgattggcgacggcgtggtgtcttgcgcggcgatgctccccggtttcgcttatggcgaagccaatcatgcgaatgccgaccgtcagcgtgcggcatccatcgtgctggccaccgacaacgtcgtgtcaggcaaacccacctattcgctgaccgaagcgttggacttgacccagcagaccaaaatcaccgtggacggcctgtattccgggccgaaagccagtgaatcggaccaaaccacaacggatatgaagtccgcgatcgagtcgcatggaggcatcttcctcacccaatcgaatggcgcgtcgatagatgagctggtacgggatattcagtcgcgtagagatacggatgtggagaacaaggcgaaatcctcaatggtggacgctcccagtctgtggacgcttgctctggccgtgatactcattatctggatcgtatgtgcatggaggttgaggcgatgaacggattcaccttctcccccgccttgggctgggtcgccggcggactgctggcggccgggctcgccgtactggccattctcgaaatcgtattgtttgttcgccgccgtgcttccagtgacgagaccgtgtgggcttgcatacgacgtacgcttatgctgctcatcgtagcggtgatggtactgactcccagcgtggtatcgtctaccacctcacaggtcatcaatgccaccgacgtcatcgtggcggtggataccaccgggtcgatggcggtggctgatgccacatacgggtccgagaagaccattacccacatcgatgccgcgcgtcaggccgtgcatgatgtgaccgctgcttacccggacgccagtttcgcggcgttacggttcggtgcttcgggaacacttgatgtgccgctgaccccggatgcgccggccatcgataattgggccaacacgttggcggtggaagccacatccgtgtcggcgggatccagtctggatgctccgatcgatcaattgctgctgaccgcgaagtcgattcgtgaagcgcacccggatgatgcgattgtgctgtacctcatcactgacggcgaacagacctcgaatgtgacgcgtcgtacgttctcgtcactgcgacagtatctcaatgatgggtttaccgtgggcgtcggctcgaccgagggcggcaagattcccgtcatcgccgatggcgtcagtgccggcgattccaacaccacggaccactgggtggtcgacccggataccggcgaacccggcatctccaagatggatgagaagaaccttaaagacattgccgacgagatcagcggcacatatgtggccgtggacgcttcacagacattggcggattcggtttcggccaagtcgtcgaagcagtggcgcatgaccaccacggtcaaggaacgcacacgcaccacgccggtggtatggccgttggccattgcgttggcgatattgcttgccatggaagtcggtgcatggatcgcaacctcaaggaggctgctgtgagaaacagtaacgaaatccacaagaacgatggctcggcgaatattcggatgcgggcgaaatgcccgctttgggcacgtatcgtcctggcttgtggcaccgtattgctgctgctggttgccggcgtggcggcagtaaacctgtccgcttcgattacgttcaatcaggccaccgcatcattgaatgccaatatcaaagcggctcaggatgagtccacggatatcaccacgctcaaggcgcaacagcagcagaccgatgcgcaattcgccgaggccgggcgaatgcgtacgcttctgttgccgcaagtcaaggacgccatcgacaccaatgcttcgatttcttccgagctgacgaagatcaccctgaaacaggccgaggcgcagaacagcggttccgattccgggcaagcccaatcggcgcagcaatccgagagttcctcagccaatgccaaaaagggcggcgcgttgaccgacgagcagaagaagcaggtcgaggagctgatgaaggccaatcagcaatccaccgatacccagtcgaacaccacccaatccaagcagaaagcgacgcagaacaagggtaccggggccaccaagccgtggtaagcagtcgttcacggttgctctttttctcacatcctcacgggtcatggccttatcgcggctgtttcccggtttcggctgtcggctttggcgtttgtctgatcccgatagcccatggctgatccaaggtgtgcccaaacaggctatttgtggataatcgttacggctatacacaacacttgtgaataacttcgcccaaaatcggcaagctagaaccacattggtcgttccggctggacaagcatgagtcctgtccttttagctggatatatgaatacctacaccagcaccccagcacccatcgatcccgccggcggctttgccggcaatacggtgacgccgttcgattacggcacttgcccttgccatgcggcggtacagcgtagtcgcgacctcgtgtccgtccaacgtgcggccacactggcgcaatcggaccagatggcggtggccgtgaaccgctcccgcaacatcgtgtggaccggtaaagccgccgacctattccgatcgcggctcagtcgcaccgcacagtattcggccagtctcgcgcaagacatggagaccacccaccgattggcttgggggtcatcatgagcgagcacgattactggcaggtggaatcgtccgtttacggcggagtgggatatgcaccagccactcttgaagaatatgccgccatagccaaggctctcgatgacgaggcggcaggatttgcggccatagccacggcttgggaatcggccgcattacagttgcagtcacatcggcatagtgcgccgatgtgcgtcaccttgcagtcgggcgatccgagcgccgttgttcccggccatgtcactgcaccatatgccgcgctgggcaatcggtgttatgaccatgcaacggcatgtcagcggttgagcgatgatctgcgtggcgcggccgatctgctgattcgcgcacactctctgtattctcaggcggagatgacggctcggcgcatgtttaccgaattattgcaggccggtacacaggccaaaccgggatatgccgcggtgggtgttgccgctgtggcggcgggcggctttctggccggctgggctattgacggcaaaccgaacccagcatggatgtccacgttcacctatccgttccaggaaggagtgctcagcggcgcgggcggaatcattggcggcgtacctatcggcaagagcattgcgcacaccgatgaggtcaacaaggctgcggggaaaatcgccaatttctccggcccggcgaaagacgtcgtccaaggcaatcatctgaacgtgcgcgaggtgcaggcgaatgccgacgtcgtccgtgcaagcggatcggtggccgagtcaatggagaatctgcgcaggctcgccgaagaacggctcggcaaaatcgagctgaacagcggactcgaatatgggaccatcgccattcaacgctatgaacgggctgatggaaccaactcctggctggtcaccatcccgggtaccgatggacaacctgactcgccattcggctgggcgcagaacgtggaactgatgagcgccgatcaggagcgccgcaggaaagcggacagcgctcgcacggttgccgaggcgatgcgtcaggctggtatcggcaaggacgagcccgtggcactgatcggccactcccaaggtggcatcgttgccgccacgcttgcctcggattgggcagaggaatataccatcgagcatgtggtgacagccggatcgccggtggccaatcatccgattccgcaacgcacgtgggtcaccagcgtggaaatcgatgatgaactggtcgccgcgctggatggtgccgccaacccggtcaccgataattggctcaccgtgcaagggcatgtatcgcccgcgcccgcggcaacaccatccacagtgcattcggacgtctcatgcactcccggcgcaacacccatcaacggtctgaccccatatgacgccgcatccgtggctggttcgaccaacggcagggagttgtcgcattggctcaaataccatcaggccgcttatcagaacgccaccgacctcggctcccccgccgtgcagcgccacgaagcgcattttcaggaagtcatcaacggagaactcaaggaaacccgctattaccaaggccgcatgacccagtccacaaccattgctcccggcgagcgcaccaccgagttcagcacgttcggcggttaaaagtaaataccacacttgacagagttgtcaagaaaggagttaacaatataatgacgagtaggagatggctcatcaaactgatgaagcaagcggcgaaacgcaagaa

SEQ ID NO: 3183 - DNA, 2903 bp, Unknown
  R53_2m  MAG No. k141_2563
aacacaacctcaagaacgtcgacctagcgattccgcgcaattgcatggtcgtgttcaccggcctgtccggttccggcaaatcctcgctcgcgtttgacaccctgttcgccgaaggccagcgacgctacgtcgaatccctgtccgcctacgcccgccagttcctgggtcagatggacaagcccgatgttgacttcatcgagggcctgagcccggccgtctccatcgatcagaagaccaccaaccgcaacccgcgttcgaccgtcggcaccatcaccgaaatctacgattacctgcgactcctcttcgcccgcaccggcatcccgcactgccccgaatgcggcgagcccgtcgcctcccagaccccgcagcagatcgtcgacacgctgctcggctacccggagcgcactcgattccagattctctcgcccgtggtcaagggccgcaagggcgagttcgtggacatgatcgagctgctgcgctccgacggctacgcccgcgcgctcatcgacggcgagatgacacagctgtccgacgacatcaaactcaccaagcagaagaagcacaccatcgaggtcgtggtcgaccgactcgtggtcaaggacggtatccgccaacgtttgactgattcggtggaaaccgccctcaagctcgccaacggcagcatcgtcatcgacttcgtggacgaggaggaaggcagcccggcccgccgccagccgttctccgaacaccgcagctgcccgaacgggcacacgctcgaactcgatgaggtcgagccgcgcaccttctccttcaacgccccctacggtgcctgccccgcctgcaccggtctcggcttcaaactggaaatcgacccggacctcatcatctccgacccggacaagtcgctggccgacggcgtcatcgaaccgtggagcggcaccaagatgacctcccagtactacggccacatcctcgaaggcttggccaaggaaatgggcttctccatgaagaccccttggaaggacctgccggacgacgtcaagcacgacatcctctacggccacgacttcaaggtcaacgtctcctaccgcaatcgctggggacgcctgcgtgaatactccaccggcttcgaaggcgtgatccgcacgctcatgcgacgccacgacgaaaccgattcgcagtccatgcgcgaatactacgagtcgtacatgcgcgaagtgccctgccaggtctgccacggacgtcgtctgaagcccgaggtgctctctgtcaccgtggacggcaaatccatcttcgacgtatgtgacatgcccgtcgtacgcgaactcgcctggatcaacggcctgaaactcgaaggctcggcacagctgatcgccggcgaagtgctcaaggagatcaaggcccgactcggcttcctgaacgacgtcggcctcgactacctgaccctctcgcgcgcggccgccaccctgtccggcggagaagcgcagcgcatccgactcgccacgcagatcggctccggcctggtcggcgtcatgtacgtgctcgacgagccgtccatcggcctgcaccagcgcgacaacgaacgcctcatcgaaaccctgcaccacctgcgcgatctcggcaacacgctgatcgtcgtcgaacacgacgaggacacgatacgccgcgccgactgggtggtcgacatcggccccggcgccggcgaacacggcggcgaagtcatctactccggccccgccaagcacctcatcgaagccaagcgctccatcaccggcgactacatcgcccaccggcgagagatcgccgtaccctccaagcgccgcaagatccacaagacccaggtgctcaaagtcgtgggtgcccgcgagaacaacctcaagaacatcgacgtgagcttcccgctcggcgtgctcaccgtggtcaccggcgtctccggctccggcaaatcctcgctggtcaacacgatcctctacccggtgctcgccgacaagctcaacggtgcacgcatcgtacccggccgccacaggcgcgtggaaggcgtggaccaggtgcgcaaggtgatccacgtcgaccagaacccgatcggccgcacgccgagatccaaccccgccacctacaccggtgtgtgggacaagatccgcacccttttcgccaagactcccgaagcccaggtgcgcggctacggccccggccgcttcagtttcaacgtcaaaggcggccgatgcgaggcctgccacggcgacggcacgctgaagatcgaaatgaacttcctgcccgacgtctacgtggactgcgaggtctgccacggcaaacgatacaaccgcgagacccttgaagtcacgtacaacggcaagaccgtggccgacatcctcaacatgcccatcgaggaggccgccgacttcttcaaggcgtacaccggcatctcccgatacctgaagaccctcgtggacgtcggcctcggctacatccgactcggccagcccgcacccaccctgtccggcggcgaatcgcagcgcgtcaagcttgccaccgagctgcaacgccgatccgacggcaaaaccgtgtacatcctcgacgagccgaccactggcctgcacttcgaagacgtgaacaagctgctcaaggtgctgcagtccctggtggacaagggcaatacggtcatcgtcatcgaacataatctggatgtgatcaaggaggccgactggctgatcgatctcggtccggagggtggcgacggaggcggcaccatcgtcacgcagggcacgcccgaacaggttgccgaatgcgaagcctcatggaccggcaagttcctgaagcccatgctttagccttccattgctgctgacctcgggtgggtgggagtggtatgttgctggacatgctccgggccgctcaggccaagtctttacggtccggcaacacac

SEQ ID NO: 3184 - DNA, 18638 bp, Unknown
  R53_2m  MAG No. k141_2596
ggcgtgcttgagaagaccgcactggtctttggccagatggatgagcagccgggcacccgtctgcgcgtcccgctgaccgcactgaccatggcagagtacttccgtgacgtgcagaaccaggacgtgctgctgttcatcgacaacatcttccgcttcacccaggccggttccgaggtgtccaccctgctgggtcgtatgccttccgccgtgggttaccagccgaacctggccgatgagatgggttcccttcaggagcgcatcacctcgacccgtggtcattcgatcacctcgttgcaggccatttacgtgccggccgatgattacaccgacccggccccggccacgaccttcgcccacctggatgcgaccaccgagctttcccgtgacatcgcctccaagggcatctacccggccgtggatccgctgagctccacttcgcgaatcctcgatccgcgttacgtgggccaggcccactacgactgcgccaaccgcgtcaaggcgattctgcagcgcaacaaggaactgcaggacatcatcgccctgatcggtatcgacgagctcagcgaggaagacaagaccaccgtgaaccgtgcccgcaagatcgagcagttcctcggccagaacttctacgtggccgagaagttcaccggtcgccccggctcctacgtgccggccgacgagaccatcgaagccttcacccgcatctgcgacggcgtgtacgacgacgtcccggagcaggcgttctccggcatcggcggcatcgacgacctcgaagagaagtggcacaacatgcagaaggaactgggtgcgtgatggctgcggaaaaaaccacgatgaaggtcaacatcgtcgccgctgaccaccctgtgtggcacggcgaggcgacgagtgtgaccattcccgcctctgagggcggcatgggcatcctgcccgaccatgagcctgtgctcacagtgatcaagcagggtacgctcaccgtggttgagcccgatggcgatcgtcacatgttcgaggtgaccgacggattcatttccttcgactcgaacaaactcaccgtggcggtcgagcgcggccacgacgtccagtactccggcaccgccgagtgatctgaaccaactccttaaggggccctctggttttccagagagccccttttgctatgtatgccatgtgttgcgctacagtggtggcctatgcgagttattgttgccgactgttcggccgagtattcgggccgcctcaacgcctcactgcccctggccaaacgtgtattgctgatcaaggccgattccagcctgttgattttctccgaattgggctcctacaagccgctgaactggatgaccgcgccctgcacgattcgtgagatcgacccagccgccaaatctgcgcaacattcccgggaaagtgttgctggtggggctgtggatggtgattccgcgacgcattccccggaaagtgtcgccgctcgtgagccggaaaaggtgttacgtgtcagcgccgacaagggctcggacattcttgaagtgacgctgcaacacatctattccgaccaaacctatgatctgggcgaagatccgggtctcatcaaggatggcgtggaagaccatctgcagcgctatctggccgagcagatcgagcgtatcggcaagggagccaagctggtgcgtcgcgaatacccgaccgccattggcccagtggatattatggccgtgaatgccgagggcgagcatgtggctgtggaaatcaaacgtcacggcggcattgatggcgtcgagcagctgactcgctactgcgaactgctcaatcgtgatccgctgctggccccggtgcacggcatcttcgccgcacaaaccatcacgccgcaagcccaggtcttggccaaggaccgcggcttcacctgcctcattctcgattacgacgatatgaaaggcaccgaggacgacagtctcaggctgttctgattgttcttggcttccctcttgaaggggagttttcgaacgtacatagagagactgaggggaggcctcacggtatattccgtgaggcctcccctcagtcagtttcgctgccagctcccctcttggggagagccatcgagattgtttagtacgcggcgagaatatcgattacgaagaccaacgtggagttggcgggaatcgaaccttgctccttatctccataggcctgatccggcggaatcaccagcagaacctgagagccgacggtctggccgaccagacccttctgccagccctcgataacctgatgctggccgctggaatcgctgaacagatcggcgtcgattgtggaatcgcgatcccaggacgaatcgaactgcttgccattcgtaagccaaccggtgtacttgaccaccacggtgttcttgtcggtcagcttggcgccgttacccttgatcagcgtctgcgagatcagcgaatcaaccgaaccctgaccgttcatgtcaatggacggcttgccattcttggctcgcgtcaccttcggcagattggccggcacatccttgacttcctcgccagtggccttcttcaggtccttggacttggagacaaacgtcatcgccagaatgtaagagtatccggacgaatcctgagcgttgacgccaaagccgatcgtggtgttgatcttggcgcccttgatctggttgtagtaggtcgaggagagggtcttggaatccaccttcagcgagcaatccggcgtgttcttggtccaggtgtccatgagctcggtgccgtctttaacgttgagcgcgatgccttgggcacagacgcggtcgccctcctcgatcacgtcgccatcgcccttttgcagcaccacataggagccgtcggacacggtcatcggcgtattaaaggagatggtcggcttctcgccgagcttgcccttggcggtcacgccggcaatttggcccttcttgtcagaagagtcggaagatgaagaggaatcggaagaagaggatttcgagtccgagctcgaactggagcaggcagccagcgacacgcacatcgccagtgaacaggcaagagcaacggccttgccgaggggggataacatagatttaacagacttacgcatgacacaccaccctactggtgaaccttgattttctgcgctcctaggtaataaacaggtgaagattgtagaatggttaagttatgagtgctgaagaacagactacaagaccggataagggcgccaagcgtccatctcgtcatgccaagatcatgcgtggagtggtgacgcctatcttcggcctattggccgtggcggctgtggtgttggggtacatgaatgccacgatatggaagccctccactgaaatcaccgcttccgcaaccatgagcggctcccggtatgccgtcactgatccgaatgtgctgaccttgttggatcagaacgccacgataaccgtggactcgggatcctctcaggacgaggcgtgcgtggcgttgggtccggccaaggatgttgccggatgggtcgcgtccgagaagtcctatacccgcatcaccggattggcatcatggagcgagctgagcacccagaagggaagcagcacgagtcagggagcgcctaccagtgccgatgacgcggtgtcgttcaaggattccgatatgtggactgacgtgagatgcggcactgggtccgtttcactggagagcaagaagaccggcgcctcgacggtagccattgtggatttgggtgaaaatgccaccaacgccaaggtgcagctgcactgggtgcgctccgaagtgccggactttgcgatgccgttctatctgtccggtggattgctggccgtgctggccgtattgtgcgcctccgtgttcgccatgccgccgcataagcgccgcaagcgcatggtggaaggcacggcaagcgccgtaattgaggaagaggcacccgccagcatcgcagtgtccgggaagccggatggtgcaagtcgacgtaatcgtcgccgccacgccacaaatcggcgttcgggccgtgcgtcctcgcaatctgaagccaccgaaacaccggttatcatcgacccaagttcacgtaacctggtcgccgaccagcagactggtgccgagagcggcgctgagaccggcttcagcgccggcgataacgaatcgacttcggtaatcacccctgacgaactgcaggcctacttctcccgcttggcccaagaggtcaataccggagacgactcggccgatgacggacaggaggaaagctgatgaacaagcgatggaacaaactgtgtgtggccgccctcgcctgcgtggcgttggtcgtgccgttgaccgcctgtgaaggccggctgccgacgccggctgctgatacttccaccaaggttgcgccggatttgaccgaggcacaggagaagaagattcgcctgaagattctcaagacgatcgatgaagccgatcaggccaagaatcccgatggatatgcggccgttatgggcgggccccagctggacattcgcatcagccagaccacgatcaaccagcgcggcggcggtatgtccaaatacgcgaccattcccaaggacatcgcccagacggtgattcccatggacgacggatggcctcgctcggtgttcaccatcacgaccaccaccgaagatcagcagtccaagcgtttgctggtcttcgatcaggaatccgcccggcagaattacaagctgatggccatggctcgactgtttgagggggccaagctgccgaagttcgagattccgactattggctcgcagatgggcactgcaaaggatgagaagctggtggccgctcccgccgatgccttgacccaatacgccgatgtgctgcagaacggctccaagagccaatacgcttccaagttcgcagacgatttgctgcgccaggaactggccaataccacggccaaggtgcaggaaggtatgcaacgcaacaacggtacgcaggagcagaaattcaccgttgtgcctgaacagatgtgggtgatgcgtgctgcagacggtgccggtgatttggtggttggccgtattaacggcgaatggactcgcaaggcgggggatggccgcgaatcgcagccggcttccgacgacgagaaggcgctgttcaatagcgacaagtacaccagcaccatgaaggtcacgtatgtgaacgtggtggccttgtacattccgttggcaagctccggtgagcaaatcaccgccgtgggtgccgaccgtcagccggtaaaggtcgaagcgctgtagttgttgccgccgcccaccgcgcggttaacgccccaccacgatgtgattcgtccaccacgatgtcgataaaatcttacctttcgcataatggtgccgtttggggtcacatcgtggtgggcgttttgctacgtggtgggaatttcaccgcgtagtggaagaatccctacgtggtgggaatcggcattacaatcaatgtcagcaaatgtgattgttgttgtacgcgaatcgcgtggaatcgggaggcattatggcagagcagcagttcaatccgggagtctcattggcgggcgccgtcgatttggaggcgctgaagcatcaggtcaaggccgagcccggccaagcgggcggcgcgcctgccgctggtgggtacgtgatcgacaccaccgaaaacaccttccaagcaatggtgcagacttctgcgaccttcccgatcctgctgctcctgtgggtgccgaccgatgaccgcctgttcccgatggcccgtgtactgggcgacgcggtgaatgccctgaacggccagattcagctctcccgtatcgatatctcgtccaatccctcgattgcccaagcgctgcaagtgcagggcgcgcccgcactgtttgcgttgattgccggccgtccgatgccgctgttgcagggccttccgggtgacgacgagctcaagcaacttaccgacgaggtgattccgaagatcattcaggccgccgcacagtctggtgtgaacggtaccgcgccgtactcgggtgatcctgattccgatgccgccaagagcgctggtgccaccggtgccggcgcgggtgctgagcaggtgccgccggagcatgctgaagcccatcgtttggccgaggagggcgattacgccggtgccgccgctgaatacgagcgcgtgctcgaatccgacccgtccgatgcactggccgcccgcgaacgtgcgaaggcgctgttgctggcccgctccgggtccgctgatgtacgtgacgtgcgtgccgctgccgccgcagcgccggacgatgtggaagcgcagttggctgtggctgatatcgacatgatcggtggccagattcaagacgctttcgaccgtttgctggactttttggccgccgggcacaaggccgatatcgagccggttcgcaagcgtctgctcgaatacttcgccatccccgaacccaccgacccgcgtctggcccgcgcccgccgtcgcctagccaccctcatgtactaagtggttttggctcccctctttgagaggagctgtcaggcgtagatgactgagaggagcgcgcgagcgtacttgattgcttcccctaaaccatccgattcttcccgaaatactgctggaatcttggcccctccagcgccagctcctcctcgaaatcgtccgcccacttacagaacggacggttggcgagaccatcgttattgaatcgcgcctgatcggtgatttcggtgatgcagaatttcggaatcgtcagattggtaaccggcccggatcgttcggcctcggctacgatcagcggcgcgttcggcccgccgaacacgtccacgctccagccgtcttccgcaatccacacggaataccggttcttgatgattaccgagccgccgcgcttgatgagttcggcggcgatgcgcgtgtcgatctcgcgctcgacctcgtagcgcgtgccacccacggacggacctttgacggtgacatacgcttccgagaaccggtcgcggtactcgtccagcacggccaccggatttacgtcgggcgtcatgtcgacgtgaaccttgtgcgagaccagccgcacgcgcaaggcgtaattgtcggcatgcacgtagtagctctgaataatgagggtcggggcgtcgccgtcgtcgtattccgccggcagctcgcggcagaagaagcggcgttcgtattcgaagtcatctgtaggttccgacataaccccattgtagggccgatgatggcgattttctcgttattttggcgacgtatgtgcctcatgcagcgtgatgtggtgtacagtaaagaagttgctcgggtttgtagctcagtggatagagcgtctgtctccggaacagaaggtcgtgggttcgatccccatcaagcccaccagcatggctttcggctagccgtcggaagccttttgcatattcggcgcgtgatattaagcgcgtgcaaagctggtgctggtgcaaagctggtgctggtgctggtgtcggggtcggtgatgccggctcgcttgggtcgtggaaaaaccgcccggtttggcgagaacggtagtcgaatcgtctggaatcgtctggaatagcaaggaatagtctgttgatggccgtatgccgggcatcatgcgcgctaaacgcgacttcgctcagtagactgctacgtaatcggcattgccaatcgttgctgatcgtgcgattggtcgtagccggtggtgatgtgtaccggcgccggccgcagcaggtgggcgcccccaagatgagaaggagcacaatatgagcgaaaagatggaagccgtagccacttccgaggcgccggccgcgctgggcgcatacagccaggcggtgaaggccaatggcttcgtgttcgtatccggccagctgggcattgatccggccaccggcgaactggcgggcgagaccgctggagagcaggctgcacaggcgctgaagaatattaagcacattctcgacactgccggtaccggcattgagcatgtgtgccgtgccaccatctacctgaagaacgtcgaggacttcaaggaagtggacgcacgttacgccgaggcgttcatcggctccgtcaagcccgcccgcgtggcctttggcaacaacatgattcccaagggcgcgctcgtggagatcgacgccatcgcggtggagtgattcgaacgtttccccggcggcccgtctgcgcgcatggtgtgtgcagacgggccgccgcgtattgtgcgacgcattccggggaatgtcgcgctaggcggggtgtgaggggtggttccgcggcacattcccgggaatgttgcgctggaatcgttgggcggtggtccgtgccacaatagagaccatggcatccaaaggaaaaccgtcgccgcgttcggccgtaagcccgctgagtgatgagcaggtcaagcgtctggccgcccgccacacgcttgtggactcgacacagtattacccgaccggccctcgcacgcccaatcagccggaaatcgacgcccagaatcccaaggccaccaaacgactgctgggaggggtgtccattgtgttccgcgccagctgcaagaccaaggcctggggtctggaacaggtgccggaaaccggaccgttcatcaccgccgccagtcatatcaccatgtttgatgtgttcgtgccgatgatgagcctgttccacatgggccgccgcccccgttacatggccaaggccgagatggcgaagtggccattgatcggcaagtggttccggttggtcggcatgcagccggtgcagcgtcattcgggcaaggccaagcagatcgaagagacctcgattgatattctgacgtccggccgcccgctgacggtctggccggaaggcaccgtgacccgcgacccgaaaaagtgggtgatgagcattaaggagggcgtgggatacatcgcccttgaatcctcgcgcagactggggcatcaggtgccgctgtacccggcggtgacgtggggtgccgcctccatcaaccactggtggccatggccgcgcaaaaacgtggtgatgtgctatgaccatgcgctcgattactccgatctgcttgccgacatggactcatggggtgaagagccgcctgccgaggccgtgaacgagctgatgtggcgcgtgctcaaacgcatgaacacagtactggaggaaattcgtggcgagcagttccccgctgaaggctactgggactaccgcagcatgagtcgtaagccttggccggaagccggcggcccgttcccggctgagaagtagccgcaccggttcccgtacggggagcctaggcgagtagcatggcacaagattgtgccgatgaagttgcgcgacaagcgaaggtaggaatctgatatgggtaaaaatataacggttctcggtgcaggagcatggggtaccgctttcggccaagtgctggcggacgccggcaacacggtgaccatgtgggccaaggagcagcggattgtcgaggacattcgcgatcgccaccacaacgccgtgcgcctgccgtccgtcgaaaagttgccggacaacatgaccgccaccggggatcgcgccgaagccgtcaagaacgcggacatcgtggttgtggccatcgccgcgcagttcgcgcgagtggcactcgtcgaattcaagggactgattcccgatcacgccatcgtcgtcagcctgatgaagggcatcgagcgtggcaccaacaagcgtatggacgaagtcgtccgcgaatcccttgacctgccggccgaccggttcgccgccatttccggaccgaacctgtccaaggaaatcgccgatcgtcatcctgccgccaccgtggtggcttgtacgaacctcgataatgccacgaaggtggccgaggcatgtaccacctcctatttcaagccgttcgtgaccaccgacgtcatcggcctggaaatgtgcggcagcctgaagaacgtgaccgcgctggccgtgggcatggcccgtggtgccggctacggtgagaacaccgcagccatgatcgaaactcgtggactggccgaactgaccgcgctgggcgcagccgctggcgccgatcccaagaccttcttcggcttggccggtgtgggtgatctcatcgccacctgtggctctccgctgtctcgtaactatacgttcggcgcgaatctcggcaagggattgacggtcgaggaagccaccaaggtcagcaacggtgtggccgaaggcgtgcccaccacggatgcggtggtggctcttggcgagcagcttgatgtgccgaccccattggcgtatcagatgagccgcgtgctgaacgaaggcatttcctgctcggagatgcttgccggactgttcgggcacgaggttaccggcgaataacgagagaagcgacgtatacgtggcgtatacgttgtacgtgcaaagtcgtgtggcgtatacgtcgttgacgtgcgcgagtagactggtgtgcgtctcttgtgcgcggcggtccgagcgcggttcggtccggttggcggtgcaaagcataggcttgaaaacggttgtagtttcaataaaaggatggttatggccaagaagcgtgttgtggtgctctatggtgggcgtgcagacgagcattcgatttcctgcatctccactgccggtgtgctgggggccatggacactgaacggttcgagccgattccggtcggcatcaccaaggacggcaagtggatcatcaacggcgaagatcctcgtggctggaatctggatggcggcgagctgccgaccgtaaagatcaccccggaatcgcgcccggtgatgcttgacccctctcgcggccaggacggtttcttcatcggcgagacccgccacatcaattccgccgattccggcttcgtcagcatgtccgacccggaaatgcaccatgcgctgacctcccttggccatgtggacgcggtactgccggtgctgcacggcccctatggcgaggacggcacggttcaaggcctgctggaaatgatgggtgtgccgtacgtggggtgtggagtgtttgcttccgccgcctgcatggataagcattacaccaaggtggtgctgggtgccgccggcattcccaccgcgcccggtgtgacggtcgatgcgcgcaacttcaccgccgccgatgtgcttgccaagatcgaggacgccggtcttacctatccgctgttcatcaagccttcgcgcgcaggctccagcttcggtgtgaccaaggtcgagaaagccgatgaccgcgagacccagcaggatcgtctggccgccgccatcgccaccgccggcgagcacgattggaaggtgctcgttgagcaggggattgatggccgtgaaatcgaatgtgccgtgctgtgtccgaaggccggtgacgagcctgaagccagctggcccggcgaaatcgtgctcgatcatcagaacgacgaccagttctacgatttcgactccaagtacatggatgcctccgccagccacgtggaagtgccggccaatctgccggtcagcgtgcttgaggacgtgcgtgacgtggcccgtcgcgcgttcaaggccgtggatggtgccggcttgagccgtgtggacaccttcgtgacgcctgatggcacggtgatggtcaacgaaatcaacaccatgcccggcttcacgccgatttctatgtatcccaaggcttgggatgccaccggagtgagctacaccgaactcatcacgcgattgattgagggcgtgctgaggtaagtgtggtgcggaatcggccgcaggccggttccgctattgacacattgcccatacctgtcagtaattcatgtcaagttttcctaagttcaacaggcgtacggcaaatggcggacgcaattcacttgcacgccagtgtcaggacagattaggcgcatagtttcttttctggattcacgggccgcgcgaatgccgcgcataccaagcccgactccccagactgtcgtctggatgatgttgagaaaaggaacagtatgaacaacctgcgtaagatcgcggccggctcccttgccgccgtactcgcgttctcgatggccgcctgcggctcgagcaacgcctcctccgatggcaccggcaaggccgtcaccgtgaacgagaagtccaccaaggccacctccctcgccgatttcggcaccatggaggaccttgagaaggctgccaaggaagaaggcgcgctgaacgtcatcgccttgccgcatgattggtccaactatggcgaggtcatcgagggcttcaagaagaagtacccggagatcaagatcaccgagctgaacccgaacgcctcctccaaggaggagatcgacgccgccaagaccaacaagggtaccgacgccgcccccgatgtcttcgacgtcggccaggccatcgccgccacctccaccgactatttcgccccgtacaaggtgcaggcctggaacaagatccctgatgctgccaagaacgtcgacggcgcctactacgccgactacaccggtatcatgtccgtgggctggaacgccgacaagtacggcgatgtcgcctccctgaacgacctgctcgatccgaagttcgccggcaccgtgtccctgaacggcaagcctaccgaggccggcgcggccttcaacggctatctgatggtcaaccagctcgccggcggcgacatcaacaacctgcagcccggtctcgacttcttcaagaagctcaaggaagccggcaacctgaacaccatcgatgtgaccaacggcaccatcgactccggccagaccggcgtggtcttcgactggacctacaaccaggcctcctacaagaaggaactcaagtccaagggcgtgaactggaagtacaagaccttccccaaagcccaggtcgtcagctactacaaccaggccatcaacaaggacgcgccgcaccccgccgccgcacgcctgtgggaggaatacctgtacaccgccgaaacccagaacctgtggttcaagggcggcgccaacccggtgctgctcgactccatgaaggccgacggcaccgtcgaccaggccaccctgaaggacgccatcaccatcgaaggccagccggtcacctacagcaacgatgactccacccgcatcaccgagtggcttcaaaacaactgggacaagacgatcggcaactgagagtccacgatgaccgccgcaatcgcacccatcgcaccgaacggacccgccgcctccaaggccgcgggtccgtccgccgcatcgacccccgcttcgtccgcactggcgaagcaccgtcaggagcttggcacgctcgccaccacgctcccgttcttcgcctacaccgcctgcttcctgctggcacccaccgtgatcgtgatcatcggcgcgttccaggatcgcagcggcggtttcacgcttgcgaacttccacaagatgttcgaagccaacaccatcgccgcgttcggcacgtcaatcctggtgtccgtggcctcatccctgatcggtgccgtggtgggcgcgctcgcctcctacgcgctggtgatcggcgccaagccgaacggaccgctgcgccgtatggtcgccgccatctcatcggtgctcgcccagttcggcggcgtgatgctcgcgttcgcgttcatcgccactcttggcatcaacggcatcggcaccatgctcatcaaaaccctgactggctataccgtgaacccgaattggctcagctccctgccggggctggtgaccgtctactgctacttccagattccgctgatgatcatcatcttcctgcctgcggtcgattccattcgtccacagtggcgcgaagcctgcgagtcgctcggcggcaacaccgtccaatactggacgcgcgtggcctgcccgatcctcgcaccccgcttcatctcggcgttcctgctgttgttcgcctccgcgttctccgcatacgcgaccgccgcagccctgttctcgcagcgctcgattctggtgccgttgatgatccaaggtgccatgcgcaatgagatggaccccaaccagcagggcttcgcgcaggtgctggcattcgcaatgatcatcgtcgtggccatcgtcatgctgctgagccacgccgtggaaaagagggccggacgttggcaatgaccgaaacttccacaaccaagccgccgcagctgcgtgccgcccgcgtgcgcaaacagagcatcatcaaattcgtgatcctgttcgtcaccctggcgttcctgttcgtgccgctgctggccatgttcatcttcaccctgcgtcacccgttgtccggtcgctggtcggccgcgccgtggacggcgattttcaccggcaacggcgaatcgttgggcgccgatctgagcgtgctatggcagggcgtcggcatctcgctgtcgttgagcgccgtcaccgtcgtgatcatgctcatcctgctggtgcccaccatggtcatcgtgcatattcgctccaaagccttggagcgtgcaatcgaatgggtggccacgctgccgctgaccattccggccatcgtgctggtggtgggtcttgggccgatctaccgttggctttccgccgacgtgttgagcaccaacccgatctggctgtgcttcgcctatgtgattctcgtgatgccgttcgccttccgcgcgatcgccgtgggcctcaactccatcgacgtcaagacgttggtcgaagcctcccgatcgctcggcgcctcctggcccaaagtgttcttcaaggtgatcatcccgaacctgtggcagtcgatcctctcggcatccttcatctccatcgccgtggtactcggtgaatacaccgtcgcctcgctgctcggccgtatgaacctgcaggtcgcgctctaccagctcggccaatccaatgcccaaatttccaccgccatgtcgctgctggctctgctcttcggcgtggtgctcctcgttgcgctcgacctgatctccgacgcaatgcgtaagtcaagggaaggtaagtgacccgatgaacaacgattcaactcccacccgtcaggaaaccggtaccgcagtggacgccgccccggcgtccccggccatcccggcagccgtgtcctccactgccgaggacgccttcaagaacgatcccaccgctaccctcgagggcgtgcgcggcaaggacgtgaccaaggccgccaaggccctgctcaaagacaccgccaagcgcggcggtggttccattcagatgcagaacgtcgtcaagatctatcccggctccaccgttcacgcgctcgacgacttcaacctggacatcaagcccggcgaaatggtcgtgctgctcggtggatccggttgcggcaagtccaccgcgctgcgatcgcttgccggtctcgaagacatccaaggcggacgcatcatggtcggcggacaggacgtcaccggtgtgccggtgaacaagcgcgagatggccatggtgttccaggcgtactcgctgttcccgcacatgaccgccctggagaacgtggaattcggcctcgaagtgcgcggcatgggcaaggccgaacgccgcaagatcgccatggaacagctggagctcgtggggcttgccgatcaggccaagaagtacacgcagcagatgtccggcggccagcagcagcgcgtggccctggcccgggcgctggccatcaagccgcgcgtgctgctgctcgacgagccgttgtccgcgctcgacgccaaagtgcgcgtccagctgcgtgaccagattcgccgcatccaactcaccaccggcaccacaaccgtcttcgtgacccacgatcaggaagaggcgctggccgtggccgaccgcatcggcgtgatgaacaagggcaagatcgagcagatcgccgccccgcaggacctgtaccagcgccctgccaccgagtacgtggccacgttcattggactcaccaaccgcctgctcggcgcatccaatggcgacgaggccgtggtcttcggccagcgcgtgccgctgctcgccggctccgccaagggcgattccgtggccgtgctcgtgcgcccggagaacctgatgctggccttggctggcagcagcgattcgcacgtcggcgaacgcgcccgcgtggaggtcattcacttccttggctctttggttcgtgtggacacggtcatcacctccggcgaataccagcgctggaacaaaggtgaacagctcaaggccaccgtgcagctgcccgccagcgagctgccggccggtctggcggtgggcgatgacgtgattgtcgccccgcgtccggtcgccgcgctcgcctgctgaatggcgttgcgatgatcgtgcggttctgttctgttttgtgactgtacgatcgtcgaatggcttatcggcaatgatatgtgtgggacggcggcgatttttgggcgattatcgcgtgccgtcccacgccggtgtgggatggcatgaacgtcaaacgatgtacattcgtgccgtcccacagattgtattgaggaatcgttgcaatgacgccatttcttcgtgcggcgtcatcagtcatatgtggagtggtgtgggccgccgcgaaaaaatcgggtaaaatcgcgtgccgtcccacagtaatcttgcagagtaggggactttctcgtcattgggaatgattgacgttgatcattccttgcccattgatgatttcctcccccattcccaatgcaatcgaaacgccgtgccgtattcttgaagagtattgcacgtgtgatcggtccgtttgcggccagtgactatgggggataagtatgagcgaaccaatgccgtcggcgcagcagccgcaacaaaccccacgcgattggtggttcacggcccatcgccggttttcgacaatcggctcggcgctcgccattatgatggtgttctggatcgggctgaatattctggccactgaagcactacgaacgctgcttggcgccgatgtgcccgcttgggctgtgttgctcgcctcctccgggccgctgtatgtggtggccatgccgctgagtatgttggctttcactcgcgtaccggttattcgcacccggcagtaccccatgaaggcgggggagttcattcggattttcgtcatgtgcattccggtaatgctcttgggcaatatgattggcaatatattgtctgccggagccactgatggtcaggccaccaatcgcatcaacgacgtgattcttggcagcgactggcgggtgaacgcattgttcataggcctgttggcaccggtttgcgaagaatggatttttcgcaaggagattatctcccgcctgcgccggtacggagaaaagaccgcaatcatgttctccgcattggcgttcgcgctattccatatgaacgtgttccagttcttctacgcctttggcctaggactgatgttcggatatgtatacacacgcacttcccgactgcggtattcagtggctatgcacatgctgatcaacctgaacgggtcagtactcgccccattggtgatacaacagatcgatccccgcatcctcgacggcacaatcagcgaggccgaaatcatgcgtatggctgaaaccggcaacatgggcggcatgggcatcatgatgttgtacggcacagtgatgttgggcctctgcattgccggtatcgtgctgcttatcaccaagcgtaagagctgggagttctatcttgcgccagaggagttgcctgcggggcttaaaatacgcaccgcctatgccaatcccggcgttatctcgtacctactgttgactgtgattcttaccggttggatgctgttcgcatgactgtcatagccggacccagagaggcgagtcgggagatatcatagattgtctgacgagccgccatcttcgacaaggtattcggtgcccgaaccggcgatggctcgcgccgccatatctttgatggtggaaggtagcacaccctcgcgcgcgaacaccagcacttggccggtcatgccgtaaggagaaaaaccggtgaacttgaccagcggtggctggccctccagtgccacgtcggcggtggctttggttacgcggtcgagaatatccctgctgatcgcggacggatcgccggaggccttggccgtgaattcgagcgtggccatgccttcgctggccggcgtgagcttggtcaaggcggccgtattgagcaccgaattgggaatgaccatcatgtccccggagcgggtgcgcaccacggtctgtcgccaggtgatgtcatgcacggtacctgtgacgccttgaatggtcaccagatcgccgggttggattacgcggcccagcatcaggccgaagccgccgatgatgttggcgatcgtatccttcagacccagcgagatcgccacgcctccgacgccgagggcggtgaccagggtggtcggattgatgccgaacaccggctgcagtaccatcgccgtaccggtgacccagatggtcacgcgcgtgaggttcacgaaaatcgaggcgctgggaatctgcgaactatccagaaccctgcgcagcacgcggctgatgacgcggtcggccgcgaacacgacggccagcacgacggccagccagatgagcttgcccgcattgacttggaaccagtgtgcgatgtcttgtgcatattcggtcatatgccctactgtatcgaccatttctggtgaagtcgtaaacatacgggcccacgtcgggttttggccgttgcggtggtgcctagttccgatgctcgcggcaggtttggccgaggccacgggcca

SEQ ID NO: 3185 - DNA, 4860 bp, Unknown
  R53_2m  MAG No. k141_2722
gatgatgaataggaaaggcacaaccatgaaaaccatgaagttcgcggccgcgggccttgccgcagccatgctgctgccacttggcgcatgtggttccgcttcggacgccaacacgctcaccatctgggtggagaaagtgttcagcgagaagtcgaacgaggagatgaagcagcgtatcgaaatcttctccaaggaaaccggcataaaagtcaattacgagttcatttccgccacggactatatgaccaagctcaacgccaccatcgaggcggggcgcggcattccggacatcaccacgtccgccgtgtccaaggtagtgaactattaccctggcaacccatacatggatatgaccgacatcgtggagcgcatcaataaggaccggccgtatctgaagtccgtgtacgagggcagcaagattgacggcaagctgtatttcgcgccattccgcagctcgtcgacgatgatgttcatccgcatggacaagctgtacgaggctgggatctacgaggtgcccactacctgggatgagctgttcgaagtagccgagaagatcagcgatccggcacagggcttctatggcctgggctggggctgcggttccacggatgaggacggcgacaacatcttccgcaacatcatgtggaaccaaggtggctacatgttcgataaggacggcaacgtcaccatcgacaacaaggtgagccgcaagctgatgcagcagtacaagacgatgtaccagaacaaggtgataccgccatcagccagcacttgggattccggcggcaacaacacctcgtacctcatgggcgaatccggcatcatcttcaacgcgccgaccctgtactactccatggcctcggacccatcatatgagacgctgctcggcaataccgccgtagtgaacctgcccaagggcgaggacaacgatgtgaagatgtcgttcgtcaccggactgtcgattatgaaggccagcaagaacgtcgacgcggccaccaagctcgtcgaatacctgctggacaaggactggtatgacggcttcctggaggagacggcccccgtgttcgcccccgtattccaggattccgagcaggtggacgtgtggcagaaggacgtcaacgccgaagtgctcaactacgtcaagacgtcggagggctactacggataccccgcacggtctaccgccgatcgcgccgtggcagccaagaacatgttcacctacccagaagcgaagatgctcaaccagatcgtcacggtgaataccagcatcgatgacgcgctgaaagacaacattcgcaagattgacgagcttaagtcgctgtttaccgagcagtgacgacagacgggcggcatcaatagtgccgccaccttgctcgcaccatcattcccatatcaatcatcacaagattcacaatataaaggagcaatcatgtcgaacatcaccatctggctggatctggaccccgacaaggtggacgtcagctacctgcagaacaagttcaaggaagacggctacaacctcatcgccgagcagatcgatttcgccgatgaagacaagaccatcgagatgggtatgaaggccgacgcagtgatcagctcgtccgaaccatggaacgagcgcacactgagcgccgtcaagggacaggtgaagtacatcgtgcgttacggcgccggattggataacatcgatctgccgttcgcggcctccgtgggtatccccgtgggcaatgtgccgggcgccaacgccgcggccgtggccgaaaccgcgctgctgcacatcctcaacctcgggcgtcgtttcaccacatgtgttgacggcgtcagcaacggcgtatggccgtcgaccgtgaccggcaacgagctggacggcaagaccgtgggcctgctgggctatggcaatattggccggcagctggtgcgcatgatgcagggatttgatgtgaacgtgttggtctacgatccttacctacgcgaccgctccgacgcgaacgaccgcctgcatttcgtgggcagcgccgaagaggtctttcgcgccagtgacatcatcagcctgcatatcccgctgaccgacgagacgcacggttccatcaacaaggagaagttcgcgctgatgaagccgactgcttatctggtcaacacatgccgtggtggcgtgattgatgaagctgatctgattgaggcggtcaccagcggcgagattgccggtgctgggcttgacgtgcttgtgcatgagccgcctgagaaggatgatccgctactacacctgccgaacgtgttcgtcacctcgcatatgggcgcggcctcgatggaatcggaatacaggtcccaagtcatcatcgccaagtgcattgaggaatactttgccggcaagatgccgtacaacgtgaaaaacatgtgagttgcgcctgcaccaccggtggtcaggttggcgggaggcctgccgttttgaggggcatcccattgtctgtgccactggtggtggcaggtctggtcggccttttgaggcgggccgtgacggtggatgacagacgactggtgaagatgagatgggtctgattgtggcgggtcgttgctgaagggctcgccacggaagaaaggatatgagcgtgtcggagatcattattgttagggatgaggctgaggccggtgagatctatggccgttgtgtggctgacctgatcaaagcaaagccgaatgcggtgctgggacttgcgacgggttcgagcccgctggccgcctatcaggcgctcgccaagatcgtgcatgacgagtcaatcgacgtctcccaagtgagtggctatgcgcttgacgaatacattggactgccgctgacccatcccgagtcctatcatgcgaccatccatcgcactgtggtcgaaccgcttggcctggacccggccaaggtccatgtgcccggcgacgtactcaacggcactccgctcgaagacggcgacaaagtcgcgctggccggcccggcctatgatcgtgccatcgaagccgctggcggcatcgacgtgcagatcctcggcatcggcaccgacggccacgtcggcttcaacgagcccggttcctcgttggcctccggcactcgcgtcaagaccttggccgaacagacccgcatcgacaacgcgcgcttcttcgacaacgacatcaaccaggtgcccacccactgcatcacgcagggtattggcacgatcatgaaggcccgtcacctcgtgctgctggcgttcggcgccggcaaggccgaagccatcgaggagacggtggaaggcggcttgtccgcgttctgcccggcttccgcgctgcagatgcacccgcacgccacgattatcgtggatgaggaggccgcctctcgtctgcgccacaaggactactatcgctacgcctacacccacaagccggcctggcagggcatctgagttatcgtgtgctggcttccctctttgtgtgaggggagctgtcgaatgtaatgagactgagggtggttatcggcggcggcatatgtgtattgcttcccgattggaccaccctcagtctcgtttcgcgagccagctcccgttggcgggagcgcatgagcggtaaggagaacaacatgtctgataggaacgagatagtctcgcgcgtgaccgcggcactggagggcaagccggctccggtggcgattcgcaacgcgcgcaaggtggatgcgtgcggcgaacggcgcggatattgggtcgtctccgatgccgccggcgtcatcgtggcggccggcacgggggaggaggccttcgagcactactgccgcacggtggggctcgacccggccgatcgcaacgcggtcatcgacgccgaaggccgtattctgacccccggctacgtggacatccacgcgcacggcgcatgggagaagagcttcgacgacgggtcggatggcatcgatgtggcgcgggccggccacgccgtgcacggcaccacgcgccaggtgctctcgctgatcaccaatcccgtggacgtgatctgccggaacatccgcaccgtccgcgccaagatggagtccggccgccccgacatcctaggctgtcatctggaaggtccgttcctggctctggcccgcaagggcgcacatgacccggaatgtctcaaggatccggtacccgacatcgtcgacgacatgcttgaggcttcaggcgcggcgaacggcaagattggctgcatccgccagatcaccatcgcccccgaactaccccacggcatctccgccatccgccagttcgccgctgccggcgtggtgccggccgtgggccactgcgacgccgactacgagaccgccaaagccggcttcgacgcgggcgcgggcatcatgacccacatgttcaacgcgatgaacggcctgcaccaccgcgaacccggtccgattccggccgctgtggaggatccgcgcgtcaccatcgagctcatcaacgacggcttccacgtgcagaacccgatggtcaggctctccttccatttcgcgcctcatcgtacggcctttgtgaccgatgcgatggccgcaaccgactgcccggacggcgcctacaagttgggcgcgctggatgtgaacgtggtcgacgggcatgcgcgcctggtctccaacggcgccatcgccggctccaccctgctactggaagtcgccgtgcgtcgcgcggtgtgcgaactgggcctgagcccggtggacgcggtcgaggccgccacattgacgccggccaaggcgttcggcttcgaccggccgaacccggtcaccggggtgcctatcggcctcatcgcccccggcttcgccgccgatttcaaccttgccgatccgaccgattggacggtcgaacaggtgtggtgcgcgggccgcaa

SEQ ID NO: 3186 - DNA, 10693 bp, Unknown
  R53_2m  MAG No. k141_2786
gctcagcctttctttttcttggagagcaggtcgtaggcgacggcggcgatgacgacgaggcccttgatggtcttgacccaggcggcgtccacgcccatgatggacaggccctggttgagcacgcccatgatcagggcgccgaccatggcgccggggatggtgccgatgccgccggtgacggccgtgccgccgatgaagcaggccgcgatggcgtccatctcgaactccatgccggtctgcgcggaggcggaggccaggcgggacagggtgatgatcgaggcgatggagaccaggaagcccatgttcaggaagatctcgaagtcgaccttcctggtgtcgatgcccgagaggatggcggccttgcggttgccgcccacggcgtacacgttgcggccgaagaccatgcggttgaggacgaagtagtagacgcacacgagcacgccgatgatgacgagcacgatcgggatgccgccctgggtggcgttgccggacatggccagcaggtaggtcacgtagccgatggccagcgcggcgaccacgcacttgaggacgacgaagctcatgggctgggcgggcaggccgttcctgacggccctggcgcgcttggacaattggctccagaccacgagcacgatggcggccagaccgacgatcagggcggtcagggcgaacggcccgacgaagatggtggggatgtagtccttggagatggcgcggaacgaggcgttggccaccgggatggactcgccggcgaccacggtcgccaggcctcggaagatgagcatgccgcccagggtggtcacgaagccgggcacgccgacgtaggcgacccagaagccgtgccacgcgccgatggccaggccgatcgcgatcatgagcaggatcgcggcccaccacgggaccccgtgcttcatggccagggcgcccacgccgccgatgaaggcgaccacggagcccacggacaggtcgatgtgggtggcgatgatgaccatcagcatgccgatggcggccacgagcacgtacgcgttctgctggaacagggcgaccacgttgttcggattcagcaggcgcccgcccgtcaggatctggaagacgacgatcaccagcacgagggccaggtagatgccgtaggaacgcatgttgcccaacagcagggccttcaggctctgttcgtccccgcccttcttggctgcgggggttacggttgcggtagacatttcggagggtatcctttcaaactttcaaacaaagcacgtgggaacgattcgcgcggaggtcaggcgaaggcccgctccttgggcagcgggacggcggaggtcatgcagcgcatgagctcctcctggctggtcttcctggcgtcgaagttgccggtgatcacgccgttgctcatcgtgtagatgcggtcgcagatgcccagcagctcgggcagttcggagctgatcacgaccaccgcggaacccgagtcggccagctggtcgatgatctcgtagatgtcgtacttcgcgcccacgtcgatgcctcgggtcggctcgtccaggatcaggaccttcgggtcggtggccatccacttggccagcacgaccttctgctggttgccgcccgacaggttgccggcaggcatctcgatggtcggcgccttggtgcggaactccttgcggtacttctcggccgtccgcttctcacgggtctcgtccaccacgcccagcctgttcgacagttccttcagactggccagggacgtgttctcgcgaatcgtcttcatgaggttcaggccgtacaccttgcggtcctcggtcgcgtaggccacgccgtggtcgatggcggaacgcacggtcgggaacttgacttccttgccttccacgaagatcctgccggacgcgttggtgccgtactggcggccgaacacgctcatcgcggtctcggtgcggcccgcgccgataaggccggccagaccgacgatctcgccggcacgcacgttgatgctcacgtccttggagaccagacgcgcctcgtcgagcgggtggcgcatcttccaatcctcgatgcggaacatctccttgccgatcctggaggtgtgcaccgggtagcggttggtcaacggacggcccaccatgtcgcgaatcagcacatcctggtccagcgggtgggccgcgtcgatgtcgatgtggctgatggtatgaccatcgcggatgacctgcaccgcgtccgcggaataggcgatctcgttgagcttgtgcgaaatgatgatcgcggtgatgccctgctcgcggcgaagcccgtcgatcaggtcgagcaggttcctcgaatcctcgtcgttcaacgcggcggtcggctcgtccaggatcagcagcttcacgttcttggtcaaagccttcgcgatctcgaccagctgctgcttgccgacaccgatgttcgagatcagggtgtccgggttctcgtccagaccgaccttcctcatcacgtcgtacgcgacgcggcgctgctcgtcggcatcgatcgcgatgcccttcctcttctgattgcccaggaagatgttctcctggatcgacatgtacggcaccagcgcaagctcctggtggatgatcacgatgcccttctcctcggaatcgcgaatcgtcctgaacttgcaggtctcgccgttgtacacgatgtcgccctcgtacgtgccgtacgggtacacacccgacaacacgttcatcaaagtcgacttgcccgcaccgttctcaccgcagatcgagaacatctggcccctcttgaccatgatattcacatcgttcaacgcggtgaccgggccgaaacgcttcacgatatgacgcatctccaaaatcacgtcaccgttcatagccacagctacctcctccgatagtaatgcccctgtgcatgatgaaggcaccgtaccgcaaccacgcagcgcggcgccccccttatctgttagccgttaggccgttggatgaatcgaatcagcgatcctgcggatcacaggccagcatccttggcggagatgtagccgccgtcgacgaggatttccttgaggttgtccttgtccacggtgaccggggtcagcagctgggacggaacatccttagtgccgttgttgaaggtgtcaggagccttcggatccttgccatcgaccatgtccttgatcatttcggcggtggccttggccagctcgcgggtgtccttgtagacggtcatggactgcttgccctgcacgatggcctgcacgttggccttctcggcgtcctgaccggtgatgatcgggtagtagtcccagccagcggcctctacggtgttgtaggtaccggttgcctcggcgtcgttctgggcgagcacggcgtcaagcttggtgccatcgttgtagaaggagttgatgcggttctccatctcgttctgggccttctgacgatcccagttatcgataccgatggactgccaatcatcagcagaggaaggaaccttgccggacttggactgcagcacgccggacttgaagtacggtccgagcacgtcccaagcgcccttgaagtagtagcctgcattgttatcggtcggggaaccggccatgagttcgacgttgaacgggcccttcttgccatccttcagaccgagcttctgctcgatgtactcgccctgcatcttgccgacatcctccaaggagaaggtggcgtagtagtcaacggcgtcggtgttcatgatcagacggtcgtaggcaatgaccttgccgccgttggaggcgacctgctcggcagcagctccggtcgcagtgccgtcgatggaggcgatgactacgtagttcatgccgttgttggccatgttctgaatctgggaggtctgcagatcggtcttgccatctgcatactgcagggtgacgtcgtagccgtagccttcaagctgcttcttcaggttctcgccatcgatcttccaacgctcgagcatctgctcaggcatcgaaataccgaccttgacggtgtcggagctaccgccgttgccaccggcagtggtcgtgccacggctaccgccacaggcggccagcgggatgagcatggcggttgcagcaaccacaccgagcaccttggtccacttattcatgggaattcctttcgacattgataggaacttgtttcctcttccttttggtcaggcaacccttgccgaacctgcataaaaatataccattagttttttgatttaacaatttgatatcgcctattttccccacaactgagcggattatggcgtacttgattcattcgattaactaaatgtgagcggtaacaacgctgattttccggcatttttatagaccatacgaaacatgaattttatcgatacgattcgtcggaaataacgacacgccgaaactgaagccatgagatcggtcacaaaaataccagtcactgccccgacatgccgaccaaagaaaaagcccagcggcgggccgggcttcaaaggagaagagaggatgaagattcaattgtcaggccttgcggccatgactccatataaccgcacgatacataatgcgacaggcgaattggccgggaattgcatgggagtcctaggacgaaccgaaccagtcaatcaccgtgatgcatcaatcacgcttcgttgaataacgcgaggaacttggcacgccacgcatagcgtgtcgaaaccagcaccagaccggcggcggtcagtgcgatgccgattggcgcggcggccggcgcaacaaacagcaggacggcataggccacggccaacaggcagagcgagagcagcaaaatacgatgtgcgcgcatagcagtatctccattgacgttgcgtaggtacgcatggacttacaatatttagttcgttgatttaaccatatatcgaatttgttaccaatgcaaaccgaaaagggctgatttgccaaacattggcggcccggctccaacagcacctctcagcggggccgacctgccaaacactggcaaaacgaccccacacaacacccctcagcgaagccaacctgccaaacactggcagattgaccccgccaaggccattcaacaggccagcaaccagatcatgatgtcgcgctgcaaaccgtaaaccgcagattccgtcatttcgaccagataagtacttccctatcgtcatattccgccaacgggcctcgggccgaacgctcgccgcgcacggcaccggtgacatcccggtccacgataatcggcgaaccatcaggattttcgaaatactcctcaacgatgcgcggctggccaagatcagcagtggagatcaccggtccagtcgccgaccgaatcgattcgggcaacgagatggtcatccatagctcatcatcggtttcgcgcaatgccaacgaagagccgtcatcactcaccacagcctcggcttcgctggaagcggccttcgcgcccgaaacataggcgttcgaagccagcaataccggctgcttcacgctgcgatacaactcctcatcgccaaggccggcctcttcaatcagctgttcatactccgcaagcgagcacggatagccgtcaaagaacgcggttccggcttccgccataccggccgcaccggcggcatccgcggtacgcaacggtttggcggaatcgcccacagccaagaacaggttgttgatgtaccgatcatcgccaccgtagacgaatgcctcgccggccacatcggtgacgtgcgggaaatggtatggcgtggatcggtccaagacggcggtgtgacgaatgcgaccggcgaacagattgttgacgaacgccgcgccttgcgcatagtcgtcgaaactgaactcagaggcaaacacgttgttcataaacgtaatcggcccgtgggtcacctcggtcatcacatctcgcgtgttgcggtagaacacgttcgaatccaccacggtgccctgcgcctgccaatcaagccacatgcccagcaccgaatcatgcacccggttgccgcgcaccaccgcgtcgacggctgcgtgcattttaatggcggccacttcccagccgaagaactcgcgtttggtgccgatgtggtatatgtggttgccttcaatcagagagaaggcgcagcccatatgaccaaccacaccattctggccgcagtcgtagattacgttgccgcgcaccacgtgcccgccgactacgcctttctcccaaccggcatgcagcgccttgtagacggcctctttttggtattggtacccggacttgcgatgagtgcgcgtcgattcgttgtcgccggtggagatctccttgcccagcgagatcgccgaacattttgcgtcatgaatgcgattgttctcgataatccacccgcaggaccaatgcgggcccaccagcccgacctgatcggcagtcggcggcgtgtaggggcaggccgcctgcgccatttcaaagccggagaccgtaatgtaattgacgaacgggcggctcgggtagaaacaggtctcgcgcacgttgatttcggtaagttccgcattcgggtcggcttcatggaaattggcccaaatggttgtggcctcatcatcgaccgcacagcaccacacgttcacggtggtatccggatcaatcagcggcacgatggaatcggtggcggcgtcacggccggtatcccaacgctgtgggttgcgcaccttgtccagcgaggcgacttcgtagaaggatttgccattcagatacacatcgcccaggtggcgtacctcgacctttgggtccgggtatacggtccaatcgccgaatacggtttccacgtacgggttgtatccgttgaagaatgcgttcaggattacggctttccacacgccatcgccttcgggctgccatgtgtcgatacgttcggagccggtgattaccgggcgcggttcgcccgcggccgcacgatagacgatgcggttcgtggcgctctcgccgccgaatcgggggtcgacggattcccgataggtgccggcatgcacaaccacctcatcgccggctcgggcgatggccgccgcttggccgatggtcagaaacgggtcggccgcgctgccggcgccgttcgtcttcgccgcctgcgcggaaacatgatattgcgtcattgcattgttcctttctctcctgtatcccggtttcgccgtaacagttggtcagagcagcaaacctaccgaccctcggcagcggcccgctcttcaggagtccagtcatccgggacttcggcaatcacatggcagggattgcccacggcgatggaatcggcgggaatatcgtgggtgacgactgcgcccgcaccgataatcgagttgtctccgatggtgacgccggggcagatcaccacattgccgcccagccacacattgttgccgatggtcacgtcggcgttgtgctgccagccttccagtcgaggcttgcgggcgatggcgtggtttggcgtatagatgctcacgcgcgggccgatcaggcaatcggagccgatggagatcgggccgccgcccacaatcagcaggtccatgttgatgaacgtacggtctccgattttcaggcccagcccgtaatcaagccggattggcgggcggaagtccacgccctcgccggcctcgggcacgagttcgcggaacagtcgctcagcttcggcggtgtcttcaaagtagatgcgattgatgcgatcgcacgtggactgcgcctcgcgcgtaagttccggcaaaatctccgacttacggtactgcaaccagtcatcggcgaacagtttcgccacatccgggtgatcttgcttgagttgttcgagatcgtgcgccatcgattgcccccttgcatttgtttaacgattaaacaatatgattgcacaatattgtagagcgggctgagaccattaccgccgttttacgccgatcaggcaacccacgaatccgccggcccattcggtactgaggaatcgcgcatcacaatctgccatgatacgagcataagtaacgtccgtgtgcgcaattagtgcaatatcaggcattgttccctcatcaatgctgtcagatgcaggctgcccggcaaggaattccaaacgattgccatgcaagcgcaatccgaaccattcgttggctccaagcgctccaagcgcaatgcaccgcttatctcccctatcggtgatttcggccgtcaattggccggattccgcttccgccatgaccatgacagcatgggtggaatcctgatgtatcatcatcgtgtattcgggccgggtgaacgcggcatattcctgcccgtcgacacgcaggaaccggtaatcgtcacggcctcgaacgccgactaggcgggtatcgtcgagctggatgagctcagcagggcatgcggcattattaccagcagcgcaatcacaccccgcagaatccacacccctcactgcacatggcaatccatcctcgtcaacgtccacgaccaacttctcgggaagccggccaagccccggagccacgaccggccaaccgggatcgtcgatatcgatacgcttattcggctccccaccgtccagcttccacgagactggattgtgctgccatacgaccggtgccacgaacgtttcccggccacagtagctgaacgtttctccgggttcctcgcccggagtctcacgtatgccaagacacgcgagcagccagccgacggtcggatgcagcagcagatcggcgtgcccaacgcattggaccggctcccccgctcccaaatgacggtgtgtgaggatcggattgcgtttgcaagcctcaaacagccggttatcgtgacccaccacgcttcgttcaccgtcacgcgccggctcaatccagatatcttgcgcggcaaggttcttctcaaaaccggcgagcgccgccgcgaatccgcgcggtgcgtgcgtgcgcattatcatctcactgtgctcgaagctggtgccgccttcggcggtcatcaggtagaggtaatcgcccacccggtacaaatgcggcccttcagcccataccgcatccatgccatagccgcgccaaatcacggttttatagtcttgcaacgtccacgtgcctggggcgatgggctgcgtccagatctcggtttgaccatcccactgcgggtgtaatgccgggcgcgtttgcgtccaccacactgtgccatcgccgtcttcaaagatgtccgggtcaatgccttcggccccggccacccagtacggaccgcgccatggtccggtcaactcatcggcctcgatgacgaaattgccttgggcggcgcgacagccatcgacatcctcctgcgagcatcctgcagcgagcgccttcacctcattcacgcgggccacggtgcatacgatcacatatcgcccgccgatacggcgaatggtcggcgcgtacaggccgccggaatcctcgacgccatcaatgagcagtcgatgagacatcgcctcatccaccgcattcgccgtgtgcgtccacgtcacaagatcacgggtcgtatgaatgggcaaccccggcaccaattcaaacgaggagttgaccagcacgatttcctcgcgcgtcgcatcccagatccaggacgggtccgggtacatgccgcgcagcaccgggttggtaatgacacacgctcttgccttgaacgttgattgatctttcctatcacacatattgattctggcctttctgtatggtcatggcgtatcgaggtttggctatgaaagctcaggcgtctcttcaggtccgaagaacttgaattcactgaaggcagcagtaccaccacgcttttcggtaggtagcaagaacaggcctattcgacatccgatgaagtaatccagcgtgtaatacaggtcataggtattccccaatcggatccagtgcggcgcggatgccgccaaatccgaatactcgaatgccaccttgtctcttttatcggtgaaatcataaatggctcgaagccttaccgtgtccccacatagattcgtccgagcaacctctatcgcggacgcatcgtagtttccatcgccccatatcgaatcgtcatcctttggcttgatacgtacgctaagtgcatatcctctttccgcgcgccgtatagcaatataccggtaataaccttggaaagccgccaatccagcgaaatctccatcctgcaattgtgaagcacctactgtgacttcagccatgcaccgcggccctaccgtgcgctgggttagtgtattctgtgcatagttcagattcgctgcaatctttccgccatgcaatgtaaatgtcccagtaggttcattgacagaccagaattgattatgaggattgtgattgaactgccagaagggcgcaagcttgtcagatttgacaatgtccgcaacgtcttcagcagacttatcactatcagttgcacaacaaaaaccatccccattcaatggcctatacggataatccgcatacgcagtcggaacgctcacctcagtcggcaccctaccatcgttgcctaatatcggaaatccgtcctccccgaatctcatgggcatgatggtaggcacacgtcccagcgccccacggtcatgcatcatgaaggcataccattggccgtccggcgtatcgaccattcctccttgtgcatcgccgagatcatggaaaccaagatcatcatcaagcacttcacgagctataaactcaccgtccaacgcatcggccatcaaacagacctcgcttttacggcagccggaacgataatgacaagtccacacgtaatagcga

SEQ ID NO: 3187 - DNA, 5753 bp, Unknown
  R53_2m  MAG No. k141_2804
caatatcgctgtcttcggcggcaagggccagatacgggcgcaattgcgcggtcgaatcacgcagccacatggccgggatatcgccggtaagcaggaatgtggtgccgtcgtcatgccgtttgaccgtggtggtcagggtgtcggcaaagcaggcattgaagttctcggcccaggcggcgtgttcggtgccgcacaggtccgtgatgtgctgcatgaaatccgagaccgacttcggtatcgcggtggtcgtcataaattcaacttctttgtttgagggatatacatatcaagggaacagcattattctaaaccgctttagttcatgacacgcgaaaggatgtgaagagcatgagtgtgagcgcaccatatgaaaaaccggtgagatttcctgttcggagaatctcaccggttgcgatcagtcgattcgtgaagtcgcacgaatggcggataaggggatgggtggattacttgccgatttcagccagatagtcgggcatctcggccgggtactgcggccaggcaccggcctgggtgcagacgtaggcggcggtgttgacggccttgcggtgggcttctgccagcgtgtcgcccagcaggatgcgggcggtgaaggtgccggagaaggagtcacccgcacccacggtgtcgttcacctcgacgtgcggagtgtccagcgtggagacctcgcccttgcgggagatgatggtggagtaggcggagccggcggtcagaatcacgtagtcaaggccgaattcctcgatgaaccagcgggaggcgtcttcgccggaggtgccgcggatgtcgaacatgtcgcgcagcagcaggagttcctcgtcgttgatcttgaagacggtggccgccttgaggagttcctcgatgaggtccttggagtagtggtcgccacgcaggttgatgtcgaagaacttcatcgcgcccggcttggtgtgcttgagcagctccgtgatggtggcgtgcgattcgggggagcgcagggccagggtgccgaagcagacggcgtcagccttggagaccacgtcgatgagctggcgggtgtacaggatgtggtcccaagccacgcccttgacgatggtgtactccgggatgccgttcttcagcgcgacctcgacggtggaggtcggccaggcgttgcgctggatgacggtgttgatgccggcctcgttggccttggcaatcagttcgtcgccgagctcatcctcgccgaccgcgctgatagcccagccttcggtgccgttcttcatcgcgtggtaggcgaagttgacgggggcgccgccggctcgcttgccgctcggcagcatatcccacagcagttcaccgaggctcagaacgatcggggtagtcatggttggtttcctttcctttgtttcttttaccgggtgtttcgtatggaacatcttgtgatgtcggcgcttggtttaggagacgtcgaagaacaccgaggggtgttcgaggaattgggtcaccgccactgctgcggcaccggagaccgccgcgtcggcggacagggtggataggctgatggaagtggaggcattgatttcggggatggcccgttcggccaccgtggcgcgcacctcatcgagcagtatcgggccggcttcggacacgatgtcgccgatgatgatgtgctcaggattgtatccattgaagatggtgacgcatccgtagccgacgtatcgggcgacttcgcggacaatggcgattgacgcttcgtcgccgtcgccggctttggcgaacagggcgcgggcggcttcggtgtgggtcatatcggccgcgccgggaaccacggtgccatcggcgatgagcatgtcgtgaatggcgggggtggagcagtagcgttcaaggcagccgacgttgccgcaatcgcaggggcggccgttgacgtcgatggagatgtgtccgatttcggtggcggcaccgaggaagccgttgatgagacgaccgttgtcgatgacgccgaggcccacgccttcgccgaccagataataggcgaggttgccgtcggcgtgcaccgacgggtcgaagagataatgtgcgagggctccggcgcgggcgtcctgttcgatgaacacaggcacgcggaaagcggtggcgaattcgtcgatgaagttgattttgcgccagccctgcatgctggacaccacggcggtgcggcctacattacgcaggtaggggccgggcaccgccatgccgatggccacaatggacgggtcgttgtcaagcagttgttcgacgcgctggtggatggtgacgatggtgtcgttgatggtgttgtcgtacaccgtgggcaggttttcaaagctcagggtgttgccacgcaggtcgaacacgccgatctgcaccagcgagcgggcgaatttgatgccgatgatgcggaaccgcgtggtgtcgagtttgagaccgatggaacggcggttcttggaaccttccaaatcgccggtctcttcaatcatgccggcctcgataaggcgtgcggtgattttggtgatggccgcgggggtgagttccagtgccttggcgatttgcgcgcgggagctgatgccgttgtgatacaggtgcttgacgatgcgggagcggttggattcggagacactggcttgggaagtggcatgggtggtgtttgttgccatcggtcttaagtcctccttgtctgcaccgctgcgagttgttccgctcgtctttgaatctgaacttgattaagatattaacgctgttaattgattgacgcaatcaatatgtcattcggtgtgtcgtgcatgtgagtgtcgtcttgggggaatttgttaagatggttgtcaatagtcggatgcacactgatatcaagcgaaacgttcgatgaagaacaggggaggactgatgtctgaaaacactatgaacaatctcaaaatcggtgttgacgtgggcggaacaaaaatcgaagctgtgctggttgacgcaatgggcacggtattgggttccgcccgtattcccgccaggcatggcaacgatgccgtgatcgaagacatcgtcgctgtagcacatcaggcagcgggtgagcgttttgacgaggtgagggccatcggtgtcggtaccccgggcacggtggattcggccagcgggcatgtgggcaatatcgtgaatctcgacgtggtctcgctggatatggggccgttggtctcgcagcgttcgggcgtgccggcccatgtggaaaacgacgtcaatgccgccgccgtcggcgcggccaccgtattgggcggtgcggacggcatggccggtaccattgcgttcctgaacttcggcaccggactggctgcgggcatcgtcgaaaacggcgtgctgatgcatggctatagcggcgcggccggcgaaatcggccatatcccagtcgaacctcatcgcctcaagtgcccttgcgggcaatacggatgcttggaaacagtctgctcgggcgcatccgtggggcgtctgtggcccaacgccgacccgccgatgcccgacctgattcgtcgcgcgaaaaagcgggaggccaaggccgtcgatgtgctggacatggtagtgcgcgccatcggcgacaccatacaaatcctggctcagtccgttgatccgcgactcatcatcttgggcggtggcatggccaaaaccggcgaaccattggtcgaggtgatcacggctgagctgcgccggcgcgaatcgcaatgccgattcctcgaaacgctggacctgccggcccggctgcgtctggcacctgtcggccaaccagtcggagccatcggtgccgccatggcggcgtagcctggcatagtgccggggcatgggagatgaggcctcagatttgtctccgaggccccatctcccgcgcagtcctatatcgctttatgtcgtgctgtgccgcgcttggtcttgcgcgtttcgttgccggggtgaccggcttttatttggccaagtgttggaagaccacggcgatggcctcgccctgtacggtgatgtcaggtccgcattcgcagcgccggattaccgtgtgtttgtggaaggacgaggatgtggcggcatccagatattgctgggccgcgccgatgaacgtcgcgttgatgatgttcggctggccatagacgcatacgtctgccatatccaaaaggcccacaggcatggccagggcttggccaagatagcggcccgcccgagcaaggataccctgatgctgctccatgtctgccgcgctgagttgcttcttcaatgcggttccggaaatcatcgtctccaagcaaccgtgcttgccgcaagggcacagcggcccgtcaagatcgatggaaatatggccgagctcgccagccgcgtgcagttcgccgattaccggcgtgtccgagagcagaatcgccgaaccgatgcctctttcgatgcgcacgaaaagcatattcggcccgccttggccaaagaaacgttcggtgagcatggctgcggtggcgtcgttgctgacgtttacttcaagtccgaaatgttcggcgattggcgtggacaggtcgagattgttccagccgcgcatcgtggaggagcggaccacgccgttgtctaccacgccgggggaggcgactccgatgccgatgacctcgccatcggacatgcccagcatcttctcaatgagctcgatgatcacatccacggaaacgaatgagccggtgttcagggtgacttcggcgtgacgcagcggctggccgagcagattggtgactgcgccgtgcagcaggtgctcctgcgtcaggtcgatgctgatgatgcgcagtcgatcgatatcgatgctcagcagtgtgcctcgtttgcctttgccgccgctgggtgcctgaccggtctcgcgcagcaatccttcctccagcatccgaccgaccacatcggaaacggccacgcggctcaatccggtgcgtcggccgagctcggcgcgcgaatactggttggtggggaacaacaacctgaagataagttggcggttcttgcggcgcacatcggcgggggaagccttggccgcatggtcgtcggtcgttgtgttgagaccgagatatgacatgtttcctcctacctgatggtgagcgagtggacggcgattgttgttccatacacagcttagacggtgaagcgcaatttcgtcgttgaaactgttatgaaacttcactaataaattccagtgtacctgtgtgaagcgtcaggaaacaccgtgagtgttcatgaggtccaaaattgttactatcattaacaaatagcgaatcaccaatcggcgctacgccgaacggtggttggaacgccgcgcgcacccggacgtgacaaggatgttgccattatccgcaagacgggcggcggtacagcgactcgcatcgggcgggccgcacggaactggaggaaaccgatgccggaaatcatcattgtcaagaacgaagccgaggccggcgagatctacggccgttgcgtggcggacctgatcaaagcaaagccggacgccgtgctgggcctggccactggctccagcccgctggccgcctatcaggcgctcgccaagatcgtcaaggacgaggccattgacgtttcgggcgtgcgtggattcgcgcttgacgaatacatcgggctgccgctgacccatcccgagtcctatcatgcgaccatccatcgcaccgtggtcgaaccgcttggcctggacccggccaaggtccatgtgcccggcgacgtactcaacggcactccgctcgaagacggcgacaaagtcgcgctggccg

SEQ ID NO: 3188 - DNA, 2529 bp, Unknown
  R53_2m  MAG No. k141_2830
acggcggttggatcaacgatccgaacggcctgtgcttctataagggccgctggcacgtgttctaccagctgcacccgtacggcacccagtggggtccgatgcactggggacacgtctcctccaccgacatgctcaactggaagcgtgagccaatcatgttcgccccgacccttgaagaggagaaggacggcgtattctccggttccgcagtaatcggcgacgatggcaagctcaagttctactacaccggccaccgttgggccaacggccacgacaacaccggcggcgactggcaagtgcagatgctcgccgagccggacaacgacgagctgaccagcgccaccaagcgcggcatgatcatcgactgcccgaccgacaaggtcgaccatcactaccgcgacccgaaggtctggaagaccggcgacacctggtacatgaccttcggtgtctcctctgcggacaagcgcggccagatgtggctgttctcctccaaggacatggtccgctgggaatacgagcgcgtgctcttccagcacccggatccggatgtgttcatgctcgaatgccccgacttcttccccatcaaagacaaggacggcaacgagaagtgggtcattggcttctccgccatggggtccaagcccagcggcttcatgaaccgcaacgtcaacaacgccggctacatgattggcacgtgggagccgggcggcgaattcaagccggaaaccgagttccgcctgtgggattgcggccacaactactacgccccacagtccttcaacgtggacggccgtcagatcgtctatggctggatgagcccgttcgtgcagccgattcccatggaggatgacggctggtgtggtcagctcaccctgccgcgcgagatcacccttgacgatgacggcgacgtggtcaccgcgccggtcgccgaaatggaaggcctgcgcgaggataccctcgaccatggttcgatcacgctcgatatggatggggagcaggtcatcgccgatgacgccaaggccgtggaaatcgaaatgaccatcgacttggctgcctccactgccgagcgtgcgggcctgaagattcatgccactgaggacggtgcctacacctacgtggcttatgacgaccagatcggccgcgtggtggtggatcgccaggccatggccaacggcgatcacggctaccgcgccgccccactgaccgacgccgaactggcctccggcaagctggacctgcgcgtgttcgtggatcgcggctccgtggaggtctacgtcaacggtggccaccaagtgctgagctcctactcctacgcctccgaaggaccgcgtgccatcaagctcgtcgccgagtccggctccctcaaggtggattccctgaagctccaccacatgaagtccatcggactggagtagctctctcacctccctcacagagggaggttttttgtgtgcccctgtcgttcgccttcgcctatactgatggacggcatataacacaatccatcacacgaccggcaggcgcgcaggctcctcaccttactgttccacgccccggccgcaagcgccaccagcaaaccggactggcgcggaaagcaaggtgacatcccatgtccatcgccaagcgcctcaagcgccgcatgcccaccgtcatcgccgtcatcgtattgctggcagtctgggaaacgtgggtggatctaggacatgtctcccccacgatgatctccgcgccaagcgagattttcgccgccaccatcgaaacgtggaacacgctcggcccggccgcggcgatcaccggctatgagggcgtggtcggcttcctgttcgccgtgttcttcggcattatgatcggcatcgcactgtactgctcgcacacgttcaacgcggcgttctatccgctgcttgccgccgcacaaaccatgccgctgatttccatcgccccgttgttcctgatttggttcggctttgagatttccggcaaaatcgtaatcgtggcggtattcggcctcttccccatcgccgtgcagaccgtgcgcggactagaagcggtgccccagttctattccgacgtcgcattgacctgcggcgcgaccccggtctggacgctctggcacgtgaagctgcgcgttgccgcacgtcagatctatggcggtatccgcgtatctgccgcatacatcttcgccacggcatccaccgctgaatatcttggcgcgcgcaagggcctcggcatctggctgcaggctgcctacaattcgttccgcacgccgctgatcttctccgccaccatcgtcattatcctgatgacatgcgtactgatgctggcggtgaacgccagcgagcgcatcctgctcggcccggccggcgatgacgaagaccccgacgcggaccagtagttctttttaccgtcaaagacacaagccggcggccagaaccgactgaacggggcggcttctcatgaggtctccagccctgtctctataatggaacagctttaccagcgtgtggcaaaccggctttcttgagctttcat

SEQ ID NO: 3189 - DNA, 15169 bp, Unknown
  R53_2m  MAG No. k141_2904
ccttgattctgatgtttcagataagggggcccgaatcagcgggcgtagaattcgaccacgtactggatgttgacctgcaccgggatctcctcgacctccggtttacgggtcacagtggccttcagggacggcaggttcacgtcgaggtagccggggaccgcaggcagcacgtcacggtgcacgccttcggcggcgatctggaacggaaccatggtctggctcttggccttcacctgaatggtctggccgggcttgacgcggtaggacgggcggtccacgatgttgccgtcaacgaggatatgacggtgcaccacgaactgacgagcctgggcggtggtgcgggcgaagccggcacgcagcaccaagttgtcgagacgggtctcgaggtcggtcagcatggcgttaccggtctgaccggcagtacgggtggccttctcgtaagcggcgcgaagctgcttctcggagatgccgtactgagcgcgcagacgctgcttttcgcgcatacgcaccgcgtaatcggactcggtgcggcggcggtcacggccgtgctcgccaggagcgtacggacgcttttcgaagatgcgctgagccttgggggtcagtgcgatgccgagggcgcgagacagacgcacctgacggcgagaacgctgaacgttcgtcattggattaatccttctgtcgttatctgaacggaacgcttgtctcgcacatgccagacaagcgctgagccgggcctccccagcgcttcgtcgtgaacaaacacgaacgggttggttttcttgcgatcacctaccgccgacccgctgatgggctatgactccagacggtatctacctgttggcagacaccagcaaatcatattacaccgaggctatggacagcactccggcgtccatgcgatacacccggtctgcgtattcgagtgcatcgggatcatgggtgaccatgagaatcgctgtgccgttgttggcttggtctttgagcagacgcattacgatgtcggtgctctcttggtcgagatcgccggtcggctcgtcggcgataagcaggctcggctggttcatcagcgcgcgggcgatggagacgcgccgcatttcaccgccggacagctcgcgcgggtagctgtctgccagatcggcgacaccaagctgggtgagcagcgtgcgagctcgggtggcgaacaggtccggacggctcgcagccgtgtttgacggcgtgttttcccggtctgtgattggcgcaatgacatccggcatgaacgggtcggcggctgcttcatcattggtggcagcggcttgtgccacggcatcggtcgacgcaacagcgtccacctgagcaacggcatccgttgcttctgcgttttgggcgaacggcagcggctccggaaacatcgttgcgggcagaatcacgttgtcgagcacggtcaggttgccgagcagggtctggctttgagtcacgaatccgatggtgcgattcctcagcacggacagtgctttatcgcccaagtcggccacattgcgtccagccacgctcacggttcccgaggtcgggcgaatcagcccagcgaccatgttgatcaacgtacttttaccgttgcccgaccggccgacgatggcgatgaattcgccggcatcgacgatgaggttcacgtggctgacggcgtcgaacggcgtgccgcggcggacgaactggcgggtcaggtccgtcaaggtcagcagatggtccggggagggtgtctcggttacgtgcggcgaatccggcgcagtcggcgcgttcggctgagctggcgtggtcggcgggagcctggtcggcccaaccgtggtcggctgaagcggcgtagttgtctcagtcatatcactccccctctcgcagggtcaggtaggcttcgggccggccgagacgccacatggtggccagcgaaccgatgatgccgatgatcgtagagcacacaacggtcacggcaatgaatccgatcaccgcaaccgggctggcttgcagatacggcaattgaagctgtttgccgatcagcgaactgaatgggaaaatcaccagactggccgcgccgacgccgattacgccaccgatcagaccgatgatggcggattccttcagaatgatggcattcaacatgccacgcgtggcgcccatgatgcgcagggacgcgaattcgcgtttgcgttcgttcaccgacgaggcgaatacggcgagcagcgcaatcacgcccattacccagatcaccgccacgaaaatcttgaggtaggtgacaagcgcggtcagcgaagttctggtgttggcggtgatgccgccggggtatacgtatcccaaatcggcgaatcgggagtcaagacgcttgatgttctcagccacggtctgcgcttcgtacccccgctgcgtcttaatcatcacggtggagacggctttgccggcatattcggcgggcatgacctgcttggagaccttggccgaggcggcgaccatgtcgggcacggtgttttggttgatgaacaccgagttgtcgaggctggtgccggtgttggcgagctgggcgacgaccggccatgaacggccatagagttcgatggcgccgtcggtggacacgttgacgtttgcgccggcaatcatctgaccgtcttcaagggggccttcgaactgggatgcgacccatggttcgatgatgaagtcagtgtccgggtcgtaaccgatgatctgtagcttttcggcacagcaggcggcggccagcgatgatatataggtctgttcggtggcctgtgcgatgccgtcggcctgcatgacctcgtcggcgatgtctttggtgaaatagaaagtgctgggattgccgttggtgagcagcgcttcggccttctgcgcggtgttctgcggcacgaccataaggtcggcgcccaggcgtttttccatactggtcattccggtgttgaggttcatggtcagcatggtgccgccgaagaacgtcagcgcgaggatggtgacgacggagagcagtgcgccggtgcggaacggcttgcgtttgaggttttcaatcggaaggccgcgcaatgcgatatgggatggcacgatgagtccttatgttgcttatagtgcggttgcaataagcgaggccggagtccagcgttcggaatggctggactccggccgtctgcgcgatcagttgcgcttggcggcgcgaaagtcaagccagatggcgatggccgcgaacacgatggtgagcacgccgagcacaatgagcgttggcagcataaccatgcggcagtgcatcatcgcgcccttgcagatgccgatcaggaaggtgggtacggcgagtagcagcagtgcgttggctgcggcggcgatattgaggccgatgcgaatctgcggggcgacgaacaaagccacgacgccaaacacgaggatgacgacgccgatgccggtggccgcctgctgcgagtagtggcaggcacccggcatgtcatggccggtgcaggcgtgcgcaaaggtctggggcgcgatggtgatcagcgcgccgaacagaatattgggcacggatgcaaacagcttgttcttcataactactttttcctctcccctgttcccagggctcgtaggcgcaacctccgcattatgcccagatagtgatgaagaacacaagtcttgttttttgtgaatttatttggtatataactcagcccctcgtcagaggggccaatctatctacaacttctcaataggtgctacgcggagcatgaggcgtttgacgccggcggagccgaagtccacggtgattaccgaattgcggcccttgtcttgcgcgtcggtgaccttgccgagaccgtactggtcgtggctgatcatgtcacccacggcgaagtcggcgatattcaggccattgtccttggtgagcttcgagctgggcacggcagagccggtcgaaccggatttcggtgtggtgcggcgcgtggtgaccttgccgccacgggtgccgccatatgaaccggatgaagaaccagaacgggaacgcggcccgtaagacgaccccgaaccggagcctgaagaaccataggacgaacccgaacgggagcgagacccgtaggcggacgaacccgaacgggaaccatacgacgaggagccggaacccgagccatacgacgacccataccgcgaccgcgacccataggacgaacccgaaccggacgagccacgcgagccgaacgtcgacgacccgccaaacgtggcgccgccgaaatcgtcatcatcccaaccgcccaaatcgtcggcgaatccatcggtctcccagctggcgcgcagacgctccacaccggcttcacgacatttccaatcaatcagcggatccggaatctcgtcgaggaattggctgggcatcatgtcggcggcctgaccccactgggagcggacggcggcgcgcgtgacatacagccgctgcttggcgcgtgtgatgcccacataggcgagtcggcgttcctcctgcagttcagtggtgtcttccatcgaacgcgaatgcgggaaggtgccctgttccatgccggtcaggaacaccaccgggtattcgaggcccttggcggtatgcaaggtcatgagcgtcaccttgccggagtcctccgcctcgccgggtagttggtcggagtcggccacaagcgcggtggtctccaggaatgcagacaacgtggcgtcaggcgtgttctgttcgaattcggctgcggtggactgcagctgggagaggttctccagacgggaggcgtcctgcgggtccacggatttctcaagttcggcccttaagcccgacttctccaatacttcggccacgatctcgctgggcttggagtcgtgcgcgcgcgtgaactgcgagagcgcgcccatcagatcgcggaatgctcgtagcgaggtggcggtgcgggtcggcacttcaatctcatccaagtgcataagtgcgtagaagaagctggtgccatgctcgcgcgcgtaggcgagtagcacgccttcggcgcggtcgccaagcccacgcttgggcacgttgagaatacggcgtagattcacatcgtcgtccggattgacgagcgcctgcaaataggccagcgcatccttgatttcgcgacgttcgtagaacttggtgccgccgacgagctgatacggctgattcgtgttgatcagcgcctcttcgagcgagcgagattgggcgttggcgcggtacatgatcgccatgtcggagtaggcgatgccctcttcggcgtgcaggcgcgcgatttcggtggctacccactgggcctcctgctgggcgttgtccgccgcgtagccgacaatcggctcgcccttgccgagcgcggtccacagtttcttgggcttgcggccctcgttgttgctgatcaccgcgttggccgcatccagaatggtctgcgtcgaacgatagttctgttcgagcatgatggtcttggcgttcgggaagtcctgctcgaagtcctggatgttgcggatgtcggcgccacggaacgcgtagatggactggtcggaatcgcccaccacggtgatccaggcggggccggacttgccggcgttcggcgcgcccgggatggccttctcccccgtgtccacgccggccagctcgcgcacgagcacgtactgggcgtggttggtgtcctgatactcgtcgacgagaatgtaacggaagcgttgatggtagtactcggcgacggccgggtcggcgcgcagcaactcgaccgtgcggccgatcagatcgtcgaagtcgacggcgttggccaggtccagtcgatgctcgtattcggcgtagatcaccgcatagatggcttcaaggtcgctcaccgtgccgaactggtagccgcgctggccgggcgtgaagtcgggtgcgtggacggcgaggttttccttccaaccggtcagattgttcttgaggtcggagatgtggccgaggatcgagcgtggagtgtagcgcttgatgtcgaggttgaattcggtggcgatgattttgacgagtcgctcggagtcggcggaatcataaatggagaagccggacttgagcccgatggacttgccgtcgcgcctcagaatgcgcacgcaggcggaatggaaggtggagacccacatgcgctgggccaccgggccgatcagcgaaccgagtcgttcgcgcatttcggcggcggccttgttggtgaaggtgatggccagaatctggctcggccatgcgccgaactggctcaagatccaggcgatgcggcgggtcagcacgcgggttttgccggagccggcaccggcgccgatcagcagcgcctgaccgcgatattgcacggcttccgcctgctgcgggttcagatcgcctacaagttcctgcgcgctgcgtgcgatgacttccggctcgtcgtacactgttgcctccctttgaatcgcgacattcatgtttaccacatgcacgggtcagcgcaggacaacgtacacttacaagtatccatatcattcactgacatacagcaatgggaggtctaatgcaggaacttgaggagcgaatccagagcgagggaacggtgaaggcgggtgatgtgctcaaggtggacgcgtttctgaaccaccagtgcgacgtgcgtctgttcgaccgcatgggttcggcatgggccgctcatttcgccggcaagcacatcaccaagattctgaccatcgaggcgtccggcatcggcattgcgtgtgtggcggcccagcatttcggcaatgtgccggtggtgttcgccaagaaggcgcagtccatcaaccttgacggcgaccagtacaccaccacggtctattccttcaccaagcagaaggagttcccggtgatcgtggccaagaagtatctgaacgccggcgaccatgtgctgcttattgacgattttctggccaacggcaaggcgttgcgcggtctgattgacctgtgcgaggcggccggtgtcacggtcgagggcattggcatcgccgtggagaagggcttccagggcggcggtgacgcgctgcgtgccgaaggctacgatgtggattcgctggccatcgtcgagtccatgaatcccgagaccggcgaaatcacatttaggcactgagcacattgactgctcccgccagcgggagcaacagagagaagaaaagaatcatgtcagagaagaaaaccaagaagtccgtatcctttgaggcgctgtcttcgctgaacgcgccagtatccttctggaagggcattccgttcggcctgcagcatgtgatggccatgttcgtggcgaacctcgccccgatcttcatcgtcgcctcggccgcgaaaatgaccccagcccaatcggccaccatcatccaggccggccttctggtggcgggcctgggcacctgcctgcaactgtacggcgcgtggctcatcggctcgcgtctgccgatggtcaccggcatctccttcacctacgtggcggccgccgtggcgatctgcgcagacaagggctatggcgcagtggccggcgcggtaatggtcggtggcctgctggaactcgtgctgggtttgacggccaagtattggcgtcggttcgtgccgcccatcgtctccgccatcgtggtcacgtcgatcggcttctcgctgcttaacgtgggtgccacgagcttcggcggcggcagcggagccaaggacttcggaagctggcagaacctgacgctcgggcttatatctttggtcgcctgcctggcgttccagctgttgatgaagggcacggccaagcagctgtccgtgctgttcggcctggtggtcggctatgtggcggccatctgcatgggcaaggtcgatttctccggtttccagaacctcgccatcgtgtccgtgccgcagttcatgccgttcaagcctgagttcgactggggttcgatcatctccatcggcctgctctacgtcgtctcctcggtcgaggtgctgggtgacaccgccgcgctgaccaaggtgggcctgaaccgtacgcccaccgaacgcgagaccgcgggcgccatcgccggcgacggcctgatctccaccgtatccggcctgttcggatgcctgccgctgacctcgttcgcacagaacatcggattggtggccatgaccaaggtcgtcaaccgcaaggtgattctctccggcggactgattctggtgctggcgagcttcgtgccggccatcgccgaggtgttcaactcgctgccgcaggcggtgctcggcggctgcacgatcatgatgttcggcaacatcattctttcgggcttccagatgatcgccgaagcgggcttcacgcagcgcaacatcacgattgcggcgctttcgctgaccatcggcatcggcttcacccaggtgagcgacatcttcgcgcagttcccggcactgttccaacaaatcttcgcctcgaactgcatcgccgtggcgttcgtggtggccgtgatcctgaacgccgtgctgcccagcgaggagcacttcctctccgcgcccaaggaggcaccggccgcggacgccgagtgataacaacgcgacatatcagctgcgcataatcacatgctgatgccctatcgtcttgcaggatgatagggcatcattgattttgagagagactacaagttgaaccatgagttcgagccggtggcgtgtcgatcaatcgacatcttcccattcgaggatgtctccgggttggcagtcgagtgccttgcagatggcgtccaatgtggtgaagcggacggctttggcacgtccgttcttcagaatggacacgttggcgggcgtgatgccaatttgttcggcgagctcgccgacgccaatcttgcgtttggccatcatgacgtcgagattgatgcgaatcgtcatctcaaatcacctgctcaagttcgcgcccgatccggacaaggagaacagtttccatacggccacgaacgccgcttcgatgcagagcaggaacagcacgcccataatgagatatgaccagtgcatcgacgtctgtctcgggcagaggccggccagcgcgccgttcaatcccggtacggcgaatagttggccccataggcaggccagccagaccagaatcacgatggctttcaacgcgagcaacacccatcggttcatgtagtttttcatagcccggtcctttcaggtgccgacgtttttggcgacaccgcgaacatcgatatgactatatcgaaaaacgatataccttgcaaggcgtattgcgtcaaccggcattggtcgctcatatgcatataggcttcggcagactgtcagcagaccgtcagctcaacggaacgaacgccatatgagccacccattcgcgcacgagcgtgatgacggcttcgggttggtcgatgtgcgcgttgtgaccggcattatccagagtcacgaaggtggcgttgggatagtgcggcaacagggcttgctggtcttcgtatccgacgatctggtcttgcttgccggtgacgatgagcaccggaccagcatatgtgccgagcatttcctcgggattatcggccagccaataacgctgatccagtcgttcgcatgccgcacggtcgcacaacgccacgccgggcaggatgaaccgttggtagcgccgccacgcgtcgaatgactggttgacgcccatggtaatgaaatcgaacacctgttcctgtggcaaggagtgcgtcagcttgggattgggctgtgcaaccacatgttcggccacatgccggccggcatgctgcgggtccacgaccggcgcgatcaatgccataccggccactcggcgaggttcgcgcgccaatacttcgcggacaagcgcaccgcccatcgagttgccgaccatggcgaatggagccgctttaccgacaaggccgtcaatggccgtttgcagccaatccgccatttccggcagcccgcaggcatgctcgggcaatgccggcgtacggccgaaaccgggcagatccagatatatacggcgaattgaatcattgccgtcaaacgccttgtcgagcatcatcagcgaacgatggtccacacccatgccatgcacgaacacgacgggcaatccatcatcattgccctcaatcgcgcagtacggctgcaattgtgccatgtgttcctctccttcaacccggtacaaatcgtctttcacacaatagcggcagcagctcccctggtgtcggagcaatcccgaccgccattctcggtttcgaggggctgatttcgtggtttggggacatccacttccgtttcaaggggctggtcattggccaaaacccaagtacgaatagcttcatgccaacgtcatttcaccgttttggagctgtcgctactcggccatcagcccctcgaaacggaagtggatgtctcggaacgagcaaatcagccccttgaaacgcaaatagacgattgcgaatcgacttatcagccgcgtcgaacttgcaatagagatgtcggtgtatcattccccggtctgattgcgcggatgtcaggaagcgtgaagaattgtcacaaagtcgcgtgatggcgcagccgccgttcaggtggatatgccacgctgtcatgaggacggccgagccggaacacggcaaatctcgcatgctgcataggccagccggtcacggtcagccatgacaccgaaatattggaggcgcaatgggacaacaggtgcagtgcggcagacgccgctcccatggcgcgggcgcgctgattgcagccgtcatacttgttgttgcggcgctgatcgcggcatggacgctgctgccacggctattcacgcctcacgagaccgcgcgcacggccgaggaagcatattgcgcggcggtgtcgcccgacggagcccgccgcaccttgacgcctgatcaggcgcagaacgcggcgctgattgcgaacatcgccgtcacgcgcggactgccggatcacgcggcgacggtggccatcgccacggccatgcaggagtcgaggctgacgaatctggactacggcgacttggattcgctcggcctgttccaacagcggcccagccaaggctggggcacggcggagcaggtgtccgacatgacctatgcgacaaacatcttctacgaccatctgctgcaggtgccggattgggagacgattccggtggaggacgccgcgcaggaggtgcagcgctcaggctacccggaactatatgccacatgggatgcgatggcacgcgcttgggcctcggggctgaccggcgaacggtcggcgggcgtcacgtgcgcgttggagccagcaacctcctcggacgcggacgagttggttgccgccataggcggtacactgccgaatgtcaaggtctcggttatgcccctaaatggcaaaaccggcacgaacaacggcgctgcgaccaatacggccagcacaacgttgacgatcacgctgccggacggcctgtccgccgacaaccgcactcgactttgctggcagacggcaggctggctggtcacacaggcgcatcaatacggcattgatgcactgcacgcggacggcatggattggaaccgcagagccggcacatggaccggcaccgaaaccgccgagcagaccgtcaccgtcacgcttgcgtgatgtgacctataccgccgttgcgaccacaaatccgactggctggagcctacgccgtcgatgctgcctgaggcacgacacggatatgttttttactcgttcgaatgagcccaatccacgacggcttcgatgttattgccatccgggtccagcacgaatgcggagtaatagccgggatggtacgggcgcggaccgggagcgccattgtctcggccgccggcggcgagcgcggctgcatggaacgcctgcacggcttgctgactgtcagccaggaacgcgatgtgtgtgaccggcgtgaccggcgaagcctccgcctccggcccgtcaatcggcgacacgtagaaatcggagtgcagggttccgtcatccacgccgaatccgagcgtgggctcatgatgcgccttgacgatatagccgagcggtgcgagcgcctgtttgtagaatgtgatgctacggtcgatgtctttcacgtgcaacgtcagatggtccagcatggtcttggtcaccctcccctggttcttgtattcgattgctgcttgcagtgtaagcccgaacgtttcccacagggccgcgcatggctatgatgagagcaatcgcacgtcgagttcgagacaatattcaaaacgaatccaaggcaatagggggaatgacgatgaccaaggcactgattgtggtggatgtgcagccgacgttctgtgaaggcggcgaactgggagtcgaaggcggcaacgcggtcgccgagcggatcgccgattatgtgaacgcgcatcgcagcgagtacgcgtatatcgcaaccacgcaggactggcatatcgagccgggcgcgcactggtcggcggaaccggatttcgtggacacgtggccgaagcatggtgcggccggcacgccgaacgccgaattgcatccggcgatcaaggcgctgattatccatcatcatttcaagaagggccagtattcggcggcatattccggttttgagggcatcgaggacaataccgaccgtatccagacccgtgaggaggttgcggccgagcaatccgccggcaagacgctggccaatgcgctgaaggccgccggcgtgagtcgcgtggatgtggtgggcatcgccgaatcgcattgcgtcaaggacaccgcgctcgatgccgggaagttcggtttcgaggtcaccgtgttcgaggacctgaccgtaccggtcagcgaggagctcggtgtcgcggcccgcaaacagatgacggcggccggcatcacattggccgagtcccgctgatcaggccggatatacccagagcgaacgcacgaacacttccgtatattcaaggccgacactgccgcatagtcgcctagtcgatatgtgaagaaggcttttatggttacgatgctgctgacttcgatattccgcaacgcctcgtccgccgtgcatgaagtcgaaccgcatccgcaaggcaagcgggtcgcgttcatcccgacggcgagcgccgtggaaccgtgggggccggttcactcggcgttgagcaaacacgcgctgcaacgcctcggtttcgaggtggagcaactggatgtggaagatgtgccgagcgggtccgccgaacgcgtcacgcgtagcatcgccgaggccgactgcatctatgtgggcggcggcaacacgttctttctcctgcaggagttgcgccgcaccggtgccgaccgggccatcatcgagcaggtgcgcgccggcacgccgtacatcggcgagtccgcgggctcggtcatcacggcacctgacatcggctatatcaagctcatggaccgcacggacaaagcccccgatctcaccgattacgcaggattgggcttggctgatttccgcgtggtcccccaccatcatgcaacggccatgggccacgccgcacaacgcattctcgaccggtatggtgccgatctcagtctcaagcccctcaccaaccggcaggccctgcttgtcaaggatggcaaaacccggctgctgcgatgatgcgggtcgtcggcccgtcgcccattcggcatcaccgtggtgtgtccggcctgacatgcctatcgagcggcatcaatcacacagcaatgtggctgggaacctcgccgaacgtcaacacctgcatacatcagcacggcaaaatctgccgaaatcgcccggcgcacgagatgccagccggccccatccgtcacctcagtgccgtaccgggccaggcatggccttgagcaacgggatgaatccggcgcacagtaccagggccacgacggcgagtatctgccagtgggcggagccgagccagccgccccacgtgccgatggcaccgccgatcgcatacgcgaacctggcacggccgctgaatttggccaggtcaccaccgctcagcagcagttgtcgcgatacgatcacgccatgcgccagcaggccatagccgaggttgttgatgagccatccgacgcacaccgcggcaaactcgggaaccagtacggcggcaagggaaatcgccgtggcgattgccccgatggcggacacggcgcgcatgccgagttttgcggagagccgcatgtagacaaacgatccgatgatgctgcccacgccgccgaatgcgtagaccacggtcagcatatcgctgccgtaccgggagccgatgcccagcaacgcatagcttgcccacagcgacggaatcagcgcaagcagcagcgatgcgatcagcagtctgacccgggtcgagcgggtgaccggagtgcgctgcggcgcgtgtgacgtgtcggccgccgtggattcgtcggcggagccgtcgccgtcatcgccgcccgcaccatcgttgccgaatcccggcatgaactcgcgggtgcggaatcgcgtcagcgcgcaggcgaatgacagtgccgacgaggtgagcagcatggccatgatggaggcgttggccagggccgatccggcaacctggcccagcaacgtaccggccacgctggcaatcacggcgacgtagccgctgtacttgacgagcatgtcatcgtcgtcgccggccgcatccacctcgaacacttcggaggccacgtcgatgacctgcccggtcatcagcagcaggcatgacagggccagcagcagccacttccaatacgtccaaccgttgggcaccagcgcgaccgccaggcacagtacgccttccacgccctccgtggtcgcaagcgaacggaacgagccgaaccgctgcacgatccatgcggataccggagaagcgaagtcgatgaccagattgaacgtcttgcggaacgcgatcacccatgccggcagtccgacgatcagaatcgaaggaatcaccgacccctcgaaaatcgcgttggacagcatcgaaaacgtcatacccaccaacgcccatcgcaacgccctgctcaataccgataatcctcgcataccttagttccttgtccttgctagtgtaacggaattatgacttctcaatcgtccgcccgggttctagatagaagtgcaacaccttgtctagggttggaagtgttcgaagtttctaacttaagaaggtgttgcactcatgggtcaacagtattcgcacctgtcgtccgaggagaggatcctgatcgagaagctgcattgcgaacagcatc

SEQ ID NO: 3190 - DNA, 4980 bp, Unknown
  R53_2m  MAG No. k141_2928
attgaaatcggtttgggcaaaaagggccgtctcggctacgcactcgacgatgtggcgatcgtcccctcccgtcgcacccgcgaccccgaggacgtctccacctcttggcagatcgacgcctatgagttcgatgtgccggtgatcggcgcccccatggattcggtgaccagcccggccaccgccatcgccatgggcaagatgggcgcgctcggcgtgctcgatttggaaggtctgtggacccgttacgaggacccgaccccgctgttggacgaaatcgccgggctgccggccgatcaggccaccgagcgtatccagcagatctatgccgagccggtcaagccggagctcatcacgcaacgtctgcacgagattcgcgccgccggtgtcaccgtggccggcgcgctctccccgcagcgcacccagcagttctactccaccgtggtggacgcgggcgtggacctgttcgtgatccgcggcactgtggtctccgccgagcacgtctcctccggtcaggaaccgctgaacctcaagaagttcatctacgaccttgacgtgcccgtcatcgtcggcggcgcatccaactacaccgctgccctgcacctgatgcgcaccggcgcggccggcgtgctcgtcggcttcggcggcggcgcggtctccgccacccgccagaccatcggcgtgcaggccccgatggccaccgccatcgccgacgtggccgaggcccgccgcgactacatggacgaatccggcggccgctacgtgcaggtcatcgccgacggcggcatgggcgactccggcagcttcgtcaaggccctggccctcggcgccgacgcggtcatgctcggcgcgccgctggcccgcgccaccgaggcccccggcaagggcacccactggggttccgaagcccgccaccagacgctgccgcgcggctaccgcaccacggtcggcacggtcggcccgctcgaacaggtgctgttcggaccgagccaccaggcggacggcaagaccaacttcatcggcgccctcaagcgcgctatggcctccaccggctacgtcgacgtgaagaacttccagcgttgcggcatggtggtcaacccgtattccgcacgataatcccgattacccccctgaaaatggggggtttgccctccatgcaggaggcttagcttgccctaaggcgcgctcaagtcgtttgacttggcgcgcctttcgtgatgttgtagtacaaacgctcgccgatgatggtgagttgcaagggggcttgaaggggtcatcatggagtattcgggatttttccacggcacatatcagtacgggccgttgccgagttatgacggattcatcgttgtggagctgtcggatcgcccggtgcggtatcatatccagcccacattcataggcgggctgaatgcgaaggaatgtcattccatggccatggctgcatgccgcatcgcctgcacatcggcggacgcgatacgtggtagactcagcgtcgcacatctcaacagagccatgacaaaaccatgcctggaacggctgcaaaccatgcaatacctgctcggcacccacatggtcactcatccggagctcaaagcgaaattctgctatctgcccactgtccccacattgatcgacggcatgatcaccggcaaggacacgctggaaatggcggtattcatgaccatcggccaggaaaatctgcgagtcaacctcaaactgaagttcatcggttctcgatggatgtgcatctatgccgatctgggctgaccagacggccccgccctcacaccgattcctacgctggcagcggaagacggttctgccgtgtcataggctggttcgcctatagtagtgaccatgcgtgaacatgtagaagaacccagatatgtcaccaccgatgacgacaccgtctactcgctgctggccaaacgagcagctcgcacgccggatgacatcatcgcggaatggcaggatgacaacacccaccaatggcgcggcgccacagctactgaaatgctgtcccgcgtacgcgaggtggccaagggcctgttgggacttggcgtcaaagccggcaccatggtgctgatttactcgcctacctgctatgagtggggtgtggctgatttcgcttgcgcggcaatcggcgctgtggttgtgcccgtctatgagaccgattccgcccgtcagaccgcgggcatcgtcgaggaagtcgatcccgccatcgcctttgccggcgacttccagcgcgcacagacgcttgagcagatccgtgtcaatcatccgggcatgaaatacgtgttcaatttcaaggccgatggccttgacgctgtcgctgacttcgggcatggcgtatccgatgagacgttggatgcggctatcgctcgtatcaaagccgatgatctgcttaccgtggtctacacctccggttccaccggcaagcccaagggcgcgatgctctccaaccgcaattacacgcacatcgtgcttaacggctacgagattctgcgtggcatgctgtacgacgacaaccgtctgctgctgttcctgccactggcgcactgcttcgcccgctacatccagtacgtgtgcatcggtggctgcggcgtggtcggatacattcccgacgccaagcgactgctcgccgatatccgcagcttcaagcccacctacctgctgggcgtgccacgtgtgttcgagaaggtgtataacgcggcctcgcagaaggctggtgccggcatccaggggcatatcttcgcccagtcggtcaagcacttcgtcaagtggagcaaggatgagcaggccggccgcggccattcgttcatcgagcgcatgcgccattcgttctacatggccacggtgggcaaatccattcgttccgctctcggaccgaacctcaaatggctggcctgcggtggtgcgccgctcaacgtggatttggcccactttttcaacggcatggatgacatcaccttcatccagggttatggcatgaccgaaaccgccgctccgatgctcgtcaattgggaggacgacaacgaggtcggttcggtcggcaagcctgggcctggcatgggcgtgcgtcttggcgaagacgatgaaattgagctgaccggcccgaacgtgttccttggctactacaagcagcccgaactcaccgcacagacgatgactgccgacggctggatcaaaaccggcgatctgggtcgtatcgacgaccgcggtttcaccttcattaccggacgcaagaaggacatcatcatcaccgccggcggcaagaacatcagccccgccccgatggaggatgtcatcgacacctgcccgattgtggctcatgcagtagtagtcggcgacggcaagccgttcgtgtccgcacttatcgagctcgaccccgaaatgctgcattcctggctggaaggtcagggcctcaatgccgacatgacactcgccgaggccagcgacaacgacgcggtgcgtgcctttatccagcagtacatcgaccaggccaacgccaatgtctcccgcgctgagtccgtgcgcaaattcgcggtgctggatgaggaattcagtcaggagcacggcacgctcaccccgagcatgaaagtggtgcgtcccaaggtattgcagcgctacgccaccgtcatcgaagaggatctgtatgcgcccaagccatccaacaaaccactgcccgccacagccaagattatcgacagcacgctggagaccgtcaagaaatcctccgaatcggtcaagcaggcgtccgaacaggtcaaacaggcctcggaacagatgaaaaccagcgtgtctgattcgattgctagcgtgtcggagaagatcaagaagtcgaaggccgaacccgaagagggcgagaccggcgattccgccgacaatgccgacaatgccgctgacaccggcagcaagccggaccggccggctgacgagaaggacgaggagtaacgagaagtggccatccgtgagatcagggtcgtgcccgacccagtcctgcgcaccccctgcgatgagatcaaggaaatcaccccggccgtgcgccgcctggttgacgacctgctggaaaccgtggacgatccgggccgagcgggcctgtccgccaaccagatcggcgtgagcctgagggccttctcctacaacatcgacggcaaggtcggctacgttctgaaccccgtactcgaggagaagtccggcgagcagtatggcgatgaaggttgtctgtccgtgcccggcttgtggtacaagacccgtcgggccgactacgctcgcgtgcgtggcatcgacctggacggcaacgaggtcgtgctcgagggctccgggctgatgggccgtatgcttcagcacgaatgcgaccatctcgacggccacgtgtatttggatcgcctggaaaaggaagaacgccgcgaagccctgcgctacatgcgcaatcgtcaggcgaagtagtccatacccggctcccgctggcgggagccgccgaacgtagtgagactgagggtggttctgccggtaccgcccgtaactcccctcagtcgcctacggcgacaggctcccctcagagaggggagcctgtttttcttagtaccggctccgtgctatccttgaaacttgtgtgccacccggcaacggacgcagtcgctggcgtccggaaccacccaatattgtcaaccggcacacaacaaattcgcgtcatgctcgcgacggcctgtgtcggtcggctgcacaactcgtgaaaccgggggagcagctgcacgcaggtgcgcatggccaggcaagaaccgacaatgaaaggtagtaataccatggctcagatcactatgagcgatatgctgaaggctggcctgcacttcggccaccagacccgtcgttggaacccgaagatgaagcagttcatcctcacccagcgcaacggcatccacatcatcaacctgttcaagtcgctcgacatgatcgacaaggcgtacgacttcatcaaga

SEQ ID NO: 3191 - DNA, 7160 bp, Unknown
  R53_2m  MAG No. k141_3112
aacgaggatgacgattatcgggcggattacgatttcctgaagactacgcttgaccgcatcacctctcgggcgaactacgatccgaaccgcccgattttcgtgctgacccatcacggcgtgcagaataccgcctatgtgaccggaatcagtaagatcgccggaaaaaccgaccgcatctacgcccgattggcggtaagcgctcaacgcattcttgagcttgtctacagcagaaccatatttgccgctgtcgcgccccacgtgaatatcactgccgaaaccgaatcgcgccacgacatccttatctcgcggcaaatcccatgttgcagactgctcggcatgcgcggacggagctgccagaacgctagctagcaccataaccacagctgacaccacaggtacagcgtaacgtcttttcattgttttctccttgtgttcatgctcgtgcgctcacgtgtttccatggttcagcgacatcagcgagtacacgctagaaaacagcgattacagttgcccgacaaagacgtggctcacccatgaacaacgaaaaaacaatgatggagacctacgtaggaggcacttagcgaatagttcgtgtggagtaggtgggcggagcgatcggcgtgccgttcatttcgttggccatctgcatgagacgcgcgatgcggtcctcggtcggtggatgcgtggagaacaggcgtgagaagccggccatggagaacggattggcgatcatcatcgcggaaacggactgggtgcccgcggtcttgcgcatcggctcggcctgcgcgccatgggagatcttgttcagcgccgaggcgagggcttcggggtctccggtcagcaggctgccgtcttcgtcggcgtcgtattcgcgcgtgcgggagatggccatctggatcagggaggcggcgatcggcgcgagaatcatgctcagcagcgcgccgatcaggccgagtccgccggaatcgttgcgatcatcgctccggttgtcgccgaagtacatcagggagtagcccagataggagatgacggtggccatggcggaggcgatggcggaggtcaggatgtcacggttgtacacgtgcataagttcgtggcccagcacaccacgcagttcacgggcgttgagaatctgcaggatgccttgggtgcagcatacggccgcatgccgttcgttgcgtccggtggcgaaggcgttcggactcatggtgggggcgatgtagatgcgcggcatgggcttgccggccttggcactcagttcgcgcacgatctggtagatttcgggggcttcctgttcgctgacttcccgcgcgcccatggaggcgatggcgagtttgtcggagaaccagtaggtgccgaacgtggtgaccaatccgatgacgatatagacgcccaacgtctgcctgctgccgcccgtggcccaccagatgagcatgatgacggcccacatcagggtaaagagcaacgtcgttttcaggccgttgaagtggccgtgcacccgtactttggcatccatactgcacacactaaagtcgcaggctgaatgattgctggatatgcgccacgcgtaatgtcccatattcgcccggcctgtccggccccgagcccggccgcgtccgcacggggcgcggccgggtggacgaatccggacgaatgccggacgggcgggggcgggccgtcaggcgtgggcaagctcgcgcatctgctcaggatcgatgaccttcttgtgttcgcggccttccttggcgccctcggcacgctcgaaggcatcgaccttcttccagccggcgaagtcgatcgggcgaatgccgcgctcggccagcagtcggtcgatggattcggggtcgcggtcggctgccacacggccaccttcagcggccttggccagatcctcgagcatgttggtcacgatggccagcgcatcggatttggtggaaccgatcagacccaccgggccgcgcttggcccaaccggtggcgtacagccgttcgcgcacgtcgccgccatcggcatcggcggtgatgcggccgtcgccgttcgcgttggccaggtgcgcgcccttcgcatcgtaggcgatgccgggggcttcggcgggccggtagccgatggcatggtagacggctccgaccgggtagtccgtgaactcgccggtgcggcgcatcctgccatcggcgccggtctcggtacgttccacgcggatggccttgaccttgccgtcctcgccgagaatctcggtgggggcggagttgaagtgcacgtaatacctgcggtcggccggattgccttcgaagtcgacgtcgccatcgtcctgcatgtcttcggccatctcgcggatggcgaacagttcctcgaccatctgacgggtgagcttgtccttgccggccacctcgatggtctcgtcgtccaggtcaaagtcgtcttcgttgatgatgagctgcacgccgggcagcttctccatctcgcgcagttcctgcacgctgaacttggcctgagccacgccacggcggatgaacaggtggagcaccttggccttgttctggccgatgccctcgtacacgttgtccggaatgtcggtcttagccttgaggtcgtcggcgttacgcatgagttcgcgggccacgtccatggccacgttgccgccgccgatcacggcgacgttctcggccgtcagcggccattcgcgggcaccggtggggtacccgtcgtaccattcgacgaacttggcggcgccatacacgccgtcgaggtcggcgccgggcaggttcagcggcttgtccttgactgcgccggtggcaaacagcacggcgtcgtagcgggcgagcaaatcatcgagggttacgtccttgccgaattccacgtcgcagtagaggtggatgtccggattgtcgagcgtcttctcgagtgcggatgcgatgaacttgatggacgggtggtcgggggccacgccgtaacgcaccagaccgaacggtaccggcagcttctcgaacaggtcgatgcgggccttggtgccgaggccgagttcttcgcccagtttcttgagctggcgcaggaagatgtcggaggaatagacgccggccgggccagcgccgattacagcaatacgaagttcagtgttcacagattcagtcacgcgttacaggttatcgcaaagccttccgttgcaacaggggtgagtggtgggaatcctgtgcctaataccctctgccagcctcacgccagcggggcaaaaccacgagtcgatcaagaaattgccccactcacagaccgccagcggagcaaaatcgcgagtaacccgaaaaattgctccgcttacagcccatcagcggagcgaaactgcgactaacccgccaaggcaccccgctgaacacccaccagcgcagcaaaaccactattagaccgtaaaatcaccccactcgcagaccacgagtggagcaaaacccctattagtccacagaatcgccccgcttacagaccgtcagcggggcaaaaccgcgactcagtcgaggagataccccgcctagtcgcggtcgatgagggcagtgagggcccagaggatgctgaccacgtcgatggcctcttggaggaaagcgccgacgatcactggaatgaggttgaaggcggcggcaatcatgccgatggtggcgagtacgagaccagcgatcacggcctgcagcatcacgcgcttggtacggcgtgcaatggcgatagcgcgcggcacagcggcaatatcgtcattcataatgaccacttgggcgctttcggaagcagcagtggaagtgccgtcggtcatggccacgccgatatcggcgacggcaagtaccggggcatcgttcacgccgtcgccgaccatcatcgtgaccggcttgcggattgcggcggcgcggctgcatcgagaacgcgacggttgagaaccatcggaccggatgccatctacggcatcggacacagggctggcggcgtgattcgcgcgcccggccggcgcggcgcttgcctccgtggcagccttgacggcggcaaccttgtcttcggggaacagctcggcgtggacctcgtcgatgccgacttcgtccgcgatgatttcggccgaggcgtgcttatcgccggtaagcatggcaagcttggtaacacccagttcgtgcagattggcgagcgcggttttggtgttggcgcgaggtacatctcgcagcacgatgcgggcgatcagttgcccgtcaacggacacgtaggaggccatttcgtccggctgtagcataccgaatcgcgtacgcagcgtttccttttccttagtgttcccggcaatcgtacggccagatcctgcctcagtatccccgcccagaggggactgtccgtgaagcgggctgaggaggtcggccgcctcctgccgtgggtcatccgcccggcttacacccgctacctcggcagtcaagaacccatcctccccggctgcagcgaacgacagtcgcccaacgcggacggcatggccgttcacctcgccggacacgcccttgccggagtcctcattaatattcttgacgaccggatattcgcggccgtggccgggccagctggcctctggttcggggcagagacgctggccgtccgcgaaacgctgacgcaagcgggccatcgcgtcggcaccggctttggcgatgcccttcgacagaatgtgtacggaatagctctctacaacgccggccatcatcagcacatggtcctcattaagacgggtctcagctccaggcagcatctcaacgcgcaccacttgcggctgcttgacggtaagcgtgccggttttatcgaagaatacctgggtgacgcggccaaggttttcgagcacatcctgcgccttgatgagcacaccggcggcggcgagacggccagtaccggcgatgtatgccacgggcgcggcgataagcagtggacagggcgtagccagcactaacacctgggcgaaccgcgtcggtatgccggacaccgcccaggcgacgcccgctattaccagcgacagcacagtgaacggaacggccaatcggtcggcggttttcaccacggccggacgggactcctgtgcggaagcgacgagttcgaggatgcgctggtactgggaatcggcggccacctgggtggcgcgcatggtcaaggcagtggaaccgttcactgcgccagacatcactcgggcaccggcgaacacctcgcgcggcaccggctcgccattgatgttgctcagatcgagcgtggccgagccggaaagcagttcgccgtcgaccggcacggtttcgcccggcaacaccatgagcacatcgccgagcttcacctgctcgaccggcaccgtgtcgaagcggtacgtggcggcctcagccgaccagctcccctcagtctcgctccgcgagtcagctcccctcgacggcggtacttggttcccctctccaaggggagctgtcggcgaagtcgactgaggggaggacgtcgccggaaccgagcctacacgccggaagccatcggacgaatcgtccttatcagcggcagccccacaccccacgccaggcaagttgacgacgtgcgcagtttgcggtgctgcctgcatcaatgcggtcaaactgtgctcggccttggcctgcgcgtattcctcaatggcctcgccggacgtaatcatcagcatgaccgcccagcttgcccagtactcgcggacggcaacggtggaaagaatcgccactacggccagcaaatcgacgccgacttgtccgtggcgcaaatcgtcaatcatgccacgcactgtgtcaatcacaatgattgccaccagcgcgattatcagccattggcctacaccaggattacccagcaccggcatcgcaattgcgttgccccatgggcgccaatcgcccagcaatgccagcgggattgcggcgataacaacaacgggaagcatcggcacaagtcggcagatgtcgaggattttggtgaagaatctgatgagtccgctcatcattgctccttacgctcgtatacggagtcgattgcggcaagcgtggcccgcgcaatcggcgctgcggtcacgccttgttaacccaccggcggctttgcttagggcctttcggctccgcgcgaccatccgatacacggcgtaaagaaatcgtttttagttatgtgttgaattattgtgcgcatcgttcgagacattgcccgaatcagcgcttggcctaccctatcagcggcctgaacgcgacatgccgggcggcgaaactacgttggcagctcagtcggaaggcatcaatcgcccccctcctacgattccgccaagaattcccgtgcatatgaggggctcgcagcccttatgcgcctgcagctgacgtcctgccagaacgattcccgtgcatacaaaagcccacggaacaagatatctgccgccgctccggccgacccagccaaacgcttcccgcgtatacgaaaggcccgcagcaggagttgctcactgctgcggacctttgcctatctgacacggcgttcaacggttaccgctcaacgccgtgtgacgcgctgaaccagctttaccacaggccgaacgggtcggagaagccgccgccatcaccggtgccgccatcgttgttgccgttgccattgccgtaaccattccggccgttgccgttctggttgttctgcttattctggctgttaccgttggaatcggagctggacgaaccgttcaccgacgactcctcctgatcgagcgtgacgtcgacgtccatggtcttaccgtcgcgcacgatggtcagcgtcaccttgtctcccaaagccgcggcacgaacgtaacccagcagcgagtagttgttgttcaccgcgttgccgttgaaggccacgatggtgtcgccttccttcaggccggccttgtcggccgggccgccggagacgaccgcgctgccagtggcgctggacttggtgatggtcgcgccgccgcgagtcacgccgtcggcttcaaccgtgtcggacttgatgaccacgccgagggcaacgtgcttgaccttgccgtccttgatgatttcgtcggccacacgcttgacgaggttggacgggatggcgaagccgatgccgatcgaacccgcggagtcggatgaggtggcggtcgaggcgatggacgagttgatgccgatcacctggccggccgc

SEQ ID NO: 3192 - DNA, 27851 bp, Unknown
  R53_2m  MAG No. k141_3368
gcaggtattcccggcaaagggggcgagggcaacgatggacgactggcgagacatccgcgataaagacagcgcattccgtcaaggaacgctgcctatggcgggaacgtatgtcgttgcacccccagcgaacccggatgttgataaggtagacagtatgcctaccgatttgcttggacgtgaatacgaaaccttccccgcacccgaaccgctgcaacagcacggtccggcgcgtgtcattgccatgtgcaaccagaagggcggcgtaggtaagaccaccagctccatcaatatcgccggtgcgttggcccagtatggccgccgcgtgcttatcgtcgatttcgatccgcagggcgccgccactgtgggactgggcgtcaacgcgaataccgtggagaacacgatttacaccgcgctgttcgatatttccgtggacccacatgatgtggtgcagcacaccgcattcgagaacatcgatgtgattccggcgaacatcgatttgtccgccgccgaggtccaactggtcacagaagtgggccgggagcagatcctgaacagtgtgctgcgcaagctcaagtcggaatacgatctcatcatcgtcgactgccagccatcgctcggcctgctcaccgtgaacgcgcttgccgcagctgatggcgtgatcattcccgtggccgccgaattcttcgccttgcgtggcgtggccctacttatgcagtccatcgaaaaagtgcagtcccgcatcaatcccgcattggaagtggatggcgtgctcatcaccatgtacaccaagacactgcactgcgaagaggtctgccagcgcatttacgaggcgttcagcgaaaaggtgttccacacgttcatctcccgctccatcaaactgcccgattccacggttgccgccgcgcccgtggtggtttatgcccctgagcacaagacatcaaaggaataccgtgaggtggcacgtgagctcattgctcgcggcatcgtggcgtaacgattgtttcgataaacgatgaatgagacttccctttctcggctcccctctctgagggaagctggctcgcgtagcgagactgaggggagctccgcggaagccgaaatcagcacggaggaatccgccacttccggcttccgggtcaacctcgaggtctattccggtccgttcgatgccttgctcggcatgatcgccaacaacaaactcgagctgaccgaagtttccctctcctcgatcaccgaggaattcctgacatacgtgcgcgggctcgacttcacgaaaaacatggatgaggccagcgcctttctcgacatcgcctctattttggtcgaggccaaaagcgtggcgattctgcccggcggcgaagacaaccagtacgacgagcaaagtctcgaggcgctgcgcgaacgcgatttgctgttcgcccgactcctccaataccgcgcctacaagcaggccgccggtgatttccgggcgcgtatcgccgccaatgccggccgattcccgcatccggcggccatggacgagggcattgccgccatgttgcctgagctggtatggacgctgaccccgctcgaactcgcccaactggccgcccaggtcatcgccaacgcgcccgcctccgaagtatcgatccaccagctgcacgtgccgctggtcgatctgcgggcccaatcgctggtggtgcgcgaccggctgattgcagcactggaatccaagggcgaccagtcgatgtcgttcagcgaattgacccgggactgcacttctcgtattgaggtggtggctcggttcatggccgtgctcgtgttcttcaaacaaggtgtgctgcagtatcagcaagatggtccgtttgccgaactgcacctgaggtgggtatccggcgtagacgaaacgatgaacgacgtgaacatttccgaaggcgattttgcgtaaggacggcgactggtgactgaacggattgacgcaacgaatgcaaccgagcacatggcggatgccgaatcgacggctgaatccgcaaaggccgaggtgaggggagtggaggagacgcgccccgaatacgtggatttcacggtagacgattttcccggcgggctgcccgcatgtctggaagcgattctgatggtcgccgaccagccgcagaccgccaccgagctggcccgcattttggcattggaccgcaacacagtcgaagaggcattgcaagccctgcacgatgactatgagggcgatgaatcccgtggcatccgcccgcgcggcttcgaactacgccgcaccgctcgtggctggcagttcgccagtcgcgccgcgttcgagccggtcgtctcatcattcgtcaccgacggccagactgcgagactaagtcaggccgcactggaggcgcttgccatcgtggcctatcgccagcccgtcacccgagtccaagtggccgcgatccgcggtgtcaactccgatggcgtgattcgctcgctcacggtacgcggccttatcaaggaagacggcgtggaccccgaatcccgcgcagcccttttggtcacctccgaatccttcctcgaccaaatgggcctgaagagtctcgacgaactaccctccctagcgccgttcctcccgtccgtcgccgaaatgacacagtcgaaatcgggggatacggacgtgatttcgtagcgattggggcccgctacctgaccaatattcgtgcgctagaccatccaatatgtgatttatggtcattgtgactataagtagtgctatgctctcaatgcggggagaacaaccggtatggaaagaggcatggcatgggattcggcaatgtgtccgagcgccgcagcgcaccgccacaggtcggcgtgtcagtggtgattctggcactcggcccgaaaggcgataccggcaacagtgccgccgattccggcaacgccgcgaactcggcccattcccgtctctggttgcccttggtcaagcgcgtccgtcagccgttcctgggctgctgggcattgcccggcggcgacctgcgctccgaccggtcgttggaacagtccgcctacgcggccctcgaatcgaccacagacctgcacccgcgatacctcgaacagctgtacacctttggaggcccgacccggtctcatggcggattgcccatggtatccgtcgtgtactgggcgctcgtcggccagaccgaggccgcgggcttcgaggacggtgacaacgtacgatggttccccgaagacgaactgcccgagctggcgttcgaccatcgccagatcatcgactacgcgctgctccgcctgcgctccaaaatcgaatactccgacgtggccacccgactgctcggccccacgttcaccctgcgccaactgcacggcgtctatgaggcgattggcggcgaaaccctcgacttggcgaacttccgccgcaaaatgcttgcctcgggcgatcttgaagacaccggggagaaggtgcgcgaaggccgccaacgaccggccaccgtctaccgctacatccccaaacgacttgtcgagaacggtacgccccacgaatccgatggcgacgacatcgtggaactgtccagacaaggcgagcgtgaagacgctctcgacgcgctgatcccatccgcgcgcatctgatttttccctccgacccgcttcgggccggcatcacagacgtatataggaaaggaaccgctatgaccgcactatccactgcgccgtccgttgacgagatcatcgccaagctgggcgcgcaaagcacctgcgatgcaggactgacccaggacccatggcacttcgacaccaccacacccagctacggtcccggtgcctcgatgctcgatcgtctgcccgccaacgcgccgcgtcagcaggtgctgccggacgaataccgcaaggcctccgacgaggaactgcagcagcgcatcaccgacgccaagcagcgtcttggctccaaactgttgattctgggccacttctaccagcgtgacgagatcatcaagcacgccgatttcgtgggcgactccttccagctggccaagaacgccaccgaacgcccggacgccgaccacatcgtgttctgcggcgtgcacttcatggccgaaaccgccgacatcctctccacgcccgaacagagcgtgaccctgcccaacctgtccgcaggctgctcgatggccgatatggccaacatcgaccaggtccaggaatgctgggaccagctcggcgagatctgcggcacccagccggactccgatggcttgcagcagatcatcccggtcacctacatgaactcatccgccgcgctgaaggcgttctgcggacgcaacggcggcatcgtatgcacctcgtccaatgcgcacgccgtgctggaatgggcgttcgcccgcggcaagcgcgtgctgttcttcccggaccagcatctgggccgcaataccgcccgcgcgatgggcattccgctgagcgagatgccgctgtgggatccgttcaaggcacagggcggcgccgccgatccggccgactacgcccgcgccaagatgattctgtggaagggcttctgctccgtgcaccagcgtttcaccgtcgaacaggtcgaacgcgcccgcaaggcatacccgggcgtcaaggtgatcgtgcaccccgagtgctcgatgcaggtggtcgacgccgccgacggcactggctccaccgcgtacatcgtcaaggagatcgccaacgcacccgccggatccgccatcgccgtgggcaccgaaatcaacctggtgaaccgtctggccgcgcagtacccggacaagaccgtgttctgcctggaccccgtggtctgcccctgctccacgatgtaccgcatccacccggcttacctggcttgggctttggagaaccttgaagccggcaacgtggtcaatcgcatcaccgtggacgaagacaccgcccgcgaagccaaggtggcactggagcgcatgctgcgcgttcacccgtgacatgcttctagctccccctccctgaggggagctgtcaccgtaggtgactgagggggagcggatgacgcaaaaacagaggaaagcaacacaatgagcaacactgaaatcgtcgtcgtgggcgcaggcgtcgccggactgtccgcggcactggccgcggccggcaccggacacgacgtgaccgtggtaaccaaggccgaactggtggaatcgaacacctatcatgcgcagggcggcatcgctgcggccatcttctccgacgacgacccgaagctgcacgccgccgacaccatggccgcgggccacggcctgtgcgacccgaaggccgtggacatcctcacccgtgagggtgcggagcgcgtccgcgagttcgccgcggccggcgtccacttcgaccgcgacgcgcagggacacatgctgcgcggcctggaagcggctcattcgcgcgcccgcgtggtgcatgccgggggagacgccaccggcaaagtgctcgaactggacgtctccgccatggtgcgcaagaacccgcgcatccacatcatcgagaacgcattcctcaaagacctcatcgtgcgggacggccacatcgccggcgtccgcctgctgatcgacgggcaggacaaggatctgtccgccgaccgggtgatcttggccgccggtggagcaggccgtatgtacccgtacaccaccaatccgccggtcgccaccgcggacggcctcgccgccgcatggcgtgccggtgcccaggtcgccgatctggagttctaccagttccatcccaccgccatggccgtgggcgagcacttcctcgtctccgaagccgtgcgcggcgaaggcgcggtgctgctggacgaacacggccaccggtacatgaaggacatcgatccgcgcgccgaactcgcaccgcgcgacgtcgtggcccgcgagaacttccgcgtgatgcaggcgcaaggcggcaagcccgtgatgctcgacgtctcgccgatgacccgcgagaaccccgacctggccagcttcctggcccaccgattcccgaccatcgacgcctatacgcgttcgcttggcttcgactggagcaaggagccgatcccggtggcgcccgccgcgcactactacatgggaggcattcgcaccgatctgaacgcccggacctccatccccggcctgtacgcggccggcgaatgcgcccgcaccggtgtcatgggctccaaccgccttgcctccaactcgctgctcgaaggacttgtctacggacgccgcgccggtcttgccgccgtcgcggacggtgacgacgcggtctgggcacccgaaccgttcctgaactccgccaccggtgccgtgttcgaccatgcgccgatcgcgttggccgctcctgccgctacggctgctgctgacgataccgccgccgacaaggtgtgggaccgtacccgcatccagaacaccatgtggcatggcgtcggcgtactgcgcgacgaggccggactgaaaaccgccatcgccgaactcggccaaggcctcgccgccgcaaacgcccaggctgatataaacgccgatggcgctgcaagtagcgttgaggctttggagaaccgcaacatgctcaccgtaggctatgtggccgccaccgccgcgctcgcccgcaccgagtcgagaggcgcccacgcccgcaccgactacagcgagccagtcgacaactgggcccactccgtcgcctacatcaaggactgacccatgctcacatcacacatcatccgcaccgccgtcgaagcggcgctcgccgaagacgcgccctacggcgacatcacctgcgagaccaccatccccgcggacgaaaccggctcggcccacctcaccgcgcgcgaaaacggtgtgatgagcggcatcgacgtgttcgccgcagccttcgccgcacagaacccggccgtcaccgtcaccgtcaccatcaaggacggcgaacgattccagcgcggccagatactcgccaccgtggaaggcccggtacgcgacctgctcaccgccgagcgcatcgccctcaacttcacccagcgcatgagcggcatcgccaccatgaccgccgccttcgtggacgcggtgaacgccatctacggcgacgactatgacggacccgtcacccggccacgccgctacgagcgcacccgcatcgtcgatacgcgcaaaaccacgcccggcctgcgcccgttcgagaaatacgccgtggtctgtggcggtggccacaaccatcgctacggactgtccgacgcggtcatgatgaaggacaaccatctggcggcgctcgccgcgcgcggcatcgacctggccggcgcgatccgccacgtgcgcgaacaggtgggccacaccacgtatatcgaagtggaagtcgaccgccttgaccagattcccgccgtgctcgccggcggagcggacaccatcatgctggacaatttctcgctcgacgacacccgtcgcggcgtggagctcatcgacggcaaggccatcgtggaagccagcggcaacatgagcctggagcgagtgccagccgtggccgccaccggcgtggacgtgatctccgtgggtgcgctcacccactccgtgcgtagcatcgacctcggattggattggaactagtcatggccgatacccccaacacgtccagcgaagccggcgaactgtacctggacgccgccgccaccgaaccagtgagcccggcagtcatcgaggccatgaccccgttcctgactgaggcctacgccaatccggccagtgtgcaccagcctggcaaaaccgcggcccgcgcgctggacgcggctcgcgcatcatttgccgcggcattgggcgcccggccggatgacgtgatcttcacctcaggcggcaccgaatcggacaatctggccatcaaaggcattgccatggcccgcatgcgcaagctgggcctgcggccggtctacggactcgacgaaaccgatggcaagcagctggcaagcagccgcccgcgcattatcatttccgctatcgagcacccggccgtggcccaatcggcggcatggctgcacgaatggttcggtttcgaagtcgtgcgtattcccgtggatgcgcaagcacatctcgatctcgacgcacttgaacgcgagctcgacggcgaggccagcgaacgtaccacgatggtctccactatgctggccaacaacgaggtcggcaccgtggaacccgtggaggaactggtccgcatcgcccacgcgcacggcgtgcccatccatgtggacgccgtacaggccgccggccagattccgattcgttttcgtgactgggatgtggacgctctgtccgtatccggacacaaattcggcacacccaaaggtctgggcgcactgctggtacgcggccgcacgcccatcgaaccggtgctgtccggcggcgggcaggaacgcggcctgcgctccggcacacagaacgtggccggtgccgtggcgctcgccatcggactcaatgaatcgaatgcgcgcatgcaggcgcagtaccgtgaattggtcgcgtcccgagacatgctcatcgatgcggttcgccgggtcgtgccccgcgccgacctgaccggtgaccccgtgcgccgtctgcccggtcacgcctccttcgtctttcccggcgtcaccggtgaggcgctgctggtcgatctggacgcgcgcggcatcgccgcctcctccggttcggcctgcgccatcgggcgccacgagattcctgccacgttgctggcgatgggcctcgaaccgtccatcgccaaatcggcattgcgcatgaccttccgcaagccgctgacccgcgaacaagtcgaacgcatcagcttggccatcgaagagtcctacaccgacctgacccgacactaaatctgacgccacttaccagaaaggaaacgccgtgagcaccaccacttcagcgcaacccgcgcagctcacccgcaacgagcgcctcgaccgactgccgttcaacaaggcgcaccgtaaactcctcgtcgcctccggcatcggctgggcattcgacgccatggacgtcggcctcgtttccttcgtggtcgccgccatcgcagccgacccgcacttcaacctcaccccgaccgaaaagtcgtgggtgctgtccatcggcttcgtcggcatggccatcggcgcggcggtgggcggcttcatcgccgaccgcgtgggccgcaaaaccgtgttcaccgccacgctgatcatcttcggcatcgccaacggcgccatggcgctgtcctggtcgctcggcatgctgctcggcgcccgactgatcatcggactgggcttgggcgcggaactaccggtcgcctccacgctggtctccgagttttcgccggccaaacagcgcggccgcatgaccgtgctgctggaatcgttctgggccgtcggctggatcatcgccgccataatcggctacttcgtgatcccgaacaccggtgactggggctggcgctgggcgctggccatcggcgcgctgccactgctctacgcgattgtcacccgtgtacacatcccagaatccgtgcgattcctcgaagccaagggtcgcgaagacgaagccgaaaaggccgtgcgctacttcgaggaagccgggggagtggccccggtaacctctcccaagggcaagccgctgccgaagatcaagacgcgcgagctgttcggctccaagtacctggcccgcaccatcgccatctgggccacgtggttcttcgtgaacttctcctactacggcgcgttcacatggatgccgtcgctgctcgccgaccagttcggctccctgaccaagtcattcggctacacgctcgccatctccatcgcccagctgcccggttacttcctggccgcctggctggtggaggtctggggccgccgcaagacgctgagcatcttcctggccgtctccgccgtggccgccttcgcgttttcgcaggccggatcagcggccctcgtgctcgtgttcggcatgctgctgtccgcctccaacctcggtgcgtggggcgtgttgtacgccgtgaccccggaaatctacccgacccgcctgcgtggcgcggccgccggtgccgccgccgcggtgggccgcatcgccgccatcatcgcgccgctcctcatgccgtggttcctgaccctgtccggcggcaacaaggccgtggccttcatcatcttcgccgccgccttcatcctcgcctgcatagcagccctctgcttgcccgagcgcaaaggcctcaatctcgaagactgattacacttcagccttcgctactaaagtggcccacaccaatgtgtgggccactttttgtcttatagctcccgaatgacacggcaagggttgccgtatgtcactgatcaatcgagggaacgacgggtgagattgcgcggtggttttgtgaccagccacgccaccagcagtccggttaccactacgccgaatgccagcgccgcctgcaatccccagatcggcacggtttccagccaatgaccgtccacaccgatcctgcggttccatgccacatgcagccatcccaacgccacgccggataccacgcccactggcgcgccggccagcagaatcaccgcagcctgcgtcaggccgtaacgtctgaggaatcggggtggcgcgcccacggcgaccatcgtggccatgtcgcgctgggcctgcgtgcgggccagcagcagtgaaacgagcgtggccatcagtgccagcaatgccaacaggccaatgggcaccaatgccatattgtcaccccacggcaggcgattcccgtcagtgctcgtggatgccagcggcagattttcgattgcataagctgaggccttctttacggtaacgggggagttgccaccggcgaagtctagatactcacccagatactgcaattgtttgatgccgagcgcctgtgctgttgccgggctcatcaccagcgggtacgcgccgcgcacgtagatggccttgcgcttctcgatatgtgtggcctgagattcgtttgcaattgccggattcggcgaaatggccacacgcaccatacctcccgcgtcgattgtgccggcatcgccgaccaccacaccgcccgcatcaagcacctgtgccgcctcatccgcgttcgggaagccggacaaacgcatcgcattgccatccataatgagattcacgccgcggaaactcggcagtatattcgaatacgttggctgatgggatcggtctatcggcacacaacgtatcggaacgtttggatacagggccgaagcggcatcctggcccacccatgtggacgtgtccggttgctcttggatcgttgggttatcacaagtgtgaccggccgggagcaatgcagcggcatacatgtagccgtgttcggcgttcaacttgtcggaatcgacttcggtcgtatcattgagctttgaccatcgcttgacatcctcggtgtacaccgggtaatgagcgcgtatcggcgtctctttgccaagccggtgtatcgcatccgacaccacagcacggtcgaactcattgctgacatgcacgtcggccccaatggccatccccgacggtccatacgtcatcgtcatcgtggaatttcgctggtccgccaccatggagccggtgattaccagtgtgtacgaggcgatgcacatggtaatcagcaccgcgcatgccgccggaacgaaccgtcgatgatgctcggctgcatccctgagtgccaggcgtgcgccgatgttcagttgggaacccgctttgccgcaccaccgtgcaaaagtgcgaatcgacaacgcaagccctatgacagccaacaaaatcgtggcaacaagcagagccatatgcgtttcggttccggccggaaccgcgcccggattgtgatcggccagcgtgggtaatggcaatgtcagactgagcgcggcgcatacgatggcggccaagaccagaatcggaccaaccgcaacacggagcagtctcaaaggattacggcgaagcttcgtatccacgccattcgcggattcaccgtagccgatttcctctcttgtcgggcgatccttcaacgcatcgactggatgcatacgcgccacatgccgagccggcgcaatcgtcgcggcaaatccaatgatgattgccgtgacaatacccatcggcagcgagccccacgagaatccgtgcaggatctccagcggcgtggatccacgcaatgcgcctatcgcagggccggccgccaaggtaagcgcgaatcccaatgccgagcccagcacgccaccgatggcgccgataacgagaccttgcgaggaaatgattcgactgaggtcacgtggtgcagcaccggatgcggccgcgagcccaagcacacgacgtgactgatctgccgacaccgtaaacgcgggcgtgaccagaaacagtaccagcaacatacccaccagcatggtgatgaccacagtgaccatgtggttcaacatggtagccgcatcgatctgcatcgggtagagctgcgatgcgggcggatagccgtcagtcagcacatggcgggaaatgacgatggcctgcaacaggttcatgctgcgggtgtgcgcccacgtgaccggctctggaccgaccaccaaataatggccatccacgccgacgccatcagattccaatatggctgacatccagccttccaagccccatgccgcggcttcggattcatcggtcagcccgctgactgtccaagcacgctgagtgtcggccaccgcctcgccgatgcgcccgtccaggctcatccagccatcgaacggcggagcgacgaacgtcaccgtgctaccgagagaagcgccgagattatccgccaatgtgcggctgatgacaatctgcgtattattctgcggcgccgaacccttgaccagcttcggcaacattcgttgcaatgcctcaggtgaagcctcggtcatggtcgcggtggaggccgcgttcagatcaatgtcgttcccgcttttcacgtcgatcccagccttggtctgttcgccgggttgcaacgcggttccggtgatggcgatgagttcgggcgactgccaatacgggagcagccgatcctgttgcggcagaatcttcgcaagctcggcggccgaggccggctgctgggagggatcgtcctgccacgtgccgccgctttcgggtgactgccggaacggttggccggtgcggggcctggcggtggcggtgatgatcgcctgcgtatcagccgggattgtcgccagcgcacgcgatctggtgggcggtatggtggtggtcataccgatggaggccaccattgcggcgattggcagcattaccagcagcaaggacagtagggtgcgggccttgtgccgtagtgcgtcgcgccagccgagtcgcagcgcggcccgataccggttgcaacgtgcgccaaggcttggcctagcggcatggggaatttgggcagagcgaccgacggtggcattggcaagattattgagggctgcgcgtgccatcatgctcccctttcctcaaggttgagcaaatcatccatattgctggagccggtttcatcgatgatacggccgtccttcaaaaacaccgtgcggtcggcccaggcggcgaagcgaggctcatgagtgaccagcagtacggccgcgccgcgatctgcgcgggtgcgcaacacttcgagaatcgtcatgccggcattggaatccagagctccggtcggctcgtcggccagtagtagacggcgtgggccgaccagtgcgcgggcaatcgccacacgttgcgcctggccgccggacatgtcttcaggtcggcgatcagccatatcggctactcccacttcattgagggattgcatcgcggcctcacgtgccttgcggggattccagccatccaattccaaggggaacgacacgttctcggctgcgctcagggaaggcagcagattgaaatcctgaaacacgtaacctatcgatttgcggcggatggccgcgcgttcggccactgacagtgtggccagatcgcggccttcgaccagcacgtgcccctgcgtgggcacatcgagcccgcccgcaagattgagcaaagtggatttgccggaaccactggggcccatgatggccacgaattcacccgggcgaagcgtgagattggcgtgactgagcgcggtgacacgacgtgcatctttgccgtgaacgcgagtgacgtcgtgtaattccagcgcgcatggggaggattgcgggagagaagaaagaacgggagaagtcatgatgtgctcctatgcactattgaatggtggcggtgagtgcggctgagcttgccgtgagaggtgccgaaacggggtgctgcgccagttgtgctcgcagctgggtctcatccacggtatcgagccagcgcaattccgcttcagtgatgaaaatgtggtggtcgagtactagacgtgtggcgagttcggtgggcggtgtttgccggcgcagtcgggtgatgtcgtgcagcagttgctgcaaagcgtggcgttggtgttggatgagttcggaaacatcgaggccgggtatttccacggcgacggccagcttcatcaccagttcgtcgcgtccgcgttgttccggggtaatgggggagcgccaccatcggtcaagctcttgggcgccggaattggtcaatcgccataatggtgcggccgctgcggtgccgacatcattggatccgctagtagtcggcgcggtctcttcaatcagtccgtcgcggttcaaccgctgcagcgtagtggaaacttgccccatattgagcggccaagtcagaccgatggtgcggtcgaagtccttcttaagctgataggcgctggccgggcctcgctccaacagtgctaatagcgcttctctgattgccataccgcatcccctttgcatagacggtttgccttgggcgaaggttactgagtaactatcgttggatatcaggttactcagtaactacccatgacggtgctgtactcagggatgattcaggggagattcaggggatacacttggcgcccctcagttgcccacggcgacagctcccctcagggaggggagtcgagagtgtggaatacaaaaagtctcgcaagccagatgacatgtgactaattctcagaaagccgggcccgttgtgtgtcaaggtgtgccattaacatcgtgacggtttgtgtgtaggtacaggttgatatccaagagcaagtactcgagaacgcaagtaccgaacgattacgcaagaaaatcagtattaagagaggtttcgatggcggttcgtggagatatccgtaatgtggcgattgtggctcacgtcgatcacggcaagaccaccctggtcaatgccatgcttcagcagtcgcacgtgttttccgagcgtgaggaagtgccggatcgtgtaatggattccaacgatctggaacgcgagaagggtatcaccatcctcgccaagaacacggccgtggaatacaccggtccgctggccgccaagtacggccacccggagggcatcaccctcaacatcatcgatacccccggccacgccgacttcggcggcgaggtcgagcgcggcatctccatggtcgacggcgtcgtgctgctcgtggacgcctccgaaggcccgctgccgcagacccgattcgtgctgcgcaaggccctggaggccaagctgccggtcatcctgtgcgtgaacaaggtcgaccgccccgacgcccgtatcgaagaggtcgtcggcgaaacctccgacctgctgctcggcctggccgacgacgtgcagcacgagggcatcgacctgaacctcgaccagctgctggagatgccggtcatctactgcgccgccaaggccggctacgcctccgtgaaccagcccgccgacggtggcctgccggacaacgacaacctcgagccgctgttcgaggccatcatctccaccatcccggcccccgaatacgaggaaggcgccccgctgcaggctcacgtggccaacatcgactcctccgacttcctcggccgactcggtttggtccgtatctacaacggcacccttgagaagggcaagacctacggcctgtcccgtgtggacggctccctcgagaacttccgcgtctccgaactgctgcgcacgcagggcctcgagcgcaccccggtcgagtccgcgggccccggcgacatcgtggccgtcgccggcgtcaacgacatcatgatcggcgagaccatcgtcgaccccaacgacccgaagccgctgccgctcatccacgtggacgatccggccatctccatgaccttcggcaccaacgactccccgctggccggcaccgagggcaaggaccacaagctcaccgcccgcatgatcaaggatcgtctggaccgcgagctcatcggtaacgtgtccatcaaggtgctgcccaccgaccgccccgacgcttgggaggtccagggccgtggcgagctggcgctggccgtgctcgccgagcagatgcgccgcgaaggctacgagctgaccgtcggccgcccgcaggtggtcaccaagaagatcgacggtgtggtcaacgagccgatggaaaataccaccatcgacgtgccggaagagtacatgggtactgtcacccagctcatggccgaccgtaagggccgtatggacggcatgaccaaccacggctccggctgggttcgtctgcagttcaccgtgccgtcccgtggtctgatcggcttccgcactgctctgctgtccgccactcgcggcaccggcatttcctcctccatctccgctggctatgctccgtgggctggtgccatcaccattcgtcagaacggttccatggtttccgatcgtcagggtgtggccactccgtatgccatgcagcgtctgcaggcccgtggcaacttcttcgtcgaaccgcagtccccggtgtacgagggtcaggtcgtgggcgtgaacaacaagcccgacgagctggatgtgaacatcacgctggccaagcacatgaccaacatgcgttcctccaccgctgacgtgctcgaaaccctgaccccgccgatcaagatgagccttgaggagtccctggacttcgccaacgaggacgagtgcgtggaagtcaccccggagtccatccgcgtgcgcaagatcatcctcggccgtgaggactggtacaagtggcgcgccaagcagcgccgccagaacgccgcccagcagggtaagtgatctggtgcgactgtagccgaccattctctctggctcccctctctgaggggagccaagtttattcctcgccaagtcatatccccacctatactgaaacgcatgactgtgaagagcactactgaactgcgtccgtggtcgtatcgccagaacgcgctggtcaaatcgttgatcacgattgcggcgggcgtggcttccgcctttgtgggcacgttcgcccaccgtatgggtgcagaactgagcattccgtatggtctggcgctggcatttctgctgatcggcctatcgacatggtgcgcccgttcgcgcatgggcgcggtcggactggccctgcacctcatcgcctcctcgctgaccgcatggggcatggcactgaccaccacatccggcaaggcggtcatcgtcgccggattccaaggcgacatgccgttcttctcccagcatgccggctacatctggctgtacggcctgatactggtccaagtcgtcctgctcattcttcccgcccgctggttcgttattcccactcattctgaatcgcgcgcgtaactatatatggcggcacatttccgcgaatgcgtcgcgtatcggcgggcgtaggggattacggccgctaccatagaaccttatggcacgcatgaaactgttttacttgggcccggaaggcaccttcacccatcaggcggcaatgacggccgccgaccagttcgccacactcggcgacttcgacctcaccgccctgcccgacgtgcccgcgatcatgcaggccgtacagtcgcgccaaggctggggcgtcatcgcatgggaaaacaacgtcgaaggctatgtggtcccgaatctcgatgcgctgatcgacgcccccgacgcggccggcttcgcccggatcagtgtggacgtggccttcaacgccttcaccgtgcgcggccacagcatctgcgactgcaccggcaaccccgtcagcgcccacccgcacggcctggcccaatgcacccggttcatcgccgaacaccatttgcagcccgaacccgcatcctccaacgccgccgcctgccgcgacctgaagcccggccgcgtggcgctcggccccagcatctgcggcgaactctacgatctcgacaccctcgccgaacatgtgcaggatttcgatggcgcgcacaccgaattccttgtcatcgccccgcgtgatgtggtccaggaattcaacgcccgcgcccaccgcaatgacgccggcgacttcgaaaccatcatcaccttcatcccgctggtcaccggccccggcgtgctcgccgacctgctggacgtcctgcgtgatgcggggctgaacatgaccagcttcatctcgcgcccgatcaaaggccacgacggaacctacagcttcatcgccacccttgacgccgccccctgggagccaagattccgcaccgcactggaagagatcgccggacacggcgactgggcaaaaaccctggccgtctacccacgccgcgaacgcccgaacccgccggtcgacgcctggatgctgcccgagggcggcgtccacatcaccaatcgcgcgtcggaaggctggcagtacgccgagggagcaaggaaggaactgctgtggtagacacagtcggaatcgtcggactcggattgattggcggctcgctcgcacgccgcctgaccgagcgcggcgtacgcgtcatcgcgtggaaccatcgctcgcacccctacgcccaggccgaagccgatggcattttctgcaagagcacgctctccgaactcatggatgccgagccggatgtggtcgtgctgtgcaatccgctcaaggcgatgccctcaatcctcgccgccctagccccgcttatgggcgaccatccgaacaccacgctcaccgacgtgggctcagtcaagggcatggtccgcgatcaggtcaaggctgccgcgctggggaagtgctatgtcggcgcccatccgatggccggcaacgaactgtccggctggcaggccgccgacccgcatctgtacgacggtgccctatgggccatcaccgtggacgagtccacggactaccgccgcttcctcgacgtcgccacgatgatcaccaaggacgtcggcaaccgcgtcatcgtcgtggacgacgaaacgcatgacaaggccgcggcgatgatctcccacatgccgcatgtggtgtccaccgcgctgatcaacgaactggtcgccaacccggaccgcaacatcgccgccgcgctggctgccggctgctggagggacatgacccgcgtgtccctgaccgacccggaccgcacgcgcgcgatggtcgaggaagactcgctgaacgtcgaagtgctgctgcgccgcatggcggcacgtctgaccgatatggccgaccaactgcacgctggtgccgacggcgagcaggatgtgatgggattcttcgccgaaggcgaccccttccgccggtacaaggccgccgtgacgcgagccggcatcaccgctgcacaagctggtacggccaccgcgcagcaagccggcacaactgccgccggattcccggaacgcgagctcgccgtccccgaagccggctggcagcagaccttgctgttctccgcacgccggggagaagccatcaccggtttcatccatccgcgtcaggccatcgtccaactgcgccccgccatgtaactgcgccccgccatgcagcccgtgtgcaggttcccctcgccgcccgtcacgaagaaggctgcgcgagggggatgaagttcccgcttgttttcgtgagaagaccgtgtggctccgctgttcgaaagacccaaaggagtaaggtagtctgtaccgtttttcaggaaacgcatagaagttgatgcggcggatggctaaggggatgatgacgtatgacgttaccaaggcagattccggccggtgcccgcgtggtggtgcgcatcaccgacggcattgacccggtcgaccaccgtatgaagttccgcgactatgtggggcatgtggtttcctgggatggatacacgttggagatggtgcgtgacgccgccgccaatggttcgcgcccggcccagaacgtgaccatccatcaggaacagattgccacattgaaacccgtgccggagcggcgtaacacgccaccccggccgtaacccaaggccataaagaattcggaggagaacgagagtgtcatctacgcagttcgacggcgatatcgactccttcgtctcctatctgaagtccaaccgcggcctgtcagcgaatacgctcaaagcgtatcgcgcggatctcacggcatgtctgcacctgttcgagctgcgcggcgtgaccgatctgaacgagatcacgctggatgatctgcgcagctggatggcggtggaatcgcgcgatcacgcccgcagcagcatggcccgcaaaaccgtggccgtgcgcgggttcttcgcgtgggcctagcatgggctgaccaccaccgacccggccgccacactgatgactccctcgattcccagcacgctgcccgcggtgctcaccgaatcccaggccgagcaattattggatgtcgctgaacatgccgttgcaacaaaccagtacaaggacgatgggggagcggcagccgcgtccggcagcggcaagacagctgataagtcggccgataccgtaaaccgcagtgaggcacccgcccgtgcagacaagcgcgacaacgcccgagtcaccgccgaatcgcagcgcaacgccgcgattctcgaactgctgtatgccaccggcatccgtgtcgccgaactggtgtcgatggatatcgccgacatcgacttttccaatcgcaccgtcagagtgaccggtaaaggcaacaagcaacgggtggttccgtttggattgcctgcggagcaggcattgcaggactggatcgattatggacggccagcgctggctcgtttggcgattgaaaaagccgtccccccgaacggtatttcttcagacgagggagccttgttcctcggtatgcgtggtaaacggctgaaccagcgtgtggcgcgtgaaatcgtgcataaggccgcacgtgaagcgggcgttccggacatcagcccgcatgccttgcgccattcggcagccacgcacatgttggatgggggagctgatttgagggaagtgcaggagatgcttgggcattcctccttgaaaaccacacaacgctatacgcacgtgtccatcgagcagctcaaaaaccgttacggtcaggcattcccccgagcatgaccactatgtggacgctggttaacaaacttagcaaaggctgaacatagccggtaaatggaccatgattttacataggcgtaacaaaaaagcaactggttgtctcccaagtgcgcaaaaatgtcaggcaatcagcaacgggttggattgttcgagacatcgtgagatgcaagtctcacgggtgacggggaatccagttccgttcgcctgaggcggggctgagacgtcctgcaacctaatgaataggagaaatcatatgaagaagaaagctcttgctttcgctgccatggcctgctccgtggccatgctgctgagcgcctgcggcggctccaacagcaacgctgcctccggtaacaccgctggctccaacatcatcactgcgtacaactccgaaccgcagaacccgctgatcccgggcaacgccaacgaaaccggcggcggcaagccggtcgacctgctgttctcccgtctggtctccttcgacaaggacggcaaggcttccaacgaagtggccgagtccatcaccccgaacgatgacgccacccagtacaccatcaagatcaagtctggctggaagttcaccgacggcactccggtgaccgctgagtccttcaccaaggcctggtcctacgtggccaacgccaagaacgcccagaagtgctcctccttcttctccaccatcgccggctatgacgatctgcagaaggatggcctcaagggtgacgagcagctctccggcctcaaggtcgtggacgacaccaccttcaccgtcgacttgaaccagtccgactccgtgttcccgattaagctcggctactcggccttcgccccgctgcccgagtccttctacaaggacccgaaggccttcggccagaagccgatcggcaacggcccgtacaagctggaccactgggatcacaacaaggaaatcgccctcgtcaagaaccctgactacaagggtaacgagcagcccaagaacgacggcgtgaccttcaaggtctacaccgacgactccgccgcttaccgtgacattcaggccggcaacctcgacgtgatggaatccgtcccggccgccttcaccaagaccttcaagaccgacaagaaggtccaggcttactccgaggtcggctccgtcatccagaccttcaccatcccgtcctcccttgatcacttcaagaacgacgaggaaggtcagctgcgtcgtcaggccatctccatggccatcaaccgtgaccagctcatcgacaaggtgctcaacggcaacgccgccgccgccaccgagttcacctccccgaagaccccgggctactccgactccctcaagggtgccgacaacctgaagttcaacgcctccaaggccaaggaactgtgggccaaggctgacgccatctccaagtacgacggccagctcaccttctcctacaacgccgatggtggtgccaagccgctttacgacgccgtcgtgaaccagctcaagaacaacttgggcatcgacgcggccaccaacccgatcccgaccttccaggagttccgtgacgccgtcaccaaccgtcagatgaagggcgccttccgtaccggctggcagcctgactacccgtccgccgagaactacctgtggcagctgtactccaccgctgctgctgacggcaacggctccaacgacggtgactacaagaacccggccttcgacgacatgtgcaagcaggccgccgccgcttccagcaccgatgacgccaacaagctgtaccagcaggctgaggaaatcctcctcaacgaccttccggccatcccgctgtactactccaacgcctccggcgcggcttccctcagcgtgaagtccggctacgccttcgattggcagaacctcccgacctacaccgagatgtccaagaagtgagtctgactcactgaacggataccgttaggcagttcggaaataaagggcgaggatcgcaagatccccgccctttttgttgtgtgaggggtgcttgctcacgccatcgggaaccaagttaaagtatccactatccgaccgcaaccatggacatatccaccagcattgcccaatctcaaaccttgcgttaacgcaaatttacatatcacagtccgggcatgcggtaaactgtcggagtatttatcgaccggcgggggcgtactataccctttctggccggtctaggaaataaggagcaaccgtatgggtaagtatcttctgcgacgcattctgcagatgattcccgtggttctcggtacgactcttctggtatatgcccttgtattcgccctgccgggcgaccccgtcaaggccatgttcggagacaagcctgtcaatgaggccgtcgcagcccagatccgcgcagaataccatctcgaccagccgttcatcgttcagtacttcatctacctgaagaatgcactgaccctgaacttcggcgataccttcgccggccagcccgttctcgacgaaatcacccgcgccttcccggtcaccatcaggctcggcttgatggcgttcgtgttcgaggcgattttcggtgtggtcttcggcattatctcgggcctcaagaagggcaagtggtacgacaccgttatcctgatcgtctccctgctgcttatttccgtgccgaccttcgtcaccggcttcgtcatgcaatatgtctttggtattcagtgggcgatattgccggtgacggcaggcgccgaccccggcttccttgatctgctcatgccggccatggtgctcggttcggtgtcgatggcctatatcatccgactgacccgctccgaaatctcctccaacatcgccgaggattacgtgcgcaccgcacgtgccaaaggtatgtcgaacggtcaggtcatgctgcgccacgtactgcgcaactccctgattccagtcgtcacttacctcggccaggacatcggcgccctgatgggtggtgccatgatcaccgagcagatcttcaacatccacggcatcggcttcctcacctaccagtccattctgaagggcgaggcaaacctggtggtgtccatcgtcacgttgctcatgctgattttcgtagtgtgcaacctcgttgtcgacatgctgtacgcggccctcgatccgcgtatccgttacgcgtgatagggaggagtgagtcacatggcaaacgaaaccactgaaaacgagctcaaccagaccggcgagccaggaaccgaatacttcatggaaaccctgcccggtcaggaccgttacgtagctcctctcgacgagaccccgttgcaggacgtcgattccgtcgacgaatccgcaccggccaccagcatgtgggccgacgcatggcgaaccctgcgccgcaacccgctgttcatcatttccggcttgctgatcctgttcatcatcgtggtggccatcgcccccggtctgttcaccaagcaggatccgaacgcctgcgatctgggcaactccttgagccccgcctccgccggacaccccttcggctacgacctgcagggctgcgacgtgtacacccgcgtggtctacggcacccgtacctcactgtccgtcggcgtgctctccacgctgctggtcgtgattgtcggtaccctgatcggtgccgtcgccggcttcttcggcggttgggtcgacgcggtgctgagccgtatcaccgatatcttcttcgcgctgcctatgctgcttggcgccatcgtggtgcttcagatgttcaagacctccaagtccatctggaagatcgtgctggtgctgacgctcttcggctgggtcggcgtatgccgtatcgcccgaagcgccgtgctggaatcgaagaacctcgaattcaacaccgcttccacggccctcggctccacgcctgccagaaacctgttccgtcacatcctgccgaactccctggccccgatcatcgtcatcgccaccacctcgctggcctcctacatcgtggccgaagccacgctgagcttcctcggcgtcggcctgcccaccaccacggtgagctggggcggcgacatctccagcgcgcagaccaacctgcagaccgatccgatggtgctgttctacccgtccgccgcactggccatcaccgtgctcgcgttcatcatgatgggcgacgccgtcaaggacgccctcgatccgaagagccgtacggcctgagcgaggggagtggagaatcattatgactgacaacaccaacgccaagatgctggctatgcagaaagagcatggtccgctgctcgaggtcaaggatctggccatcgacttcaccactgacaccggcaagccggtgcatgcggtgcgcgatgccaacttcaccgtctaccccggccagtgggtggccatcgtgggcgaatccggctccggcaagtccacctccgccatggctgtgctgggcctgctgcccggcaccggtcacgtggtcaacggttccatcaagcttgacggcgaggaaatcgccggcgccaagcagagcgagttcgacaagctgcgcggtaccaagatgggtctcgtgcctcaggacccgatgagcaacctcaacccggtgtggcgtatcggctcccaggtcaaggaggcgctgaaggccaacaacatggacgtggcccacgagaagcgctccgccctcgccaaggctctggccggcgacgaggtcgaagtcaagggcaacgacgacgagaccttcctcggcaccaaggaactgcccgagctcatgaccgaggccaagaaggccctgaccgaagccggcgtgtccggcgaggccttcgacaaggccgtcgcccgcttcaccaacgaatgggttccgggctccgaaacccgttggcgcgtggccgacgacctcatcaaggccggtgtggccgatgatcaggcctggtacctcgccaagaagtacgtcatcggctccacaatggatgaccgcatcgcgggtctgctgtccgaggccggactgcccgatgcggccacgcgcgcccgtcagttcccgcacgagttctccggtggtatgcgccagcgtgcactcatcgccatcggtctggcttgccgccctgacctgctgatcgccgacgagccgacctccgctctggacgtgaccgtgcagaagcgcatcctcgaccacctgcacatgctcaccgactcactgggcaccgccgtgctgttcatcacccacgatctgggccttgccgctgagcgtgcccagcacattgtcgtgatgtacaagggtcaggtcgtcgaatccggaccgtccctcgaggtgctgcagcacccgcagcacccgtacaccaagcgactcgtggccgccgccccgtcgctggcctcccagcgcatcatctccgccaaggagcgcggtgagaacgcggacgccctgctcgatcaccacatcgccggcgaaagcacgcttgagaaaagcgagcacatcatcaccgtcgaccacctgaccaaggaattcaagctgccccgcaagaaggagatgttcaaggccgtcgacgacgtgtccttctccgtcaagcgcggcaccaccctggccatcgtgggcgaatccggttccggcaagtccaccgtggcgaacatggtgcttcacctgctgaatcccacttccggcaaggtgttctacgaaggccgcgacacctccacgttcaaggccaaggatctgctcggtttccgccgccatgtgcagccggtgttccagaacccctacggttcgctcgacccgatgtactccatcttccgttccatcgaggagccgctgcgcatccacaagattggcgataagaagtcgcgtgccaatcgtgtcaaggaactgctggacatggtcgagatgccggcttccgtgatgggccgttacccgaacgagctttccggcggccagcgtcagcgcatcgccatcgcgcgagccatggccctggacccggacgtcatcgtgtgcgatgaggccgtctccgccttggacgtgctggtgcaggatcaggtgctgcgcctgctcaacgacctgcaggccgagaagggtctgagctacctgttcatcacccatgatctggccgtggtccgccagatcgccgacgaggttgtggtgatgcagcacggcaagctcgtggagcacgccaccaccgacgaggtcttcgaccacccgcagaagcagtacacccgagacctgctcgacgccatccccggcggcaagctccaactcggtctggactgataatctgcgtttgagcgcattgtattgggttctttccatccgtggaaagaacccaatattcgtatgtgcaggtttgcatgatggttcgcgtgggacgaaaggcaaaaattggtgttttcccgatgttgtcccacaatttgtgggacaacatcaacatcaatcgatggacatgagtgttgtcccacagcagatttctcacgaagcccggaattacgccattcttagtgtggtcgataattactcatgctgtggggcgtgggacgacccgcgaaaatcgtcgattttcggatgttgtcccacggacaatgtcata

SEQ ID NO: 3193 - DNA, 4834 bp, Unknown
  R53_2m  MAG No. k141_3446
ggccgactgcgaggatgttctgatgcctttgcctctttgggagggatatcgctaattggtgcggttgcacgccatccaaccggcgtgccaaacgtgggtgaggtcccatgggtcgagccgtgacgtgtcggattgtgggtcgatggcaggcaagaaatcacgattaccacgtaattggtagctccaataaatctgcccggcggatgcgctccacgctttgcgctgcatggcggcgacctcgcgatagacggcattcctcgctgaaggggttcggttcaccagattgttggccacacaccactcccccacgatcactggcgtatagcgcgctgctcggcggatacggcgttcattccagcgcacgaatagcctataacagctcatcatccatcgctccggaatcatacggaatagcggaaaatgctcggccatgaccagatagatatgcgtatcgagcatgacgccccgcatgtcctcccgcacaaaccagtcccgccaacggcccagtcggaagccgtcatggaacacgatggcttggttctcggccaaaatcgggcgcaaccggcgatacgactcacggtagaaacgcttgaggaacaccattggaatcggcccactcctccatgcttcaaagctatcctttgcctgcctgctcgatgacgacgtagcatacgtcaaccaatcgattggctcattcagcacctcgataccgaacagcgccgcgcgatcgcgataccggcgagccagacaggccagcacattcaacgcataggcgaccgctcgcgggctatgatgccagcgcaccacgccggtgaggccgccgttgtcgaatccattctgtgagccgggcaccgtgtgcaggtcgataagaatcttgagaccggtacgctcggcccagtcgaacgccctgtccaaatactcgatgcagcccggatgaccggacacatccccgaagataaaatacggcacaggaatacgcaccagattgcagccatgcgcggcaatgttccgaaaatcagcttcagtgatatacgtgtcgcgatgccgcgtcagcagagcctccaactcagcagactccgtagcacgatgcagccagatctcgtccgcttcgccgctggcggcaaaaatccccggcttcatccacttttccagcaccagccagttaccgaggttcaccccattaatttgctcgccaatgcccagcgcgcccagtgccattaatgccacccgcgctaatcgttcaatgcttcgccgtaacgaacgaccagcccctgattcacacgctcaaattcggggatgtaatcaacgatgatggcatccacaagccgccgggcgtgttcctcatcgtagatatgagcagaatcattgcgatcgcgcagcatacgcagccacaacgattcgtccatgaaatcgtaatattggaaagcggttttgagcacatctcgcggagaaccggaagcggaaacagggtctccctcataagccagcagcgccttgaacagtttccgaccaagctcaaactgcaactcgaacttgtcaatgatgccgctctggatgaaatcattgctgagatcctgttcgggagccttgcgcagcgacttcagtgcggaagcgtaattctcatattttttcatacaatacctttccgctacgctcaatctccgccctcagcgatgaagaaatcggctcatccagattgatgacatcaactttaagcagcgaccacagattgtcctgaaggttctgctccaagcgattgaaatcggggcaaccggccacggcaagatcgatatcgcttttaggccggttcacgccctttgcgcgagaaccgaacagcacgaccttgcgagcgccggcatcagcggcaaacgcgcgaatctggtcgtacacgtgctcgataggaaccatgacacctcccaccgcatccaacagtcccggaccaatcccggaccacccgcgcttccatcatacggccgcggcccactcaccgcacggagcccgaaccacccgaacgcggcgacgtagttgcgggaggcgggctggcgctgtagggtgtgcgggaagttcctgacgtctacttttcaggaggtgaatcctcatgttcaccacgttttctctggccatcattctcgactgcaccgtacgcattgtgctcggcacggcattgggcgcgctgatagggctcgaacgccagttgcgcgcccgaagtgctcggcgtgcgctgggatgtggagcacatcaccacgtccgactgaaacgtccgactgacgctgaccagcaacacatcgcaacagtacaacaagccaacaagtgggatggggcatcgagcctcatcccactttgttattatccggcgattgtcagactcactcacgccacggtgaacgtggtgcgcttcaggtcctcacggcgcgaggagtggccgatgagcagttcgaattcgccgggctcgacgatgcggttggcgtccgggtccacgatcgtgcagttcgccaccgggatctcgaaggtgacggtcttggtctcgccgggttccagtgcgacgcgctggaacgccttcaattcgcggtcggtccagctgtaggaggtcacgatgtcgccgatgtaggcctgcacgatctccacgccggcgcgctcgccggtgttggtgagggtgatttcggcacgtacggtgtcggtttcggcgaatgtgccgtcggcgttgcttgcgccgcccgtaatggtcggttcgccgtatgcgaacgtcgtgtagctcaggccttcgccgaacgcgaacgccggatcctgggtgaggtcggcgtaccggtcgccgtgctggccgcgaatctggttgtagtagactggcagctggcccgcgtggcgcgggaaggtgatcggcagtcggcccgacgggctggtcaggcccaggattatttcggcgatggcctgaccgccgcgcatgcccgggttcggcgcccacaggatggagccggtgccggtttcagggtcgctgacgcgcttggcgaacacgccgtactcccccacgatggaggcgggcaacacctgcggcttggagctgatgagcacggtgaccatcggcttgccggtttcgcgcgagacggcggcgagcgcgtcgagcagggcgttctggccaccgagcagttcgagcgtggcggtggagcaggtttcgccgaccagctggaccacgtcgccgaccacggccacgatcagatcggactggcgggcgttggccacggcttcgtcgatcatcgcttgatcgacggcggcggaaacgccgattttcgggcgaggctggccgtccgggtagaactcgccggcagggtcaggcacgaggtcgatgacgttcgcgccgcgcgagtagaccacttcgcaatcgtcggaggtgagctgggtcaggccgtcgagcacggtggtaatcatgcctcgaggctggccatccggcatccaagagacctgaccggagttgccggtccagtcgccgagctggttctgggcgtcgtcggcaagcgggcctaccacagcgatgcgcttggccttgtttgcggcgaacggcagggcaccgtcgttgcgcagcagggcgacggattcgcgggcgagttccaggttggtctgctggtgttcggcggagccgatgaccgccttgatgcgttcggcatccggcaggcgcgggtcttcgaacaggccgaggcggaatttcagggccaggatgcgggctaccgcatcgtcaatcagggattcgtcgagcagaccggtttttacggcttcgatggctccctcatagaactgtggggtggtcatgaccaggtcgttgccggccttgaccgcatcggctgcggcgtgcacgtaatcgggcttgacatgctgttcccataccgagcggccgacgttgtcccagtcggtgatcagcgtgccattgtattgccatgcgccgcgcagcttgtcggtcagcagccatttgttgaacgtgaccggcacgccttcgatggactcgtagccgagcatgaacgtgccgcagccttccttggccacgcgttcgaacggcggcaggaaccaggattcgagcttgcggtgggagaggtcggcttcggaggcgtcacggccgccctgggtctcggagtaaccggcgaaatgcttggcgcaggccaggatcgcgttcttcggcagggcctcgccggccttggcgccgccttgatagcccttgaccatggcggaggcgagttcgccgatcagcatcgggtcttcgccgaaagtctcatccacacgcccccaacgggtatctcgggcgatgcacaacacaggagaaaacgtccaatgcacaccggtacaagagacctcttcggcggtggcgcggccagcggcttcgactttggcggcgtcccagctgacggccatgccgagctgggaggggaagatcgtggcgcccggccagaaggagtatccatggatgcagtcatctccgataatcaacgggatgcccagacgcgtcttctcattgacggtcttggcggcacgagataaatcctcggggctggtatgcagaatggatccgacatgcttattcacgatgagatcctcaagatcgccgccgcgggcgtcaagctgcatcatctggccgaccttctcctcaagtgtcatacgggagagcaagtcggcgattcgctcaccagcgggcaaatcaggattcttgtacggtaaggtttcagcagttgcggcaggcgtggtgttgtcggtcatacgaagtcgctttcctcagtgaaatcgaacagctctctaattaccaattggtagtttatctattgacagcatacaacacgcttatgccgcgcgcatcaca

SEQ ID NO: 3194 - DNA, 23788 bp, Unknown
  R53_2m  MAG No. k141_3449
gacgatgccggacgggtcgtacttcagccaagtgaccggcgtaatcgggaattcaatgaagctggtgaccatcgccagcgccacgaacagtgcatacatggcgatacggcgcgtggaccagcggccggaatcggccacaccagtggtgtgcgagccgagtttggcgctggtgctggcggtggacgcgctggccgaaccctcggcctcgggcgccacagaacgaacaacttgcatgcggatacgcgaagatacgctcataatgagccctcgtttcttccatccggactataccgttggctccggaatctcaccggatcagccgcttgcgcgggtcgcgggcttcccgccatccccgttatgaaacccggggtacaggttaccgccagtaaggaattgcaccttccctgaaactgacaggcttattcatacgccatgcgccggacgtacgcaacccgcgtttcactgtgcagaaattcgtcttgtgccggtcaagtgcaacaatgggagccatggctgaagtgaagaaacccaacaacaccatcgacaagcttgccctgatcgtcaccacctacaaacgtcagcagctgctcgaggtactgttcgattcgattctggcgcttgagcaggcaccgtggcgcattgtcatcgtggacaatgagcagtccgatcagacggcggacatggtcgctgcgtttgccggcaaggtgaccggccagtggggcaccaccgtggccgaccagtccggcaacgaagagcgcgtggtctatgcgccgcagaccgagaacctgggtggtgcgggcggtttctccgccggcgtggccaaggcgtatgatctgggcgccgcatggttctgggtgatggatgacgatgtggccgtgctgccggacgccattgccaagctgtccaagtggaccgacaagcacgaggtgattcagggatcccgattcgattacgatggcggcccgttctactggcagtacgacttcattgtgccgctgggcattccgaacccgatcgcgcccgccgcattcggcccggccgggtatcgagtgatggacacgctgtgcttcgaaggcggcctgttcaaccgccgtgtggtcacggaaatcggtctgccggacccgcgcttcttcatctactgggatgacacgatgtatggctaccgcgccagcaaggtcaccaacccgattgtggtgcccgacgtgattttgcgccgtacgcgcgaaatcggcaattgggatatcgccggcgtgcgccagctcaactccacgtccgacatgaaccggtatcacatcatgcgcaaccgcggatacatggcccggtacttcatgacctatggtgacttccgtccgctggtgtttggactgggtaccgtgctcaccgcggccaaggaagtcattcgcctggtgatggtggatcgcgagcacctcaagaccggtttggtgcagattgccaagggctggtgggactcgcgcaagctgatgcacgaccccacctggaagcccatgccgtcgctgaagtagccgtagtagtggctccctcatcagagggagcttatttacggtcacttatgaatgaacaggccaccgtcgccccaggcccactggccttggccggcaccgatctggaagtgcagcttggcgatgcccatgtcattgaacgcgtggtgcgcgtctcccgcactctggtcgatatgcgcggcggcggtatcgtcggccggattatacgagaaggtgatcggctgacggttcatcgcgcgcgacacagagtcaggccgccacagacgccgaattttcctagtatcgaaatcgcgcgcattgcccattggggggcttgaaaaacgatacggatagggtacgtagtgaccggcggcgatgcacacgtttgcacaattggtgtgtaatggtttcgtgttgagcacaattcgcgttagactgggcgcaaccctacgaactgatgaaaacgtatggaaaggaaggtcaacgatgattgaaactgcacaggctttcggtgttgacattggcggttccggcatcaaggccgcacctgtcgatctgaccaagggcgatttcgccgagccgcgattgaagattctcactcccgaggtctccacgcctcaggccgtggccaaaatcgtcaagcagcagctcgaccacttcgaagtgcctgaatccgcacccgttggcatcgccttccccgcgccgatcaagcccggccagaagctcgacttcatggccaacctcgaccagtcttggattggcgtggacgttactgaagtgttctccgaagcctgcggccgcccggtcgtcgtggtgaacgacgccgacgccgccggcctggccgaagtccagttcggtgccgccaagggccaggatggtctggtcatcgccaccacactgggcaccggcatcggcaccgccttgatctacaacggcgtgctcatcccgaacaccgaactcggacacatcatcctgagcgccaagcatctggacgccgagaagtatgcctcctccgcgattcgcgagaacgaggaactgggctacaagaagtgggccaagcgtctgaccaagtactacggccttatggaaaagtacttcaacccggacctgttcaccgtcggcggcggcgtgagccgtcagagcgaaaagttcctgccgtacgtggatatcaagaccccgattgtgcccgccaagctgcgtaaccaggctggcatcgtcggtgccgcctactacgccagcaccaagcagcagtgagctgagttatttctgctggcgcaggagccgtattgaccatatgtaaggccgtccaagtatttcgggcggccttttttaatgagtaattcgttcattaggtcgattatgtgttcattaggtcactcccattccaaacctgaattgcaatgggctcggaatggcggcgtttcaagcatcaacaattgtgaggctcgactagcagtgacctaatgagcgcgaaaatgacctaatgaatgtagctaggccgttattcgatgtggattgaagtcatagtatgtctgacgactccgctgccgtgccgcacgattgtcgtagtgctggatgctggtggatatgaggcctcgatatacctggctcggcaggggtggttttatcgtggagggtatgagcgtgcatttctcttctcgtgtggatatttctgcgccgaatcccattgcggcggccgaggcggcagccaaggcaaacggcatcgcactcagcaaactcaacgattccaatccgacccgccacgggttggcacccgaattggtgccgagcgtgtatacggccgacccgcgtggaccgcgtgcggcacgagaatcattggccgcattcctcaatacggcaaacgtggtagacgcaagcagccctcagttggcttcgcccgccgccggcgagggcaggaacgagcgccatgccgctttcaccaatgtgaataccgccatcgagggcgccgacccggacgccctgtacctgctgagctccacgtccgaggcgtattcgtggctgattaagttactttgcgatgccggcgacgcggtgctggcacccaaacccggctatccgctgattgagtcgattgcacggcttgaatgcgtcgatacggtcgaataccagttgcaattcgacggctcctggttcatcgacatcgccgaactcgagcggctactcagcgagcccggtggcgaacgcgtcagagcattggtactcatcaacccgaacaatccgaccggttcgtacgtaaaaccaaccgagcgtgcacgtatcgtgacattgtgccgtgagcacggcatcgcccttatcgccgatgaagtgttcttcgattactctctcgaacctttccccggcgacgcacggctcgcgggggagcgcggcgtgctcaccttcgccctagacggattctccaaaatgctggccgcgccgcacgccaaagtcgggtggattcaggtgtccggacctgccgaggacgttgccgaggcccagcgtcgactggacgtcatcgccgacgattatctgccgatgggcgacatcatcgccgaacggattcccgcattattgaacgccgcgcccgcacagaccagacgggtgggggagcgcgtgcgcaataacctggccaagttgcacgagttgcttgacgccgatcccaacgggctggtcagcgtgctacgggccgaaggcggctggaacgtgctgttacgagtgccttccgtcatcgatgagaacgaactggtgttgcggctgattgacgagcaccaactcaccggacagcccggctacttcttcgacatgacctccaatggatacctggccgtttccctgctgcccgaaccggacgaattcgagcgtggcatccgcgccgtgctcaataccgtcgccgctttgctgcgataggccggtgtttgccggcaccacacctgtactccacgtacaatggcggcatgggattcttgtttagaccgaaagaacttccacacccggcatcgctgacgttcactttggaacaggccgggcatacgtatgatgatgggcacgtgggacttgctcccacggacatcaccatcagcgagcggcgggtggccgtgatcggactgaacggcgcaggcaaatccacattgctgggtctgctggacggttcgttgaaggccaacgccggcacggtgaccattgcgggcggtgaggaacgtcttgacccggctgtgaagaaggacgcgaagcgcatcgataatctggtcggcaaagttcgccgcgaggagattccgaacagtttctaccaagcggcgaatatttccgaggctgtttccgaagcgttgaaaaagcacaaggtgcccgagtcagaacgtcatgcgcgcatcggcaatctgtttgcgcattttgatctggcgcaggtctccaaggccaaggccagcgaactggattccgagaaacggcacctgctggccattgcggccgcgctgagctttgagccgagtgcgattgtggcggatgagccgagcaagggattggatgagattggcaccgcgcatgtggccaaggcgttgttcagctacaacaagcaggtgattttcgccacgcatgacacggatatgatccgccggcccgaatacgccatcgaccgcgtactggtactggacgagcacgcggtcgtgtttgacggagcgccggctgaggctgtggcgttttatgaggatctgattcgccgccgatacgagactagagcatcgtgaaccaagactgaacctgatgccagagcgtcggattgttgtcgatcatcgcatcgctgcgcgactgcacgaagcagctcagtatggctatgcccagcgcccacaatacggccagcaccacgacccagcgcatcagccaacgccacggagtgacgcgggcgatgccatcgcctgaagcggcgtcgttggcccccgccaatgaccggctcggttcgcgcccattgaccagccacagtagccccggtatggacgccagcgagatcagccagccgaaatcggcggaataccgccatcccaaaccgccgacgcggctgtcgaatacgaccagcaccgccgccacggccaagcaagacatcagccatggccgcatgccgtgtgtttccaatctgcgcagcaggggcagcgccaaagccatcaaggtcagtggcgtggccgtgaaaatcgcgccgaccatcacctcgtaataaccccattgcggcatcggggcgggagagcccgccagccacgggaaacgatccatgaagcgcagcggcaggaacaggtaataccagatgttggcgggcatatccgcggacggggtggtataccgggtcatatcggatatggagaactgatacgcattgccgaaattgaacggggaatcgaaccgaaccatgttccacgccatcagaggcgtcacgacgagaatggcgggaatgattaccgccagcggcgcgcgcaacgcctgcaacggcttgatgcggcgtgtgcgcagaccggtgcccagcgcgcgaatctgcggccagaacagggggaacgcaagcaatgcggccaaggtgaacgtcggtcggcatccgaaattcgccgcaatgcacaaggcgcccaaggccagtcgtggcagggagagaggcttggcatcgcccgcctgccatcggtccgatggtctcagcggacggcgggacgtgtccgcgccgagccatagccatagtcccagcgacgtcaacgtcagcgatgcggcgaacggtatctgatagaagttcgtgcgatacagcaaataccccacttgcgcgctcaccaacgatgagaccactactaacgacgcggccgccaccgaagtcttcggcatcacacgatggatgacgcgcagcaccagcaaggagaagaagatgatgaacagcagcacgagaatatactcggcggcggatgtcggcagattatgaccggccagcagacgataggggacgaacagcagcactgcgggcaacacgccaaaataggaataccagtgaccgtcataatacgcgtaatcccagtagagcggactggctccattggcgagtagctgggcacgtgtggctacgtcataggggtgctcggtggcggccagttgttcgggaaccggcaagtcgagccagggccggccggcgaccagcgcatcggccacatgcccatactggtcgaaatcataggtgtaatcgccggaaacgtggaagacgagcgaagacgcgtaccacagttcgtggatgatggatacgccgataagcagggtaggaatcgccagaagccccacgaaagcaagtcgttgccgagtgctggacgggtcaagcgtgatacgccacaggcgcgatcccggcctccagacggcaatcatcagcaacaccaaggccatggcgagcacgcgcatccaattgatgacgaacggtacgcgcacgttggcgcgggcgtcggtgaccggtacgatcgcgccgcgctcttcctgaatccaaatacgcacgatgccggcacccggcgccttgacataatggctgcgaatagcgtcgggattcatcgactgggccttgccggtgatgccatcgacatccgcgcgcacatgaatggtcgccagcggtttgaagacttccttatcgtcgttcgctttggattcggcctcggcctgctcgcgggccttatcgatgaccttgctgctctcggtatcgatgcgtaggtaatccgacgtgccgtccgcggtcagttcaagataggccttggtcggatcggtgacggtcaacatgccatcattccggcgcgtgagacccgaacccagcgtgttatgcacggcgttcgtatccgtgctcgctccgagcgtacgccagaacggcaggttgaacacgatgcactccatggcggcgatggcggcaacggcggccagcaaggcgatcagcaggcgcaccaaacgcagccggtgccgggtatccgggcggctgggcaggtgccgttcatgattcgacggcatcggacggtctgcgcgagtgtggtctatggaatgcacgcatttattctataggctttattcgggcttgatgtcgggcaaacaagagacaatgtgaatcatgccaaaacgtacatcggaccatgggaagcacaaccgcacgccactgctgggcgggctgaaggattcgatgaacgcgctcgcggccgatctggggctgtccaagccgaagaagcacgatacgaatccgttcggcgatgccttgcgggagaccagtgagcgtaaaggcggcattatcgacgaactgactcgccatgcagtggcgctgagtccagtaatcaagcgacgcaccttccccgaattggagaacgtgccggaagggctggtgcttggatgggcgcagctgccctccaccagaggccgtggcttttcgcttggcattttccccgaccgcgatcattttgcgcaggtggcgttcgccgatacgcatggccgcgtattcgtgggcaccgaccccaacatggacgtgcaggatatgcaggcgcgattcatgttcggcaaggaaaaggaagtgactctgccggacggtgagcggctgggcgaaagcgacgagccgcgttcacgttccggtttctcccgtgcaggccatggcctgggaagtgcgctgcatcatgggcgtggtttggggcgtggccttggtcatggtgctgacggcgtgaaggccattaccggtggcgtggtggggcgtgacgacaccggacgcatgacgtggctcgcctcatggctcaaggccggcaaccggtacacgcttgagcagatgcgtgccaatctgccgcctgtgatgcgtcatgatttggaataccgcgatgccattaccatcgcgttcttcgccacgtatatgttgccgcagatcaatggtctgctcatcggattcggttccggcaatatcttccgccgtctcaaccgtgaggcgccaatcggtgcgattcgccgttcggtgcgtgacactttggcggcacgagcccacggcatgcgggcctccggtctggaggatcacttcgccgatctgatgcgcgaagccggcgccctcgacaccacgccgggactggaagcggtgcatggcgccgaaccgttgcacctgtacacctcgacgtattcgagcggctatttctttacgtgggataagtccttggcattcgggcaggcgctgaaatccttgaagatcgaaggcaacctcaaccgattcgctgcggtgagcgcttggctggagcgcaacgcttccttggggcgcaaccctacggaagatacggtgacccgtgccgaggccgcgcaaatcgacatgaaactcattgagaaccctgcgattatggcgcttgacccgtatgatggcgagcaggagcgtcgggccgtgctgagcctggtcgatatcgccgcacgcacggctgggcagattcgcagtgaattccctgatcctcgagatgtgctgacccagcagaacgtgccggattcgggtgtgacgaatgctgcgggcgctgaaagtactgagagtgttgagggcgctgtagagcggaccaataagagcgacaccaacactcaagccgctcggccttcgtattcgccggcgaggagcgacgaatgggtgtatcgtcagaccctctcctcactgttgcgccggttacggttgccgtatcggtttgatgtggagttccggtcgcgcttggattcgggtgaagtggccattggcttcaccactgccggcacctcgatgatgcccgatagccggtatgacaccactcgccgtacgtggcgtgcgctgagcagcgccgaacgcgcgtcgatgagcgccgcctacaacctgcgtgtcggcctgatgatggcagcgctgagtttcggcaccagcgaatccgtgcgccaggtgtcgttgcacatcgattccattggtcttgaagaggcgattgccgaacaggattccgccatcgaggcgatgatgagcgaggccctaagcgccttcgaacatctgcgcagtggcgatttggggcgtgtgggttccaaagccgaccccaaagatggtgatttccatggcgacccgacccgccccatcacccatgaggagacgttcgggcaggcggcgtccggtgacgaacgcggcacggccgggggaacaggcaacggtaccggaccgtctgcggatgctacggatcaggccgcggccgaatccgctgacgccgatggcgccgcgtccatcgattcgcagttcgaagacctgatgaagggcgtcgatatcgacgaaatggcgttcggcatgccggacgataccggcgcaggcgacgacctgggcggtatcggcggcgagggcgtcggcactgacgatgctgatggggccgccggcatggacgatgatccgatgagcgtgctgcgccgcaatcccaccgtgcgcaatatggtcaccgtcaccttcacccgtgatgccttcctcaagcgactggacaccgatgggcttgacaatcccgaggaaacctaccgcatgttcggtgccgtgatggacgtggacggcgaaggcggcctgaaacccatcagcgccgacttcgacttggcggacagccggttctctcccaccggatcccaggaggagcccgaactggccgaccgtcaattcagcccggcgaccgctcacgtgctgggcgcacagaatagtgccggactggctatccagcgagtggacttactgcagcatggcgtcaacgaattccacgatatcgccaggaacacgtcactcggctccgtggaaaaggcccagcgagccatgcagatcatcgaatcgatatgcgatcccgaactgaccggtttggcctctcaggtcaccagtgcgttgatcgatggcaaggacaccccggacttcacgttcacgcttgccgacgatcttgacaaggagcgtctgcgcgcccgagacatgctgttctcgggccaagccgatcaggccatcgaagcggccgaagcggctgtggcccatttggatcaggtgtatgcggcaggccatggcgtacctcgatacttcaactcctatgccgagcgcgtggtctacaaccgactgttcgccacattggacgagcgtacggtgctcatcccggacaatctgttctacgcacacatggagctggctgacgtgttgagccagatcaagggtgccgaggcggccatcccgcacctcaaccgtatggtggcgtacgcgcccgcctacccgctctcacatctgaagctcgccatccaactggcccgcaatgaggattgggattcggcacgcgccgcctgcctgaatgctctgcgcgtggccttggaccgcgacgatgccgcgttcgcctactaccggttcgcgtacgccgaatggatgcttgaccggttcgacacagccgccgcagcctacattatgagcgatcacatcgctcccggggccattggttcgttggaaagcgaactgcaggaactggtttcccgtgcggactcgcagtgcatgccggtgcctgaatcggtggagacggccgcccatgtgcttgccacgcatgatctgccggtctggccgcatatcgaagtggccgacatcgtgcgtgacgccgcccgcgtgtgcgtggatgagggcatgttcgtgccggcccgcacgctctcggtggccgtggcccgcatgaatgacggcgaaggcgacaacatcgacatcatccaagcccagttcctgcgctcgctatccgcatagccgcctgaggggagttgacggtatagccggccgaggggagccgagcccgctaggatagacaaccatgagcacgaacgaacaactggcatgggatttcgacgatggggatgtggccgaggtccggcctgataccggtattgcacgttttgcccctggctccgaacaatggatagccgcactgcagcccactgacgacgacgcgatacgcctcgaccatttcgacgtgaacacgatgaccgctgaggccgccgcccgcctgtgggctcgcgtggccgcatgggtggaatccgatcagatcgcctactacatcgacgactcacccgtcagctccgacgccgcctacgacgcgcgcatgcgttgcctcgaacgactcgaagcggcgttcccctcattggacaatccacagtcgcccacccatcgcgtcggcggctccttctccaacgacttcgcctccgtgcgccaccccagccgcatgatgagccttgatgacgtcttctccatcgaagagctcaaggattggtacgattcggtgattcgcgacctcgattggcccgaatccaagcccctgcccatgagctgcgaggtcaaaatcgacggcctcgccctgaacctcatctatcgcaacggcgtgcttgaacagggcctgacgcgcggcgacggcgttaccggcgaagacatcaccctgaatgtgcgaaccatcggctccattcccgccaacctcggcggccccaaggaagacgttccggacttcgtggaaatccgaggcgaagtgttcatgcgctgggatgacttccacaccctgaacaacgagcaggaggacgccggacgagcgcccttcgccaacccgcgcaacgccgccgccggctcgctgcgtcaaaaagaccctcgcatcaccgccacccgtcgcctgagtttctatgcgcatggtctggggcagctcacctgggggccggaccatccgcgcggcacccatgacgtggtcgccgaccagtcgcaggcctacgatctatacaccaggtggggcgtgccggtctccccgcataatcgtgcggtgacctcattccaggagatcctggacatgatcgagtactacggcgagcatcgcggcgacatcgagcacgcgctcgacggcattgtcgtcaaggtcgatgacctgggcctgcagcgcgccctcggtgccacctcgcgcgcgccgcgctgggccatcgcctacaaatacccgcccgaagaggtcaacaccgaactgctcaacatcaccgtgcaggtggggcgtaccggccgtgtgacgccggtcgccgtgctcaaacctgtctacgtggccggctccaccgtggctcgtaccacgctgcacaacggatttgaagtcaaacgcaagggtatcctgatcggcgacaccgtggtggtgcgcaaggccggcgatgtgattcccgaactggtcggcccggtgcttgaacggcgcaaagggcgtgagggccagctgcgcgaattcgtcatgcccgagttctgcccttcatgcggcgcgaaactggcacccgccaaggaaggtgacaaggacatccgctgcccgaatgtggaaagctgcccggcccagttgaccgagcgcgtgatttcactggcctcacgcaaggcgttcgacatcgagcatctgggtgaacagtcggccatcgctctgaccaacccggaggagaaccggcctgattcggtggcgacctacgcgccgaacatcaccgaggttctggtcgcccccggcgaggagcccgaaccgtacgagccggtggaggggctggaattgccggccgcgcagaagccggtgttgtccaacgaatccgggttgttcgacctgacctccgccgatctgcgcgacgtgcgcgtgtggcgtgaggccgcaatcgtcgaagtgcatgagacggtcgatgcgaacggtaagaagaaaaaggtgcgtaagcgtgtcggcggctctggcctgtggcatcaggtgcctgccttctggaccgcgcccacgccggccaagaagctcacggccaagcagttggccgaacgcgcgcaagaagaggccgcagtcgaatctgccggaacacagggaggtgccgccagcgagacgaccggcgcacctaccggggctgaggctccacttggtactatgccgggctttgccgcagcctcctatcccgagtatgacgtgccggccgacgcggtcatcgtgcgcgtggaccacaagaccacgcgcaccggcgtcacggatgtgccggtgatcattcggcccggcgaaaacacgcgcaagatgttcgacgaaatggacaaggcccgtcacgccgacctgtggcgtgtgctggtcgcgttgtcgattcgccggctcggtccgcctaccgcacgcctgatcgcctcggcgatgggctcgctggcagccatcgaaaacgccacgattgaagatctgacggccatcgacggggtgggcccggaaatcgccgaatcggtggtgaactggttcgccgccgcccgcgagcccggcgactggcgcggcgcgactttgcgtgcttggcaggccgccggcgtgggcgtcgacgaggccgagaccagttcgttgccgcagacgctggccggcaaaaccgtggtggtcaccggttcattggagggctattcgcgcgactccgccaaagaggcgattatcgagcgcggcggcaaggcggccggttcggtgagcaagaagaccgattacgtggtgatcggcgcaaacgccggctccaaggccaccaaggccgaggaactcggcatccccatgctgggcgaagcccaattcgcccagctcctagccaccggcaccatctaaaatagccccctcagacgcttcattaaccccctctgatgaggggctgtcagcctttaggctgactgggggagagaaaaagcgaatcccgccccagtgtgacttactccactccctctggcatgccgccgcatcacacgctagggtagaacaggccctaaaggaggatacggatttatgagcgacgcacgtcagatcgaagccgacatctacgaacgcctgagcaaggtcatcgaccccgagctcggtcgttcggtcaccgacctcggcatgattgccgctatcgaagccgcgcccgcatcgtcggacgccggcacttacgacgtcaccgtgcacgttgagctgacggttcccggatgcccactgagcgagaccatcatcaaccagatcaacggcgcggtcagctcctatccgggcgtacagctgctgcctcatatcgaagtcggttcaatgagtcgtgacaagctggccgatctggttgccgacctcaaggccgaacgcaagcggaaccccttcagcaagccgggcgtcaagacccgcatcttcgccatcgcctcgggcaagggcggcgtcggcaagtcttcggttaccgcgaacctggccgccacgtttgcggccctcggcttcgacacggccgccatcgacgcggacatctatggcttctcactgccgcgcctgttcggcgtgcacacgcagcctaccaatctgaacggtatgcttatgccggtcaccgcgtggggcgtgaaactgatctccatcggcatgttcgccggtgccgaccgggcgattctgtggcgcgggccgcgactgcagcgctccttggaacagttcctgtctgacgtatggtggggcgagccggacgtcctcttgctcgacttggctcccggcaccggcgacatggcgatttccgtggcccaggcgctgcccaacgccgaactcgtggtggtcaccaccccgcagccctctgcctccgacatcgccgtgcgctccggactcgtggccctgcaggtgccgatgaaggtgcgtggcgtggtggagaacatgagctactacgagcacaagggcgagaagctggagattttcggtgccggcggcggtcagcgcgtgtctgaacagttaagcgcggcgcttggctatgacgtgccgctgatggcccagctgccgctggaacccgaagtgcgcgagatcggcgaagcaggccgtcccgcggtgctggatgtcgatggcgccttgcgcacggatggcattggccagaccttccgagggttggctgaacggctgttggcagtgtgagcctgcgcggcctcacacttttgtaggcggcgctggcgtttaagtccggctcgctgctggtgggcgaatcgcttgaccacagcacccgcgacctggtggtcgaggcagtggagcgcactgccggcgtggataggctgcattaacctgcaggccattcacatggacgaggacgccgtgccgcgctgccttggtatgaatgggggatctacgtcgagcccgatgtctggcgggcacctcgcggtaaatagcggcatagcgcattatcggtgcgatgctaagaggtaatggcccatgagcggttccaatcggcgagattgcgttgccgggacaccacgacatgggccatctcgataaaacgatgccgcgtgtcggctgttctcaggtcatccgcagtgacgagaatggcgatccagccgagcagttgcaatgcgtttcgctttgccgcgtcaattcgcatttgtgccggatcggcgtgataggctccctgatattcgaacgcgacgcggcagtccggatatgccatatccaatatgacgtatgagttgccgatattcacgcgatagttggcggtggggcatcccaagcccgaatccttcagcatcccaaacagcgtgttttccggcggagaatccgtgttctctgtcatgtagggcagtgcctcgtggcatttgttacgacctatgaaccgcggactgatttccaagtaagtatcgaaatccttgcgagtggccattctgcgccgtttatcgcggctcatcaaagaggctccaatggccgcaagttcctccaatgtggagtattgggccatctgagcccacatcatgaccggcgaggcaatccagaaatgttcatagtcctttttgcggatatccagttttcccttaaacacatggaagaccacgcctttgattcgtctgcgtttgttggcactggaaacacaggcgtgcacggcatcaacagatagcgtgcaatgtcgggggatgggcgcgccgtagtagttggccgcattgatgtatcccaccagcaatggaccttttgaacggcgcgcagcatcattgcaacgttcacgttctgctcggcgtcggccgacaatatcctcatgcataaaagagctcatgatgcgaccgtaaagctgatttggacttgaatgcaagccaggcagggcaatgtggttccagcttatggagttatccacattgtctatttgcgcagagaacggttctcagtagtatctgtgcgctcaaatgaacaagaacataacaatctcacatcatcgcaaatggcgacatggcagtgattagggcatattccatgtgcgcttcgggcgtagagaagtgcgcacagatattattgagaaccgttctctgcgcgcctactctccggtggagcctctggccacgacctcggtgggcaggaacaccgtgcgctggaacggtcggccctcgatctggtcaagcactagggtggccaagctgacgccgaatgcgtccattggctggcgcacggtggtcagctgcgggtgcagggctgtggcgtcggcgctgtcgtcgaagccggcaatggcaatatcgtcgggcacacgcacgccgcggtcgagcagataattcatggctccagcggcgatgcaatcactgccgcatatcagcgcgtcgatatgatgctcggcgaggagctcgggcacgctggcgtcggcgccggcaagtcggctacccgacggctcagccagcgagtccagcagccgcacgacggcgttgcggccatcgggccgggtccagccgtcggaccgaatgaccagtgccgggtcgaaatcgccggccatcgcatcctggaatccgagcagtcgttcgtcggaacatggcaagtacggcggtccgatgatataggcgattcgccgatacccgcgccccaacatatgctcggtgagcttgcgtgaagcgagtcgattgtcgatatcgacggtggggaaggggatggcgctgccatagccgacgccggaaatggcgaccggcacgctgatattggcgaatctctgaaatagcgggtcatctttatggaacgtgttgagaatccatccgtcggcgaatccgctggaggcgagtctggcgatgcgtgcgccggccgcaggggagtcggagatcagcgtgatgagttgataatcggcattgccgagcgtctggttggcgttgagcaggatggtgttgatattggggtcggcgattagcgaatccggctgcccgtgcaccacgaacgccacggtttgcgtgcgttggcgtaccaatgatcgggcggcgttgttcggcgtgtagttcacctgcttgacggcggcggcgatgcgctcggctgccttggccgagacatgcggattgccgttgagataacgggagacggtggcgtaggagacgccggatgccgcggcgacgtccatgatagtggccggcttacggggtatggccatgcccgtctccttcctgtcctagggccgttcacagtgattgtaccgcgcgattttcctgatgattccgcatggcccatgtccggtgcctgtggattgccgtgccggcgtatgaaagtcggtaaacattctctgccgtaagggtgtacgaagtaaatagtaaaagagatttaccgatattaagtgaagtacgacacgcacatgatatttgtaaacctttacgtgagtgttatactccttctcgtaaacgtttacaagaaatcaccagtcaatggagacggccagatcaagcgagccgcaacggttcacaactggacgggaaggaacatcatgaagcagcagcacaacgtacgccccgccatccgcagggtgctccaggccacggccatcgtcacggcagcggcccttaccctcgccggatgctcgatgggcgcaccatcctcggacaccggttcgagcgatggcaagctcaccgtctgggtcatgcagggcgatcaaagcgaggccaccaccaaggccatcaacgaccagttcaccaaagagaccggcgtcgaggtcaacatccagaaccagcagtggaaggacatcagcaccaaaatcaccacggctctgtccaccagcacccccccgacgtgctcgacctcggcaatacgcaggtcgccggcttcgcggccagcggcggcctcatggacctgaccgaccacgctgacgagttgcgccagggcgtcacctggctctccggtctggaagagcctgccaccgtggacggcaagctgtacggcattccggccctcggtgccgcccgcgcagtggtctacaacaagaagacctgggccgcggccggcatcaacgagccgccgaccacctacgccgagcttgaagccgacctgcagattctcaaggacgcgcaccaaggcgaggacttcaccccgttctatgtgccgggtgccgattggaagaccgccatccagtgggtgtgggacgccggtggcgactacgccgtgcagaaggacggcaaatgggtcagctccctgtccaccaaggaatcggtgtccggccttgagcagtggcgtgaattccagcacaagtggtcatccgaagcctcccgcccgctcgacaccgatagccccgacaccagccagctcatggccgaaggcaagatcggcgccgtaatcggcaacagcgcctccatccgcgtgattcaggaatacaacaaagacatcaccgccgacgaactcggctccttcccgatgcccggcctgagcggccagaaccagccgtcgatgatggccggctccgtgtggggcgtggcccagaggagctccaagcaggatctggccctgaagtggatcaagatcgcctccagccctgacatccagaacgactacgtgttcgccaaggacggctacctgcccaacaacgtcgaaggactggacaaggccatggcctccgacgacttcccgaccgccctgaccggcttcttcgaggccgccaagcgcaccaaggccacgcccgcctccccgcagtggaccaccatcgaaagcgacggctcgctgaccctgttcaaggacatcgccaccgacaccagcaaggccgaggcctccgccaagaagttcgacgaacacgccaacgagctgtatgccaagtgatgggttggaccatgacaagctcaacgcaactcgcgcacggcgaggccccggcctcacggccggctaagaaacgcggcaatcgcgccccggcgttcctgctgacgcccgccggcatcgtcatcatcgcactggtggtcatcccgctgggattcatgatcttcacgtccttcacggatttcagccagcgcacgctgttcaccggcgaattcgacttcgtcggcctcaagcaataccaatccgtactcaccgacccggccttctatgcggccctgctacgcaccttcgacttcaccgcagccctcgtggccggcagcgtgctggccggcatgggagtcgcccagctgatgaccaaactcggcggtgtgatgcgctacctggtcatcttcgtgctcatcttcgcgtgggccatgccgaacgtcgcatcctcggtggtctggaagtggctgttccagcccggttacggcgtcatcaactggctgctcacccagctgcacgtcttcggcgacatgaccaacacctcctggatcgacaacacctggctcgcatttctggagatctggctgctcgtggtctggcaggccgtgccatacatcgccatcacgctgtacgcggccaccacccaggtcgaccagtcctgcatcgaggccgcccagctggatggctgcagcaagctgcgctgctactggcagatcgtcgtgccgctgatctccccgagcatcatggtcatcaccatgctctcgattatctgggacttcaacgtgttcaaccagatctggctcatctcgcagggcggcccacaggacacgaccgccaccatcggcatcttcacctataagaaggcgttcgtcagcttcgaaatcggcaccggttcggccgcctccgtgctcgtgaccatcgtgctgctcgcgctgacctccgtgtacatccgttacctgctcaagtcaggagaggacctatgagtacgtcaatgagtgcaagtcctgcacaggccgtatcgcaggccgcagcgcagtccacatcaccccgccgccgaaccaaccccggcaagatcgcgcgccgcgccggcaccactatcctcgccctgctgttctgcgtcgtatggttcttcccggtctactggatgattatcaccgccgtaaagcctcgcgatgagatcatgaccacgacccccgtgttctggcccacgcacctctcgttcgacaacttcatcgttgccgtgacccagacctcgttcctgaccaacctcaagaacagcgtggtcgtgaccgccatctcgatcgtcctgtcgatcatcgtcgcgttcttcgcgtgcgcggccctgaccctgtaccgcttccgcggccgcaagccgatcatggtgttcgtactggccatccagatgacctccggcggcatcatcccgcagttcatcatctacaaccagctcgggctgctcaacaaatacagcggtctgatcttggcgtacatcgccatggtgctgccgttcgcgatctggaacatgcgtgggttcttcctgaacatcccgaaggacatcttcgaatccgcggccgtggaaggcgcgaacgactggcagatcctgtggaagatcaccttcccgctggccgcgcccggcatcgtctcgacctcggtgttcgcgttcatcaacgcctggaacgactacatgatcgcctatacgttcatgaaggaccagtcgaagtacacgctgccggtatggctgtcgtccttctcgacacccaccatgggcaccgatttcggcgggcagatggccgcttcggtgatcttctcgctgccggtggtggtgttcttcatgctcatccagcgtaacatcatgaagggcgtgacgaccggtgccgtgaaatagcgtatgccgccgtacctcaccaacgattcgtccgctgatggcggcgcgaccacgtgtcgcctgccattagcggacgaacaataataaaaacagtatgaaaggaacagctgtgcccacattcgaatatacagtcgatgccgcaacgctgtgtctcaccctgattcccgctccggtgacattggaatacacgcatggcacggctatgatcgggtccctggtgacgatcgagaaacgaattcccgaatatgccgccaccgaaggtgccgatgagacttgggaaacgctgccgattgagcagctgtccagcgagctcgagcgttactgcggcgtcaccgtccgtacgcgccgtgtccgtgcagccacaggcgaagacgacgccagcgccaatgccgccgaagatgcgcgagatgcgcgtgcgggtgcgccggcagcgatgaacggcaccgtcatatccctgggcctggattcacgattggcgcatgacgaatacacgctggatgtgttcgcctcagataccatcgccgtgcgtggcggcggcgaaagcgggctgcggtacggtctgcagacgctgcggcagatcatcgggcagacctcgcgtgccattccctgcctgcatatccaagacaagcccgcgttcgcggtgcgcgcctacagtctcgacgtgacacgcggacgagtgccgacgatggagttcctcacctggttcgtcgaccagctggccttatataaatacaatcagttccagctgtatgtcgagcatgccttcgcgttcgtcgagctcagcgaggcgtggcgtggcaccgatccgctcacggccgccgacatcacgtatctggacgagtactgcgcgcgtcgcggcatcgagttggtgccgtcgttggccacgttcgggcacatgtacatgaatctgcgcacccgtgagcatcgcgggctgggtgagttccccgaagacgccgaccgcccgttcagcttcatcgaacgcatggagcatcacacgctgaacgccgccgatcccaaggcccatgatttcgcctcgcgcctgattgaggaatacgcgccgctgttccgttcgaagtccttcaatatcggcggcgatgagacgttcgacttgggacgtggcaggtccgcgcaggacgcgccggaagccggccgcgatgaactgtatgccggtttcgtcagggatttgtgcgaaacgctcacccgccatggtcggcagccgatgttgtgggcggacatcgcgctcgaaagcccgcgcacgatggatctgctgcccggcgacatcacgatgctcaactggatgtacgagccgcagatcgacgagagcaacatccagaccatcgccgcgcagggccgtcgccagttcgtgtgccccgcggtgcgggcttggagccggttcttccccgattatgcgggtgcctggctgaacacgtatcacatggcattggcgggtgtcaagtatggcgcggaaggcatggtggtcaccgattggggcgattacggccacgtcaacgatccgcgtctgagcgtgccgggcctgtgttatggcgctcagaacgcgtggaatccgattgagatcgatgagcatgagatgaactgtcggatctccgttctggtgtatggcgacgagtccggtcgcatcatggattgcctcgtccgcatcgactccgatggggtgtcattcccctgggaccttgccgtgcaggtgctggagctggaatacggttccggcaccggcatgctgaatacggatgtggcatcgtatgtggaacggtcgtgcgggggagagctcgtgtttgaccgtacgctgggatgcgccgatgcgcgccgccggctgctcctgcggaaccatgcccgactcgaacgacgccgggattgcgaccgggcgttgatcgattgcggcagtgcggttgttgcggtgctcgatggctcggcacgaggaggattgaacccggaactgctgtgggtgatgctggatgggcagcggttgttcaatagactgggagaggaactgctggtactggctggcggcgaggacgcctgtgacaccaaggatgtgaccggccgtgcgctggatgcctcgcgccgcgcccgtcttgccgccgatctggagttgtggttcgaacggtaccgtgtgcagtggctgtccatcggccgctacgccgaattggcgcgtatcgcccatgtggtgtggtcgtttgcggacatattgcgtaggggagcgctatagggagctcacagaaatttggtcctgctgagaacaaggtgaggcttacgcgccgtcaaacgcacatggtgatttcaaaaaatggcgaattgctgccattcttgcacctgtgcgtttgatgggaaatgtgcgtatgcctcacattttttgcataaagcatgaaaatgtggcccgttgtctatttgaaagtgcgacaccctttagattggagattgtccagataaccagtgaaggggtgtcgcgccttgggtcaagtgtattcgcacctgtcggaagagga

SEQ ID NO: 3195 - DNA, 4899 bp, Unknown
  R53_2m  MAG No. k141_3470
cacggcggtgacgcacagctgaaaccgccattcggcacagcggcagcaggtagaggaaggttgcggcggccaagctcaacgtgggggcgttgatggtggcgagcggcactgcaccggcgatcgaccaaggaatcaacggagcgatcaccacggcactgtcttccaaatcgatagcttgcgcggcgcgttcggattcgtcgtcgccgtatagcccgccgcacaactggtgagtgagcatgatggtgagggtttggttgcaggcgagcgccgccgcgcaagtcgcggtaatcatggtggcgccacatgcgccgatgcgatgaccgagcatctcgatgacctgctgcagccgagcaagcatccgcgtctcggcaaaaatgccagcgtaggcggaggagatgcagacagtggccatcacagtgagcatggagaggatgccgccgccgtccaggagtgcggccacctgcggattttgcgcatggtaaccgaaaataagcagccgcaacagttccgcccattccatgtgctgcacgcccacgcatatcgcgaccgaggcggcaatgctggcgagcataagcaggcgaacgtccacacgcagcaacgccaacacgatgaccagtaatgctggaactagggtaagccaatgcaaatcaaaggccgatgagaacaatccgccgatatcggttatgccgcttgtgttggttgaaacagccgctctagccgcaccgaatccggaaccaccgcttgcacacagccactccgccaccgcagccgcaacgtataccacacaactcagcacaaacggcaccgcaccagtgcgcagcatgcaggcaatagtactgaacaggttcgtatgcgtaagctgtttgaccagcaaggcactggtggaaaccggcgaacaacgatcgcccacatagacgcccgcaagaatcgcgccaccgagcatcaccgggttcgcctgcatcgacaatcccagcgacatgcagatggtacccatagtcgccgcactggcgaacgacgacccgaccagcaccgacatcgccgagcacagtagaaacgacagcggaatcaccgtggcggcgtgaattaccgcagtcgaatgggccacgatgaaggcgatggtcccgctggcccgccacagcgaggtcagtacgccgatgagcacgaaggtcaccaccacggtccccgcggaccgtacgctgccggccgcacggctcgccatcgcgcgcagcgagcaccggcgaaccagcccataccccatgaacagcagcacaccaacgaacagcgcgggaataatcgaccagccgagggcgacgctggcaaacagcaccgcacagaacagcaacatcgcgcccgcttccagcatgtgatcctctcctcttccggctacgacctcatctcagatttcatctcatgacccgcagttgcaaacatcaatgctattcgcacaagccatgactcaagataaccccagattctacgacgaacgtatggtactggttattgcgcaatcattatgactggatttagtcaccaccggaaccgcgaacagccaaactaatattgccaacgattccaccatccccaacacgattccagatgaacgcgccattgctccaggcgatctatcttcgttggcgcactgcccgtttttgctgggcaatccgcaggacatcgatggccgcatcggcgagattctgttccgtcgtgccggattcgagccgaaagtcgccgcccgttcggacaacatattgacgctgctggaactatgccattacggcatgggtgcctgcttatgcccggagcggttcctgccagcgctgcttgacggcgaacggctgcgcaccttgcatgtgctggattgcgggccggagaccgaatacgccatccgattcgacgtttcggccacaccataccgctggagcgtcattgatgatttcattcgttgcgcccgcgaagtcaccaccggcgaaggcgtgaacgaccgcggcctgtcccgcaagcatatcttcgagagcattgatcagacactgaagaacatgcagaccgactatctggacatgtacttctgccaccgattcgacgagaccaccgatctgaccgagacgctgcgcgttgtggccaacgagctcggcacgaacctgccggtgctttccatggcgtggatcctgcagcacccggagatcagctgtgtgatcgccggcgcctccaagcccagccagctggagaacaacatgaaggccgcgggctttgtgattccggctgacgcgatggccgaaatcgacaagatcactggcttccaccactttgagcgtcacgtgggctgacggatctgcggcttcctccaacgggagcgattgttaagcgccgaaatcggtatcgccttgggcctcggcctgggcgatggcggtttcggcgttttttgctgtttgctcaatgacctggttgtatccggtcaaggccgcgaacggcatgaactgggcggcccgctggcgacgagacatatgcggatgcttgcgtgattggtggtgtggcaggttgatgatgtcgtcgtatgcatgggtttcttgcagggtcatgcgcgatggcctccgatctgacggttgcgagcctgaccggtggcaccgtcttccatatccatggctttgatgacggcgttgcggccgaatttacgtttcacatccagcaacgcacgctggatatcatgctcaccatctctgtcatcagcgggctcggacccatacgattgagcctcgtcatcaccgaacaggtcgagctgctcatagcgtttgccggcggcaagctcctccggcgtagccacatcatcggcgatgacggtcaggcgtctcacgagcaggcgtgaatccacaatgcgctcgtacagcatcgtcatggcctcacggatacgcgccgaagatgacgtgaaatcacccaaaccaatcgacccgaccgcgctcttgggcactttacgcccaaaccggtcgacggccaccggcccctgataacttttcgccgcacgctcagcggcacgtttcatcgcataatcggcgcatgaatcgagcttcgacgcgtccaaactgccgatgtcatagccgacggcaagcgtgagtcgattcgtcagcacgcctttatcaaccaaatcgagggccagtgcatcagccatctccttggtaatcaggcgggccgtggcatagtcggcgggaccggtgagtacctgaccgctgctgatgctgtgcgcatccggctcataggattggatgtccgcgatctcgcacggctcccagccccacgcatggtcgatgagcagttcggcattcacgccgaacatgcgatacagcaggtcttcgttgtagtaatccgaagcacgacccaccgagcatcgggcgatatcgcccatggtcatcagtccggcatgctcgagcttcttggcatagccgcgcccaacccgccaaaaatcggtgagcggacgatgatcccaaagcagccgacgatatgacatttcattcagttcggccacgcgcacgccgtccttgtcggcaggcatgtgcttggcgacgatatccatggcgactttggccagatacatgttggagccgatgccggcagtggcggtgatgccggtttcggcaaggatttcgcgcacgatggttcgcgccatcgcatgcgcccccatacccagcgagcgcagatacggcgtggcgtcgatgaacacctcatcaatcgaatacacatgaatgtgttcgggagcggcatacctgagatagatgccgtagatccgcccgctgatttccagatagtgcgccatgcgcggcttggcgatgaccatcgaggctttgagtctcggcgagtgttccaggtcgcgcgcatcgcaggactccccgattaatcggccgccgggagcatggaccgcgcgctcggcattgactccattcaggcgctgcttcacctcgaagagccgcgcacggccaggaatgccatagctcttcagcgaaggtgagaccgccagacagattgtcttatcggtgcgggtttcatcggccaccaccagatgcgtggtcagcgggtcaagcccacgcgccgcgcactccaccgaggcatagaaggacttgaggtcaatggcgatataggtatgttcacgttgcgccgatgccctctcgccagccatcgccatcacctccctatcgaaaccagcccgaccagcataccagaacagtcgaacatttgttcgatataaacttcagcgaagctcagacatcccgtctcagatctccgacacaaggctcggcagcgctaaacccggatgactcgctcaaagtcggtctcaccggccatagcgatagccggcgagaccgatgccctctcgtttcatgcgcgaaaggcgcaatagcgggttcacactatttcatcaatgaacttgtccctccattgaaggtcgaaattgcttttgtcgacctcgaacagatcgtggacacgctgcattaccgtgtcatattgcgaacttctatccatcaagccacagagttccagactgctaatgggcatgatcaccacgttgtctgtatatgccgcgccagcagtggtcgattgcagcggcaccgaggcaacggccttccagatgttaatggtattggcatcaaatacatcggcgatgaagaatgtcgtgacccgccggtccgtcttacgagcctcctcatccaccttcaggttcacggaatgccgtaataccggttcccactcgcctcgcttttggctgtttacattcattagcgtagcttcaagcatggtgacatcatgcttactttcaatcacgatatcgccctgtccgcctcccgcatggttgagcggctcgaagtcagccgataacgtgagattatagctggaaaggagattgaaacgtttgcc

SEQ ID NO: 3196 - DNA, 45421 bp, Unknown
  R53_2m  MAG No. k141_3477
cctatcttgtatgccacgccatccaggatgatgagctcgccgtccaagccctcgccggtgccgatgccggtgtcgccatgcttgagcaattcgccgatggtggtggtgccttccagcagccccggcacgagtaaggccaaagtgccgtgctgatataacacgttggcaccgtgctcacgaataggtttgatgttctttgccagtgattgtgtcacgagccttaagagtaattcgcgttaccgtccaactcaattaatcaatccatattcgccaacgtgagctgtgccactatatataggtaagtctcagaaggatgttggtaggcgacgccgagcggctatgccgcgaggtaatacgaacggcatgagcgcgacacgcgcgaattcctccgcgctgtcccacctcaatgcttgaataaacaagttgcctgatttgggctcgcaaattggaattaaaaaagcgagcgcgggccgggagccacttcaagtgaagtgacagccggaaaccgcgcactgatgtcggatgaccgccagaggacgtatgtccaagggaggccatgcgcgccggtgccctagaagcaggttggtaaacagtacaacgaacatcgctagaaagggcggacggcaatggcgggacagaaaatccgcatcaggcttaagtcctatgaccacgaggtcatcgaccaatcggcgaagaagatcgtcgaaacggtgacgaacgcgggcgcaactgttgttggccccgttccgctgccgaccgagaagaacgtcttctgtgttatccgttctcctcacaagtacaaggattctcgcgagcacttcgagatgcgcactcacaagcgcctcatcgacatcgtggacccgacccccaaggccgtggactccctgatgcacatcgatctgcctgcggacgtcaacatcgaaatcaagctgtaagggaggaggaagcattatgtctaatcgcaaggctctgctgggcaagaagctcggcatgtcccaggtgtgggacgagaacggcttcttcgtgcccgtcactcttgtcgacgtgtccaccaacgtggtgaccgccgtgaagaccgaggaatctgacggctacaaggccgtccagctcggctacggcgccatcgaccccaccaaggtgaccaagccgctggctggccactttgccaaggccggtgtcaccccgcgtcgccacctcgtcgaggtgcgcaccgacgacgtcgatcagttcgaggctggccaggaactggccgctgacctgttcgaagagggtgctgaggtcgacgtgaccggcaccaccaagggtaagggcttcgccggtaccatcaagcgttggggcttcaagtcctaccgccgtactcacggttctcacaagaacgagcgccgtcccggttctgtgggcgcatgcgccactccgagccgtattctcaagggcaagcgtatggccggccgcatgggtcatgtgaccgccactacccagaacctgaccgtcgtctccgctgatgtcgagaacggcatcctcgccatcaagggcgccattcctggccccaagggcggcatcgttctcgtccgctcggctgtgaagggagcctgataaaccatggcaaacgttactctgaacgtcaccgacgccaagggccaggccaccggcaccgttgaagctcctgaggctctcttcggcgtttccgccgaggatgtccaggctcacatcccgctgatccaccaggttgtcaccgctcagctcgctgctgctcgtcagggcacccacgccaccaagactcgtggcatggtttccggcggcggcaagaagccgtggaagcagaagggcaccggtcgtgctcgtcagggctccatccgtgcaccgcagtggtaccacggcggcaccgtgttcggcccgcagccgcgtgactactctcagcgcacccccaagaagatgaaggccgcagctctgcgctacgccctgtccgatcgcgccaacgccggtcgcgttgccgtggtggagttcggtatcaccgagccgtccaccaaggccgctgtcgccgccctggccccgatcaccgcggacaagttcaccacggtcgtcttcactcgcgacaacatcaacgagtggctctccgtgcgcaacatcccgaccgttcacccgattttcgtcgatcagctcaacacgtacgacgtgattacctcgcagtacgtggtcttcaccaaggaagccttcgaggctttcgtggctgccaagaccgagccgaaggaggcctgatttagatggtcgctattcacaagcccgctcacgacgtgattcttaagcccgtcgtctccgagaagagctacgccgcttccgaccgtggccagtacaccttcgtggtggctccggatgcgaacaaggtgcagattaagcaggcaatcgaagagatcttcaaggtcaaggtgacgaacgtcaacaccctcaaccgcgctggcaagaagcagcgcactcgcaccggtttcggccagcgcgcttcccagaagcgtgcgatcgtgaccgtcgccgagggccagacgatcgacatctttggtaactgaaggctagccgagaaaagttaaaggaagaactacattatggctatccgcgtttataagccgacgaccgcaggccgccgcaacgcgtccgtctcggatttctccgagctgactcgttctacgcctgagaagtcgctggttcgcaagaagtccaagaccggcggtcgtaactcttacggccgtatcacctcccgtcatcgcggcggcggccacaagcgccagtaccgtctcatcgatttcaagcgttgggacaaggacggcgtgcccgccaaggttgccgagatcgagtacgatccgaaccgctccgcccgtatcgccctcctgcacttcgcagatggcgagaagcgctacatcatcgcgccgaagggcatcaagcagggcgacgtcatcgagaccggtgctcaggctgatatcaagccgggcaacaacctgccgctgaagaacatcccgaccggtaccgtggttcacgccatcgagctccgcccgctgggtggcgccaagatcgctcgttccgctggtgctgccgttcagctcgtcgccaaggatggcgcctacgctcagctgcgtatgccgtccggcgaaatccgcaacgtcgacgcgcgctgccgcgccaccgtcggcgaggtcggcaacgaggaccacgccaacattcagctcggcaaggctggccgcgcccgctggatcggccaccgtccgatcacccgtggtgagtccatgaacccggtcgaccacccgcacggcggtcgtacccgcggtggtaagccgccggtctccccgtggggcaagggcgaggttcgtactcgtcgtccgaagaaggcttcgaacaagatgattgttcgtcgccgtccgtccggcaagaaccgcaagtaagggagtatcgagaagatgactcgtagcatcaagaagggccccttcgtcgacgcccacttgcagaagaaagtcgacgagcagaacgagaagggcaccaagaacgtcatcaagacgtggtcccgtcgttcgatgatcacccctgatttcatcggacacaccttcgccgttcatgatggtcgcaagcatgtcccggtgttcgtcaccgaggccatggttggtcacaagctgggtgagttcgcccccacgaagaccttcaagggtcacgtgaaggacgacaagaaggcccgtcgctaaggataaggaatagaacatggaagctaaagcaatcgctcgtcacgtccgcgtgacgccgcgcaaggctcgccgcatggtcgacctcatccgcggcaagaaggcgaccgaagccgtcaccattttgaagttcgcccctcaggctgcggccctgccggtccgcaagaccctggagagcgccatcgccaacgctcgcgtgaaggccgacaaggccggcgagccgttccgcgagaacgacctgtacatcaaggagacctacgttgacgaaggtgtgaccctcaagcgcttccgcgctcgtgcccagggccgcgccgctcgtatcaacaagcgcacctcccacatcacggtcgtcgtggctaacaaggaaggagcccgctaaagatgggtcagaagatcaatccgtttggctaccgtctgggcatcactgagaaccaccgctccaagtggttctccgactccaacaaggccggcgaacgctaccgcgacttcgtgcttgaggatgatcagatccgcaaggagatgagcaaggacctcgagcgcgctggcgtgtcccgcatcgtcatcgagcgcacccgcgaccgcgtccgcgtcgacattcacaccgcccgtccgggcatcgtgatcggtcgtcgtggcgccgaggccgagcgcgtccgcgccaagctcgagaagctgaccggcaagcaggtccagctcaacatcttcgaggtcaagaacgccgcgctggacgcccagctcgtcgctcagggcatcgctgagcagctgaccaaccgcgtcaccttccgtcgtgccatgcgcaaggcccagcaggacgccatgcgcgccggtgccaagggtatccgcatcaagctctccggccgcctcggcggtgcggaaatgagccgttccgagttctaccgtgagggccgcgttccgctgcagaccctccgcgccctcatcgattacggcttcttcgaggccaagaccacgtacggccgtatcggcgtcaaggtctggatctacaagggtgacatgaccgaatccgagttcgaagagcagcaggctcagcagaacaaccgtccgggccgtcgtggtggcgatcgccgcccgcgccgtggcaaccgttccgccgccccgcaggccgtcgaagcccccaaggctgaggctcccgccgaggccgctccggctgcagaaacgaaggagtgagcaagaatgcttatccccaagaggactaagtaccgcaagcagcaccgccctgtgcgttctggcatgtccaagggcggcaacgagatcaacttcggtgatttcggcatccagtccctcgccccggcctacgtgaccaaccgtcagatcgaagccgcgcgtatcgccatgacccgctacatcaagcgtggtggccgcgtgtggatcacgatcttcccggatcgtccgctgaccaagcacccgctcggtgcccgaatgggttccggtaagggtgccccggagttctggattgcgaacgtgcgccctggtcgcgtgatgttcgaaatcggtggtgtgtccgaggacgtcgctaaggaagccctccgccgcgctatcgacaagctcccgatgaagtgccgcattatcgcacgtgaaggtggtgatatctgatggcagtcggtaccgctgattactccatcaagaatctcaacgagaagaccaacgcggaaatcgaaggcttcctgaagaagtccaaggaagagctgttcaacctgcgcttccagcacgccaccggtcagctcgagaacaccgcccgtctcaaggctgtcaagagcgacatcgcccgcatgtacaccgtgcttcgcgagcgtgagcttggcatcagccaggagccggccgctaccgaatccaaggagaagtgattatggctgaagagcgtaacttccgtaaggttcgccgcggctacgtcgtgtccgacaagatggacaagacgattaccgtcgagctcgagcagcgttcgacccacccgctgtacggcaaggtcgttcgttccaccagcaaggtcaaggcccatgatgaacacaacgacgcccacattggcgacctcgtgagtattatggaaactcggcctctgagcaagaccaagcgctggcgtctcgaatccattatcgagcgcgccaagtaagtaaagttcggcaaggctcgccatttaccggggcattatgggcaaccacgatgccccggtaaatggggagaaccagctcggctaaggagaatcaatgattcagcaggaaacgcggcttcatgtcgccgacaacacgggtgcgaaggaactcctcgccatccgcgtgctcggcggatcgaagcgacgctatgccggcatcggcgacgtgatcgtcgcctccgtcaaggacgccattcctggcgggtcggtcaagaagggcgacgtggttaaggccgttgtcgtccgtaccgtcaaggaatcccgccgtgcggatggttcctacatcaagttcgacgagaacgccgccgtcattctcggctccggccgtgaaccgaagggcactcgtatcttcggaccggtcggtcgtgaactgcgcgagcacaagttcatgaagatcgtgtccctcgccccggaggtgatctgacatggcagccaagatcaagagcggcgacctggtcaaggtcatccgcggcaaggaccgcggcaaggaaggcaccgtcaagcaggtgctctccaacgatcgactgatcgtcgaaggcgtgcagatcgtcaagaagcacgtgcgtgcaacgcagcagggccagcaggctggcatcgtctccactgaggctccgatccatcgctccaacgtgatggtcatcgacccggagaccaagcagccgacccgcgttggcatcaccgttaaggaagaggcgcgtgacggcaaggtgaagaccgtgcgcgtgcgcgtcgccaagaagtccggaaaggagctggcatgaccgatactactgtcgaagcgccggccaccccgcgcttgaaggtcaagtacaacgagcagattattcctgagctcgagaaggagttcaagtactccaacccgatgcaggttgcccgtgtccagaaggtcgtcgtctccatgggtgttggtgccgctgcccgcgactccaagctcatcgaaggtgccgtcaaggacctcaccctgatcaccggccagaagccgaagatcaccaaggccaagaagtccgtcgcgcagttccacctgcgtgaaggccaggccatcggtgcgtacgtcaccctgcgtggcgaccgcatgtgggagttcctggaccgtctgctgaccctcgcgctgccccgtatccgcgacttccgcggcatcaacggccaccagttcgatggccagggcaactacaactttggtctcaccgagcagtccatgttccacgagatcgatcctgattcgatcgatcacgtgcgcggtatggacatcactgtggtgacctccaccaaggacgacaaggaagcttacgcgctgctgaagcacctcggcttccccttcaaggagaactgatatggcaaaaaccgctcttaagaacaaggcggccggcaagccgaagttcaaggttcgcgcttacacgcgctgccaggtctgcggtcgtccccactccgtctaccgcaagttcggcctgtgccgcatctgccttcgtgagaaggctcaccgcggtgaactgcccggcgttacgaagtccagttggtaaacatcgacgctgaaggtccgcggcccgaacgcttctagaagaagcgtgagggcggcggaaaccatagcgagaaagggcaacaagcccaaatgacaatgacagatccgatcgcagacatgcttacgcgtctgcgtaatgcgagcgcggccaagcacgaaaccgtggatatgccgtactccaagttcaaggcgaacatcgccgagatcctgaagcgcgaaggctacatcaaggacttcaccgctaaggaagccaaggtcggccagactcttgaggtcaccctcaagtacggtccgaacggtgagcgttccattcagggcatcaagcgcatctccaagccgggccttcgtcgttacgcgaagtccgactccctgccgatgccgctcggtggcctgggtatcgccatcatctcgacttcttcgggactgctgactcagaaggaatgcctcgaccgaggcattggcggcgaaattgtcgccttcgtgtggtgagaaaggagagctgaaacatggcatcgcatattggtaagctccccatcgccatccctgctggcgttgaagtcaagattgaaggccagaacttctccgccaagggcgctaagggttctgactcctacgtggttccggaaggcatcaccgctgccgttgaaggcaacgagatcgtcctgaccgccgctgatgacctgcgtccgacccgtgccaagcacggtctggcccgctccatcatggccggcatggtcaagggtgttcacgatggctactccaagactcttgagatcgtcggcaccggttaccgcgccgtcgccaagggcaagggcatcgagttcttcctcggctactcccacaccatcaccgtcaacccgcccgaaggcatcaccctgaaggtgaccgacgccaaccacgtggttgtcgaaggcaccgacaagcaggtcgtgggccaggttgccgccaacatccgcaagctgcgcgctccggaaccctacaagggcaagggcatcaagtatgccgatgaacgcatcctgcgcaaggctggaaaggctggtaagtgatatgagcgttgctattctcggaaaaggcaagaaggtagctctcaagcgccgtcacgcgcgtatccgcaagcgcatctccggtacccccgagcgtccgcgcctggtggtcacccgctccaaccgtcacatggttgctcaggtggtcgacgataccaagggtattaccttggtgtccgcctccacccttcaggccgacttcgccggtttcgaaggcaccaagactgaggccgccaagaaggtcggcgagctgatcgccgagaaggccaaggctgccggcatcaccgcagtcgtgttcgaccgcggtggcaacaagtacaccggtcgcgtcgcagccgttgctgatggcgcccgcgagggaggtcttgcactgtgagcgacaacgaaacgaaggaaacccaagtggctgaagaaactcagaacactgtggcgaccgaatccaacaacgaggaccgcaagggtcgtcgtggccagcgcggtgaaggccgtcgcggcgagcgtcgtaaccgtcgtgaagaaaaccacggcgacgagctgctcgatcgcgtggtgaccatcaaccgtgtgtccaagacccacaagggtggccgtaccttcagcttcgctgcactggttgtggtcggcgacggcaacggcaccgtgggtgtcggctacggcaagtcccgtgaagtcccggccgccatcgccaagggccagctggacgccaagaagcacatgttctctgtgcctcgcgtccgcggcaccatcacccacccggttcagggtcacgacgctgctggcaccgtcctgctgcgtccggccgccccgggtaccggtgtaatcgccggtggctccgtgcgcgccgtcatggaatgcgcaggcatcaccgacgtcctgaccaagtcgatgggctccgccaccgctgttaatgtggtgcgcgctaccgtcgacgccctcaagcagctcgaagagcccgaggagatcgccgcccgtcgtggcctggcgctcgacgaggttgctcccgatgctctgctgcgcgcccgtgccgccggcattgccgaggctcgcaaggctcgcgaagaggctgctgccgctaaggccgccgaagagaaggatggtgagtgatactcatggctaagaacctgaagattaccctgcaccacggcatcgtgaaccgtaccccggctcagcgcgccaccgtcaagaccctcggcctcaacaagatcggtaagaccgttgtccgcgaggacaccccggccaaccgtggtctggtgaacgccgtgcgtcacctggtcaccgttgaggaggttgactgattatggcagataacgaaatcctgcagatgcacgacctgaagcccgccccgggtgccaagaaggaccgcacccgtgtgggccgcggtgaaggctccaagggtaagacctccggtcgtggcgccaagggccagacgaagcgtaaccacgtgcgtccgggctttgaaggcggccagctgccgctgtacatgcgcctgccgaagcttcgtggcttcaagaacccgttcaaggtcgagttccaggtcatcaacatcgctcgtctcgtggagctcttccccgagggtggcgaggttgctgtggccgacctgatcgccaagggcgctgttcgtgacaacgctccggtgaaggttctgggcgacggcgagaccaccgtggctttcaccctcaagggtgttaaggcttcggcttccgccaagtccaagatcgaggccgccggcggttccgtttccgaggactgattagtcctacggggagcgcaataggctgtacaacccccgcccgccaataggtggacgggggttcccttttctaaagaattgttgttctgagcgcagagaagcagtctcaacacaatgatcgttttgagactgcttccccccgttcagtacgacggagcataattcaggtgacatccgcgagacatgaagtggccgaagtaggcactgtagactatgctcattcgttagtttgtgtatttcgcgtgattggcgcgctattgggaggaaatctaggtgaggacactaatccaggccctgaagaccaaagagttgaggaagaagattctcttcgtcctgttcatcatcatcgtctaccgcatcggttcgttcattccgacccctggcgtggactacaacgtggtgaacaagtgcatggccactgtcggcagcgcctcccaagagaacttcatcggactggtgaacctcttctccggtggcgctatgctccagctgtctatcttcgcgctgggcgtcatgccgtacatcaccgcgtccatcgtggtgcagctgctgcgcgtggtcatcccgcgcttcgaggccctgcataaggagggccagtccggagaggccaagctcacccagtacacgcgttacctgaccatcggcctggccgtgctgcagtccaccaccatcttggtcaccgcccgctccggtgccctgttcaactaccgctgcgaccaggtcatcccggacggctccgtgtggaacctcgtggtcatggtcctcatcatgaccggcggcaccggcctgatcatgtggatggccgagctcgtgaccgacaagggcatcggccagggcatgtccatcttgatcttcatgtccatctgctccggcttcctgccgcagctgtgggagatcggctacggcaccaacggcaagaacggcgactggaccaagttcggcatcgtcgtgggcgtgctcgtggtcatcctcatcttcgtcgacttcgtcgaactgtgccagcgccgcgtcccggtgcagtacacgcgccgcatgatcggccgtaagatgtacggcggctcctccacctacctgccgctgaagatcaacatgtccggcgtcatcccgccgatcttcgcctcctcgatcctcgccatcccgaccctgatcgcccagttcggcaagtccgaccagtcctgggtcaagtggatcaacgccaacctggcgaacaccacatccgtgtggtacatcgccctgtacgcgctgatgatcgtgttcttctgcttcttctacacctcgatcacgttcaacccggacgagaccgcggacaatatgaagcagtacggcggcttcattcccggcatccgcgccggcaacgccaccagccgttacctgacctacgtgatgaaccgactcaacaccgtgggtgccgtctacctgctgttcgtggccctgatcccgaccgtgctgatcatggctctcggactcaacgctaagctgccgttcggtggcaccacgatcctgattatcgcgggcgtgggcctcgacaccctgcgtcaggccaaggcccagaccgaacagttccagtacaccggcttcctgttcgaaaacgtggaccacaaagaaggctgacgcccgcttggcagcggtcgcccgcaatgggcaggcggccgcgcgaggagtggaacagtccagtggactgttccacgacggagcaatctttcttccgcatataactcaatggctcccttaaccaagggagccaaaaccgtattaataaccgacacaaaaggagaccaccatgcgtctgctcatcatgggcccccagggcgtgggcaagggcacccaggctgctctgctcgccgagcacttcaacatccccaccatctccaccggcgacatcttccgctacaacatcaagaacaagaccgaactcggtcttgaggcgatgagctacaccgacaagggcgagctggttcctgactccctgaccaacaagatcgtcaaggatcgtctggccaaggaagactgcaataacggctggatcctcgatggctacccgcgtaacgccgcccaggtcaccgctctcgacgagatgctcgccgacctcgacactccgctcgaccacgtggtggccctcgaagccgcccgtgacgtgctgctggagcgtatgaagaagcgcgccgccgagcagggccgcgctgacgacactccggaggccatcgccaagcgcctggagacctacgagaaggaaaccgctccgctgctcgacatctacgaatcccgtggcctgctcgtcgtggtcaacggcgtcggcgacatcgacgagatcagcggccgtatcatcagccacctcgagtagtaggttcggcagcccggccaacaagccggagtgatgccgaaataccacatcaacgtttccatacccctgtgcgacacgccgagtgttcgtacaggggtatgtgcgtatatagttgacagttggtgtgtcttcggatatgccatagtaatcatccaacggaataggactagaggcacatggcaaaagacggtgtgattgaagtcgaaggacaggtagtggaagcactgcctaacgcgatgttccgcgttgaactcgagaacaagcacatcgtgctcgccacgatttccggcaaaatgcgtaagaactacattcgtattctgccgcaggatcgtgtcgtgctcgaaatgagcccttacgacctgaaccgcggacgcattacgtaccgttacaagtaaaggtacacaagaaaaggataaccatgaaggtcagccctagcgtgaagaggatctgcgaaaactgccgcgtgatccgccgtcacggccgcgtcatggtgatctgcgtcaacccgcgccacaagcagcgtcagggctgagagcagattctccagcggcactaagtaaataaggcactctctcacagtgcttcccgcaagggaacgacactgaaccacgggtacgtaggcccgtgccgggtatccgggcgagcgggtgcaagacctacggcaacaagaaggaatcgcaatggcacgtcttgccggagtcgacatccccaatgagaagcgcatcgagatcgccctcacctacattttcggtgtgggtcgcactcgtgccaaggaaacgcttgccgcgaccggtatcagcccggacatccgcgtcaaggatctcaccgacgagcagctgattacgctgcgtgactacctcgaagccaactacaagatcgagggtgacctgcgtcgtgaagtcgatgcagatattcgtcgcaagattcagatcaactgctaccaaggccagcgtcaccgtaagggacttcctgtgcgcggtcagcgcaccaagaccaatgctcgtacccgcaagggcccgaagcgcacggtcgccggaaagaagaaggccaccaagtagtcggtggcatgattcgggccacgggatgatttcatcccatcgcccgaacgtcaacaacaaagttcgttactaggaaacgagggtcaatggcagcgcctaagcaagccgctcgtaagccccgtcgtcgcgaccgcaagtcggtcccggtcggccaggctcacatcaagtccactttcaacaacacgatcatttcgatcaccgatccgtccggtgccgtggtgtcctgggcgtccggtggtgatgtcggcttcaagggctcccgtaagtccacgccgtacgccgctggtatggctgccgagtccgccgcccgcaaggcgatggaacacggcgtcaagaaggtcgacgtgttcgtcaagggcccgggttccggtcgtgagaccgccatccgttccctgcagtctgcgggcctcgaggttggttccatcaccgacgtcaccccgcaagcccacaacggcgttcgtcctccgaagcgtcgtcgcgtctgagcactcagcaataccaaatccatccaaaaccgcctgaccggtgagtgcaccaccgagttcaagctgaaaggataaccacagtgcttattgcacagcgtccgactcttaccgaggaatctctgaatccgcagcgctcccgcttcaccatcgagccgctcgagcctggcttcggctacacgctcggcaactcgctgcgtcgcacgctgctgagctccatcccgggtgctgccgtgacctccgtgcgtatttccggtgccctgcatgagttcaccactctgccgggcgtccaggaagacgtcaccgagatcctgctgaacatcaagggcatcgtgctcaccagcgaatatgacgagcctgtggtcatgtatctgcgcaagagcggcaagggcgaagccgtggctggggacatcaccccgcctgccggcgtcactattgccaacccggagcagcacatcgctaccctcgccgacgatggcgaactcgagatcgagttcactgtcgagcgtggccgtggctatgttcctgcccagatgaacaagcaggacaacgatgagatcggccgtattccggttgattccatctactccccggtactcaaggtgagctacaaggtcgaggccacccgtgtggaacagcgcacggacttcgacaagctcattctggacgtggagaccaagcccgccatctccccgcgtgacgcggtggcttccgccggttccaccttggtggagctcttcggcctgtgccgtgagctcaacgcccaggctgaaggcgtcgaggtcggtccggccccggtggccgaggagaccaaccccgagatggccgttccgatcgaggacctcaacctgacgcagcgttcttacaactgcctcaagcgcgagggcatccacaccatcggtgagcttgtctcccacaccgagcaggacctgctcgacatccgcaatttcggtatgaagtcaatcgatgaggtcaaggagaagctgcagaccctgggcctgagcctcaagtcctcgccgatggccttcgataccaataatctcgaaggtggtacgttcttctcgccggaagacgagtgatctgcctctttgaccaatcgttcgttcactaggcaagcggatgttcgggcatatgcccacctgcttgcctgaagaacggacatataaggagtaaacccaatgcctacacctaagaagggcccgcgtctggcttccagccccgcacacgagcgcctcatgctggcaaacatggcgaccagcctgttccagaacggccgcatcaccaccacgctgccgaaggccaagcgccttcgtccgctggccgagcgcctgatcaccttcgccaagcgcggtgatctgcactcccgtcgtcgcgtgatgcgcgtcatccgcaacaagtccgtggtgcacattctgttcacccagattgccgagcagatggagcagcgtgaaggtggctacacccgtatcgtcaagatcgccccgcgcgttggcgatgccgctccggccgctgtgatcgagctcgtcaccgagccggttgccaagaaggctgttgtgaaggaagccgaagccgccgccaaggttgccgaagaagaggctccggccgttgaggctgaggccgctgaggctccggtcgaggagaccgccgccgctgaggctgaggctcccgctgaggaagccgctgacgccgagaaggccgagtgagctgaatagcgtttcgccaagctagctgaaagggctggaatccgtttgggttccagcccttttgcgttgtttcatagaaactacaacgtacgtacggctcgaatggcctcggctcttgcggccagctgatcatcgacggggtatgcgatatgctccaaagtcaggccctgcggcgcaatcggcccgcttgagccttcacgcactggctcggccattttgccggcaaaccattccagagatttgcgtcccgaaccaactttgatgcatgagccgaccaaggagcgcaccatattgcgggcaaaggcgtccgccacaatcgtgaacaccgccagtccggactccagcgacggagtccgatatgcttcatgcgatgccatcgcatccggcaccaggggagtgatcggcacccgccgccaataggcggtcttgacttcgcggatcgtagtgcctcccggattcggagtggcgaaggaaccaaaatcgtgcaggccgatggtcaatgaggctgcgtggttcataagctccagatccagcgattcatccacggtaagcacgcatccacgcaggcgcgggtcgatctcggacgaacgatcggcgacccgatacacataagtgcgctccaatgcggagaacctggcatcgaaaccggccggtgccacggcaatgccatgaatgacgatgtccgaaggcagcacagccttgagtctgcgagtcagcgcctcggtgaccggaatggtcatgtgacctacgcagcgattcagtacctcatcggatacatccaaatgcgccacttggtgggaggcgtgcacaccggtgtcggtgcgcccagccaccgtcagacgcaacggttcggccgcatcatcggccggcacccgcagcaccttgtgcagcgcatcttcaatggtgccttgcaccgtacgcagattgggctgtttggcccagccatagaatccgccgccgtcgtaggccaagtcaatgcgcagtcgtgtcatagccattcattgtaacgagtgcggtcggcgagatgcgcgcggtcggcgagacgagtgcggtcggcgaagtgacctgcctgtaacattctcgcacgtttgctgaaacggggccgccttaggttgtaaccatcaaacccggttacggcttgcggcgtcagcgtgcgctcgaaacgcctaaccgcttgaggccacagaagccgccacagcaaggagcaggcacgatgatcgaatccgcagcacgcagactggcccatgaactggtaaaccgtcgcgaggcgatcaaccgcgagctgtcccgcaacggcgtacgcttcggcatctacaagaacggcgaataccatgaccggctcttcccgtacgatcccgtgccgcgcattatcgaatccgacgaatacgacgaattggagaagggcctgaagcagcgcgtcaacgccctgaacgcctatctgaaggacatctactccgacaaggccatcatccatgacggcgtcgtgccggaggaatacgtatacacctcggccggctacttcccgcaggtcaacggcgtgacccctcccggcggcatcttcgcgcacatcgccggcgaagacctggtccagggtgaagatggccgctggtgggtgctggaagacaacctgcgcatcccctcgggcgccagctacccgctgttcgtgcgcgacatcgagcgccgcatctccccgcgcctgttccgcgacgtgcacatccgcgacaatcgcgaatacccgcgcctactgcgcaaggccatggactttgtgtccactgagggcatcgccgtggtactgacccccggccgctacaattccgcgttcttcgagcacgcctatctggcggagaaaaccggcgccgcactggccttccccgaagacctcgaagtggtggacaacaaggtctacttcctcgactacgccggcaaacgccaccgtgtgggcgtggtctaccgccgtctgtccgacgaattcctcgatccgtttgccttcaatcctgattcggtgatcggtgtgcccggtatcctgtccgcctaccgcgcgggcaacgtggccatcgtcaacgcgccgggcaacggcgcggccgatgacaaggccatctactacttcgtgccgcagatgatcaagtactatctcggcgaggaaccgattctcaacaacgcgcccacgtatatgccgatgttcgaggccgaccgtaaggaagtcctgaatcgtatgggcgagctggtcatcaaggatgtggccgaagccggtggttacggcgtggtgttcggttcgtcgctggatgctgccgcacgtgaggagcttgccaaccggatcaaggaggagcctcgtcgattcatcgcccaagaggtgattcagttccgcgatatcgatgtggtggacccgaagaccggtgagatgtcgccgcgcaaatgcgatttgcgtgcctttgtggtcaccggcaaaaacacgcacgtgtggtattcgggcctgactcgatactcgtcggtgcccggccagatgatcgtcaactcgtcgcagggtggcggattcaaggatacgtgggtgttggcacccgaatccggcgtggagcatgaatacggtgctgaagtgcaggtggcgaacctgctgagccagtcccgccgccactcgttgtctctggtcaccgcttccaaggcagacaacctgtattggctgggtcggtacaccgagcgcgccttcaccacgctgaaccagttcttcccgttctacgatcgtgtgatggacaccgatgtggacgccttccgtccgttcgctcacgcactcgacctgcccgaagatttcgaggacttcgacgggttcgtgaacagcttcctgtacgacgggtccaaccctgattcggtgcggtcggccgtaacctccgcattcaacaacgccgtgattctgcgcccggaattgagctcgcgtctgttgcagtacgtggagttggcgatgaccaatatcaccgatgccgccaaatacgcggccgacgccgaggacatctacaagcagcgcgatattaccgatgacatgctcgccttctggggcggcatcgagaattcgccggtcgaccccacgctgaaggcgttcatcttcatcggcaagtatcttgagcgcatcgacctgtacacgcgcttcggcctgacgatggaggagatggaagccccgcttaggaagctcgcctcctactcgatgatcctcgacggcatgccgttgcctagttgcttcgccgatgggctgagctggctggtcggtcagctgccgtctcgcgggtatcaggaagtcgccgacctgctgaagaagtaccttgacgattattccggccgtgtcagcgccctggccatcaaagacatgggctcactgagctccatgaacatggatgccaagcgcccctaacccgacgttcgccctgacgggttcaaatgctatggtggtatggcgaaaaaccgtgcgcccgagtgccggccgatgcgtatcggcgaattgccggaatatatgcgtggactgtgagcgcgcggaccatacctcagccatggctgtagtgtcgttatcccgagaatgtgccggttgccggctcgtgtgtaagtgcaggagacgttgtgaaaaaactcgtgttcgactatgagatgaggctgtccttcagcgcaccggtcaccgatcacaggttccagcttcgctgtattcccgccactggccctcgccaacaggtgattgacgtggaagtgaagattcagcccgaaaccgaactcgaaaccaccatcgactcctttggctccgtggtgatgaccggattcatccccgagccgcacgacatattcagctattcggtgaccggcatcgccttcgtggacaatgcgcatatccataaggaagcctataaaccgctgtaccgattcaattcagcgctcaccattcccggcccgaacgtggaggcgatgatcgacgtatgccgcgaacgcttggctgcgttgcctgccgacgccactccggtgcagcaggccgccgaagtgatggatgaggtctacaaggcgtttgtgtatacgcccggttccaccacgattcgcaccaccgccgaacaggccttggcccagcgcaagggcgtatgccaggattatgcccatgtaatgctgtccgtgtgccggcatgtgggattgaccgcgcgctacattgccggtttgcttgggggagagggcgcgacccacgcttgggtcgaggtgtatcaggatggccgatgggtcggactggatcccacgcataaccgattggtggacgacagctacatcaccatcgcccacggccgcgattaccgcgactgcatgctcgacatcggcatcttctccggctacaacgtccagcagacccaatgggtcaatgcctccgtccacgaacaggtggcgtaaacaaaatttcaagccccctctgatgagctgagccgtgaagaaaacgccggaggcgtttttaggcgaaggcgaatgacagtgagcaaataaaatggcagctggaaagctgtccttaaattgcgttcgagctgtcgagcgtagcgagactgagagagaccgctcaatgcagagtggtcccgtcaccgcttctaccaccaccaatattcggattttcgtcgttgcaacattcggattttggtagttgagaaattcggattattgtagttagaaagttcggattttcgtcgttgcaacattcggattttggtagttgagaaattcggattattgcgatggcggacgtgaaataacgggaggtgcgcggaatggccgattctctgacgagcgacatcaagccgaaagcctatcgccctcgtatcgtggatgcacagatcgaacgatatatgcgcatctttggcgcggtggagattaccggcaccaagtggtgcgggaaaacttggtctgcgcgggcccatgcagccagcattacctatgtggatcgcaataacaatttggctgcggctaaggcggatccgtcattgatgctgctgggagataggcctcatatcgtggatgagtggcaactcgccccagctatatgggatgaagtccgtcatcacgtcgacgatgattccgcgaataaaggtcagtggattctgaccggttcatccactcctctcaatgagaatcggccgaaccatagtggtgcgggacgaatcggacgtatccgtatgaatcctctgactttatatgagtccggactctcgacaggtgcggtaagtctcagtggactgtttgaacataagttcgccgctgcaaaatcagagataagtacacaaatgttgttggatgccgtatgccgaggtggatggccggaggcggtggctctgcctgtatctgacgcacagattctgattcgggaatacatgcgactcacgctgactgagagtgtgcccaggcaaggcaaggatcctgatgtggctcgtcgtctgctggattcgcttgcgcgcaatatcagtcaagctgtgacattcaaaaccttacgtaaggatatgtacggtactgaagaaaaccttgacgatttcatttcggagagaacggtatccgggtatacggccatgttcgagaacatgttcgtcatcgatccgataaagggctgggtcccgccggcacgggatccaaagcgactccagaccaaggcgcgtcggtattttgccgatccttccattgcggccgcaatgttgggcatgagtcctgccgctcttatcggcgattggcagacttttgggtttctgtttgagaatctatgcatccgtgatctgttggtgtatgcgagatctctcctcgatattgggatagaaccggttcggtattatcgtgacgattccggtctggagtgtgatgccattattgaattgtccgatggacggtggggcggcatcgaaattaagtccagtgaggataaagtccctgaggcatcggcaaatctatgcagactgaaagataagctgctgagaaatccgagtgcgcgaacccgtgaaccggagttcttggcggtgttggtgggggtcggcgagttcgcgtatcaacgcgatgatggagtgtatgtaattcctgtcggagtgcttggcgcgtaaacgcaatgccagcgcttcgggcgaattccgggattgtgatctgacatgtctcaagcggcatacactcgagacttgctcagcgaaactccgatttgccaggtcggcagaatgtggcataatgaacaagttgccattttggcagcatggataagtgtccgagcggtctaaggagcacgcctcgaaagcgtgtgaggtgaaagcctccgcgagttcgaatctcgccttatccgcctttagggttccggggtttgtcccggaaccctttttgtttttgatgcgaacgtccgtattcggggttataggccaaaatgtatgtccggcggtctagtcgttcgactgccattcgaccctggtgtggaactcgttccagtcgatgccggtgccgtgtctcatgggaatgccgaacgtctcgtgcatgctctgcgggcttctctcccatgcccgccggtagaggcgctcgagtcgttcgtcggtcatcgcgttggccgcgagccacgcgtcgctttcgggccgttccgtgtgctggtggcaccaccagcagatcgccttcagccgtctgaccagccgcagtccgcggtggcggcgcggcatgtcgcgcaggcgcgcgttccatgattcgacgaggttgttcgtggacggcactgggccggctgccgcgagcccctcgtcgaggaacatgaacggttggccctcccggatgcgcctgcggatcatgcgccgcgccttgacgagcctttggtgcatgtcgttcacgctgccgcaatcaacgacatggtttgcgtgtacctgacgatgtacaagtggtcggcttcgataacgtgccggaagccgagtactcggcgccggcgctgaccaccattgatccacatatcgacgattatgccaagcatgccgttgacatgcttatcgaccgcatcgaaggatactcaggcccggcccgtacgtacaccaccgatttcacattggtggaacgtgcctcaacgcgacttgcccactagcatccaacaagttcgcatcggcttcgtgaggagtgtgtgtctactcgaacaatgtggcgtcagtcgctgggtagccaagttggaacgcggtgtaggcgtgcttggcggccagtgcggcgaggatgagcagcgtatcgctctcggtggaagatttcgattcggtcacggccttgatctgcgcgcgggcgcagtccatttcgatggcggcggtggtcggtacggtctggccgcttgccttgtcggcgatggtggtggggttggccagtagttggtcgatggcatagaccttttggcgggggtcgctctggccggaagaactggactgtgcgccggaatcatcaaaattgccgttcgccagcgacaccagctgctgcccggcggtcttatgcatatcgctcaacgccaacgtagccccagcggtctgtcctcgtgcggccaagacctcgatagcgaatccggcgcgatcctcggccacggccatcgcatccaataccggtcggtcaacgttggcggacgtgacgccatcaagacgcgccggcgtcacctcaggcgcggactgcccgaatttatcggccagaaaagccagccattgcttggtctgcgcgtcacgtaacgttccctcggcaaaacgacccgaacaatacccggcaacgtcaatccaagtcaggggagcggccaggccggtggcatactgctctaataacggcgtgccttcagccggatgggtggcgtagtccgccaacgtcatcgctttctcgcaagggctcatttgagcttccgcctcggcccgtccggccagtcgcggcatcgaacacgccgaaagcgaacacagcatcgcgctcgcgcatagtgcggatgccaagcgccgggtaaaccgtcctgaagagaagcgtgtctgcatggaaacctacactaatagctaactgtgaccactcataggccatgcgccgcataacttcataggaggtacggatcgatggaactggacctgacaggaatacacaagctcgccgccgagcaaggaatcgaccccggaaccctggatgatgcgctggcagaggccctgcgcctcgcctacctcaagaccccgcacgccgccaggcacgcgcgtgtggagcttgacgaacgttccggcaacttcaccgtctgggccgccgacgaaatcccggtcgagcccaccgaggacgacccgcaccccgctcccaagctgggcgaggaatacgacgacaccccgcgtgacttcggccgtctcgccgccgccactgcacgccaggtcatcacccagctgttccgccgcgccgaagatgagaaggtattcggcgcgttctccggtcagaagggcaagctcatcaccggcatcatccagcaggatgcttccgacccctccaacgtgcatgtcgcgatgggcgatgtcgaagccattctgcctcgccgtgagcaggtgcccggcgagcgttaccgccacggcgaacgcatccgcgtgtacgtggtgaacgtggcccgtggcatcaagggcccggaaatcgtggtgtcccgctcccacccggagctggtccgcaagctgttcgagcgtgaagtgccggaactggtctccggtgccgtgtccatcatggccatcgctcgtgaggccggcgcccgcaccaagatcgcggtcaaggccaacaccgatggcgtgaacccgaagggtgcgctgatcggccccggcggcgctcgcgtgcgtgccgttatggagaaccttggcccggagaagatcgacatcgtcgactactccgacgatccggccaagttcgtggcagccgcgctgtccccggctgtggccaccggcgtgcaggtgatcagcgagaagaacaagaccgccatcgccttcatccacgacgaccagctgtccctggccatcggcaaggaaggccagaacgcacgactggcagccaagctgaccggttggaagatcggcatcgaatccgccgaggcccacgccaagaaggtcgccgccgaaaaggccgtccaggctgcggccgaggctgctgctccggaagccgaataggccgccgggctcgaaggcgaatgatcttcagggcgcattatttcctgatacgagccgcgtcagcaatggcgcggctcgctgcgtctacgctatccagcgctatgagtatgcttgattggcgtatgtgggctggcgcagtgtgcgcgaaatcgcccacaccagagacgaggtaacacgatcatggtcgcacgatgagacagggtaggcttgccgtcatcaccaactgaccacgcccatgcacgcgcgtggtcacagaataggagtaattagtggcgaaaccacgcgtatacgaactggctaaggttttgaatgtcgatagcaaaaccgtgcttgagaagcttaaggacatgggagaattcgtcaagtccgcttcttctacgattgaaccgccggtagcccggcgtctgaaggcagagttcgccaaggacaacgccaagggcgattccaagcccgcatcttccgtacaaaagcctgctgccaagcccgtgcagcagcgccgcccggccgcaccttcggccccggcttccacttcatcttccgcaccgactccggccgctcccgcacgtcaggcatcgcccgcctcggcacatcagcaggccccgactccgggcgcaccgacaccgcgtccgcagggcggcgcacgccccggcatgccgacccccggccgccacggtcagcacgacaaccgtgagaatggtcgcgataatcgcgaaggccgcgagaacggtcgtcagagtcgcccgaacgatcgccgtaacaacgatcgtcgtaacaaccagggccgtccgaacaatggccagccggggcagcatcagaacaaccgcgacaatgcttcggctccgcgcccgcacgctcagggcggcgccggtgccaatggcggcaatgccgcttcaaacgcggttccgcgcccgcacgctcagggcccgcgcccgggcaacaacccgttctcccgcaagcagggtatgcacaccccgacgccgggtgatattccgcgtccgcatccgatggctcgtccgactgctgatagcggtcgtggcggtcgtccgggccgtcccggccaaggccaggggcagggccgcggcttccgtggcggtcgtccgggccaaggtggtcagggcggtcctcgtcccggccagtggggccacaaccgtccgggtcagggcggcggctcccagggtgccggtcagggcggcgcacgcggcggcttccgtgggggccaaggcggcggcaataacttccagggcggcggcgcaccgagcaacggtcccgcacgtggcggcggtcgcggcggacgcggcggtgccgcaggtgcattcggacgtcagggcggtaagtcctcgaaggcccgtaagaaccgcctggcaaagcgccatgagtatgaggagctgaaggcaccgaccatcggcggcgttcgcatccccaacggcaacggtcagaccatccgtctgcgtcagggcgcttccctggccgatctggcggagaagatcaacgtcaaccaggccgcgctggtcaccgtgctcttccacctgggtcagatggctaccgccacccagtccttggatgaggagaccttccagattctgggcgaagagatcggctggaacatccagctcgtctccgcagaagaggaagacaaggaactgctccagcagttcgacatcaaccttgacgaggaagaactgcaggatgacgaggatctcaagcctcgcccgccggtcgtcaccgtcatgggccacgtcgaccacggtaagacacgactgctggataccatccgcaagaccaacgtcatcgcacgtgaggccggcggcattacccagcgcatcggtgcctaccaggtcaccgtgaaccttgaaggcgaaccgcgcaagatcaccttcctcgatacccctggccacgaggcgttcaccgccatgcgtgcccgtggtgccgagctcaccgacgtcgcgatcctcgtggtcgccgccgacgatggtgtgatgccccagaccgttgaggccatcaaccacgctcaggccgccaaggtgccgatcgtcgtggccgtcaacaagatcgatgtgcccggtgccaacccggagaaggtccgcggccagctcaccgagttcggcctggtccctgaagagtatggtggcgacaccatgttcgtcgacatctccgccaagcagaacctgcacgtcgacaagctgctcgaagccgtgctgctcacggctgacgctgagctggacctccgcgccaaccccgacatggacgcccgtggtgccaccgtcgaagcccgactcgacaagggtcgtggtgccgtggccaccgtgctggttcagcagggtacgctccacgtgggcgatgccatcgtggccggcacttcgtacggccgcgtgcgtgccatgctcgacgagaacggtcagccgatggaagcggccggtccgtccacacctgttcaggtgctgggcttgacctccgtgccgaccgccggtgacctcttcctggtcgcctccgatgatcgtgccgctcgccagatcgccgagaagcgtcaggccaccgagcgtgccgcccagctggccaagcgtcgcaaggtcgtctccctcgaggacttcaagaagaagttcgccgagtccgagatcgacatgctcaatattgtcatcaagggcgattcgtccggttcggtcgaggcgctcgaggattccttgatgaagatcgaggtatccgacgaggtcggcatccaggtcatccaccgcggcgtcggtgcaatcacccagaatgatgtcaacctggccacggtcgacaaggccgtcatcatcggcttcaacgtgcgcccgaaccgtcaggtggcggacctcgccgagcgcgagggcgtggagatcaagtactactcggtcatctaccgtgcgatcgaagacatcgaggcatccctcaagggcatgctcaagccggaatacgaagaggtcgtcacctctcactccgagatccgcgagatcttccgctcctccaagttcggcaacatcgccggcgtcatggtgcaggacggcgaggtcaagcgtggtacgaagtgccgtatcctgcgcaacggcgtggccacggtcaacgacctcgagatctcctcgctgcgtcgcttcaaggacgacgttcagtccgtcaaggaaggctacgaggctggtatcaacctcggcaccttcaacgacattgaactcggcgacatcatcgagaccttcgagatgcaggaagtcgagcgcaagtagtcattgttaagccctctctgacgagtgggctgtcagccgcaggctgactgggggagagacatggtagttccatgattttctctcccccggcctcactgcgttcggcagcccctcgtcagagggggctcaagtctagaaaaggaaattcctatggcaggaaccaacccgcgcgccgcacgtattgcggccttgattcagcgtgtcgtcgcctcctccattgagcgcgaactgcatgacaagcgactcgccagcatcaccgtcaccgaagttcgtgtgaccaacgatctgcagatcgccaaggtctactggacccagctcggccacgaaggccacgaggaaggcgaacgcaagcgcgcccagcaggcgctcgatcaggccaagggtcacctgcgttctctggtgggccacaaggctggcctgcgcctgactccgcagctccaattcgtgttcgatgaagtgcccggcgaggctcacgagatcgaagacattctcgccgtggccaagaagcgtgacgaagaactcgcccgcgcccgcgccaccgcccagtacgccggcgacgccgatccgtacaagcacgacgacgaggccgaagccgagggcgatgagttcgagtccgacgaggagtagtgtgcttcatacaacacccagcggcctactcatcatcgacaagccgcaaggcgtgaccagtttcgacgccgtcgccgccgtgcgcggcgcgttgcacatcaagaaggtcggtcacgccggcacccttgaccccatggccactggcacgctggtcatcgccttcggccacgccacgcgactgctcaacgccatcgtggcgcatgacaaaacctacgaggccaccatacgcctcggcctgcgcaccactaccgacgatgccgaaggcgaggcgcttgtcgatgatgaagcccgctcccgctggcaaacgctgtcagcgcagctgactgagggcggccagagcggcgaaccaacggcgtcaccaactgcctcatggcaaaacctgctcactcgcaccatcgccaccaatttcaccggcgatatcgaacaagtacccaatacgttctccgccatcaaaatcaacggccagcgtgcctacgacttggctcgcgaaggcaaggatgtggaactcaagccccgcctggtgaccatcagcgaattcaccgtgctggatatccgcagcggattcgtagcaggggagcaggccgctgaaccattgcgggaagacgcgaacacgggagcgattcccgcacttgatgttgacgtgcgggtcagctgttcatcgggcacctatatccgcgcgctcgcccgcgacctcggcaatgaacttggcgtcggcggatacctgacccgtttgcgccgtacgcgagtcggccgattcgcgttgccggacgataccagcggacttatcgcctctgaggcgatgcttgacacgcgaacccataccgtcaccgcacataccgatcagaagacgttcactaatcgggaagggcaaaccgtcacgcgcaacaagtgcgtattgaacactcctgaaggccttgccggtgacgagcgccgcaactggctgcttgaccatgccctcaccatggaacaggccgctcgaggcgcgatgccggcgcttgacatcacacctgaggaagccagcgaattgcgcttcggccgccgtatcgagcgtacaatcagcgagcccactgccgccattgtgccgcaaacgcatgatgtggcggcgattatcgagcgtgccaacgctcatcaggccaagccggtcaccgtattccccctcgcgtaaagtagacgcggtgaaaagtgcagcttgatacaggccgcgcacaacaacgcctatattgcatgaataacatcgcacggataaaaggaacagcacactgatggatatcacgcacctgacccctgacgccgaaggttcgattgaatggccctcgttcagtaacgacaagaaggccgtggtgacattgggcgcatttgatggcatgcacttgggacatcaggcggtgatcaagcgtgtggtggaactcgcgcaccagcatgatgctttttccgtggtgattctgtttgacccgcgccccgcattcgtgcacggctgggccgcctcgcaccatggcgaggaacccgcggtgcagaacgtggatgccgaagccttgaccagtgtggatgatcgactgcaccgcatggaacagttcggcgtggaccatgtgttggtggtgcactacacgctggccttcgcagccatgtcatacattttcttccttggcagactcaccggcaagctgggcatgcgtacgctggtcctcgggcaggatgccgccatgggcaaggggcgagaaggtgatgtgaagcatatcgccaatcttgccgccgccaccggtgtattcgaacttgatgtggtcgatgaccgtggcccgggtgaagtgcgcattccgcgcgatttcaagccggaagccccgagcgaatggggagagcccgtcgacccgctggccaatgccaccaaggccgagcgccgcgcatggagcaagaagaaccaggccaaggcaatgcgcgcctggagctccaccaatgtgcgctacctgctggctcatggccgaatccaggatgccaacgccattctgggtgctccgcacgccatcgaaggcgaagtggtacacggtgaggagcgcggccgcaccatcggattccccaccgccaatcttggctccgacattgcaggctacattccggtcgacggcgtctatgccggttggctggtagatggtgaaaaccgttggcccgccgccatctccattggcaccaaacccaccttcagcgagaaaacaggactcaacgaacgcgtggtggaggcctattgcatcaccgatgagtggattgatctgtacgaccataaggttcgcgttgaattcgtcggtttcctgcgcccgcaggtcaagtttgatggtcccgaccaactcgttgacgaactcaagcgcaacgtcgaagagaccaagcgtcttaccgcctgaggcatatctcagggctatttacgcactcccaaggcatctaaggcgtcggacaatgtgttggactccaccagccgaagtccctcgacatgcaccggcttgcgcagcggaggaatgactgccgtcgtaaagccaaggcgcgcggcctcgcgaaggcgatattccatacgcggtaccgggcgcacctgaccggtcagggaaatctcgccaatggcgcacgtggctcgcgcaatgggttttgacgtggcggcgctcgccagtgccgccactatcgccaaatcggaaccgggctccttggcctggcccccggcaatagtggagatatacaggtcgttggacagcaggttgagcttgctgtgacggtagagcaccgcgaccagcatggcgatacggctggggtccacgccattgaccgcacgtcgaggtgtgggcagtaccgacgtggtgaccagagcctgtacttcgataggcagactgcgatgcccatccaatgtgaacgtcacacaggtgccttccatgggtgccgcgttggccgcatcagggccgtctccagacaggaacaatccggcgggatcggtgacctcttcgatgccctcaccgctcatgtcgaaacagccgacttcatcggtcggaccaaaacgattcttcaccgctcgcaacattctcagcgcggtctcgctgtcgccttcgaattggcagaccacatcgaccagatgctccaatgtgcgcgggcctgcaatcgaaccgtccttggtcacatgaccaaccagaaataccggaatgtcaagcgtcttagcggtatctatcagcgcgcttgccacttcgcgcacctgagtcgaaccgccggaaatgccatcgacctcctgcgagacgatggtctgcgccgaatccacaatggccaaggccggcttgttctgttcgatcagccccaatactgtggacagatcggtggtggaggccagtaacaagttcggctccaccgcgttgatgcgggaagcgcgcaaacgaacctgcgcctgtgattcctcgccggaaatgtacagcacggtattggcatgtaccgacggtgcgttgccctgtaccgacaccgtgtttgatgtgccaccctgcgcccggcccgactgttgggcagaccgctgaccggctcctcggaatgtactgtctcccgccacaacgcgcgcgatattgccggccgtctgcaacagcaatgtcgacttgccgatacccggttcgcccgctatcagcgtcactgaacccggcaccacgccaccgccgagcacacggtcgaattcggaaaacccggtaccgagccgctcgacgctttccgtgcccacttcggtaatcggacgggctgcagatctggcgttgtcggcaaccgtaaccgactgcgtgcgtgatgttcggccgggagcggccgtgcgagagcctgccgccggccgagcctcgtgaaattcctcgaccgtgccccactgaccacactcggggcaacggccgtaccacttcggcccgttccaaccgcattcggaacatacatactgcacacttgatttcgccatggtctcaccctaacccaaacaccagcggacggtaaatttttaccgttcacaagagtttcacgcggcttgcgcacaacgactaagattacggccgtctagcgtcacgcggctgtgagagaatcggggtatgactaatagtgagaactcctcgaccacacaatcccatggcaagttgattgcagtggtggttgccgcagctgttgtgattatcctggcagtgctttcggcctttgtgtggccgggttgggccatccagaagaatgatggcacctccactaccacccaaaacagccagcagaaaaccgaatcatccgagccgaccaagccgaccatcgacgccacagctttgccggatgatgccagtgagctgttgaaggccatgccggacagcgtgctgaattacgcgcgtaccaaggcggatgcctccacgacgtggaattccgcgtcgccgctcgaggagtacactctgacctactccactggtgatgccgccaaggatgtcacgctggtcgccgcgcagtggtcgtcggcggacaatgccaagacccagtacgatgcgttggtcgctgcgcagaccggcgatgagtcggcatccggcaacgtcaaggtttccggcaacgtcacgggcgcgtacgtggtgaaggccgatgcctccaacagcaagaacgccgctgccatctggcagaacgataccgtggtcttccaagctaccggcaccaaggaagcggtcgatcgcttctaccagaagttcccgatgtagtatctagtatcggctgtcagctgctgcacaaacttatgaacgttggggcatccacattgctgatgtggatgccccaactgcgttcagggcatatgcggactatcgacaacatactggtttcctctgtctggcaacacgtgtattatggtgcaagttgcaacttttacgattaatcgaaatggaggcttcagatgggttctgtcatcaagaagcgccgcaagcggatgagcaagaagaagcaccgcaaactgctgcgtaagacccgccaccagcgtaagtagtcttacctgcaatcaaggcattagaaaccccgtgatcgttatggtcgcggggtttctctttttggctcctttgccttgttcgggcaacagtaaagcccgcacctgcgatgtacagatgcgggcttggaaaagttcagtgatgtgagacgatcacttgttggcgttggtcaacacgcgcgggccgttcgggtcgccgacgatgaccttgtcgaccatgttgaggaacaggccgtgctccaccacgccgaccgtgttgatgaggtcttcggccagctcctgcgggtgatcgatgcgctccaggtgcaggtccaccacgaagttgttctcgtcggtgcgcacttccttgccatcggcgtcaagacgaagcaccggcttgtagccgcggtcctcgaacttcttgatgacgtggccagcgccgaacggaatgacctcgaccggcagcgggaacttgccgatggtgtccacaaccttggactcgtccacaatccacacgatctggttggagttggtggccacgatcttctcccacagcagagcagcgccaccgcccttgataccgttgaagttcttgtcgacttcgtcggcgccgtcaatggtcacgtcgatgtgatccacgtcgtcgatgtccacgatcttgatgccgtagctttcagcctggacctgcgtgcggcgagacgtggttacgccagtgaactcaagaccttcctcctgatgacggcggccgagctcgtccaccaggaacttcacggtcgaaccagtgccgaggcctgcgatcatgccgttttcaacgagcttggcggcttcgatgccggccgccttcttcagcgcatcctgctgtgccttatccatggtttctcctttgccatccttgcctccgccgcatggatcaacggcgtgaagccttatctcctatcctaacgcgaatgagcgattttgtgtcatcgtgtccgattgcggtacatattcgtgtgtttgggtgttagtgtcgtacgaatggtgcgttggtgatggtcaggttgccgtcgccgtccacatagccttcgatttcgatgctgcctttgatcggcatcggctgcccgttgaaatacgggctcgttttcggcgcgggggagaaggtcagcgtaccggataccgtcagtccgcttggctttgcggggtgtacggggtgcgctgattgtacaggttgcgctgattgtgtcgctaagggtgacgaagacttggtctctggccttgtggcatccgtcgaatcagtcgccgcagccggcttgcgcaaacttgccgcatccgccttgccatccagcaccaactgcacgtctggaggcacatcggtgccatgtgcgtattcggagcccagtagcgactgccagccttcaatcggcagatagccgtcgcgcgcacccgaacggcaatcgcccgcataggtgcgtgccagttcatcgaccaactcattgccctcgttgccggcgtgacctttgacccatcggaaatccaccgggccagggcgttgtgagatctcacggtcgatcgcctgaataagctctttgttcttcacaggctttttctgcgaatttttccagccgttcttcttccagcctttgacccacttggtcgagcaattgatggcgtactgcgaatccgattcgatgagcaatggctcagggcccgggtgcgctcgcaaagcttccagcactgcgcacagctcaccaatctgattggtgccgttggtcgcgccgcccgcatcataaccatggtcgtcgtgcttgtggccgggcttgccgccggcgttctgctcatgatcggcccaggcccagcccattggcccgtttggattccctaatgcggacccatctgtggatactgtgatagtcatgttctccaccctaacgcaagctgtgcaatctcttgctgaagtggggttgcccagtgcgaggcaaaacaacgtagtgaagagtgtgaataacatcacacctattgactttgcttgaaaaacatgccatcgcgcgtgaataggtgagcgctcacaagaaaaacaagacatttcctctctgcgggtgaggccggcaacaatggcgcatccggtatctggaatgagaataagggactgtacaaaaccagtgacggcaacatcgaaatcctcaaaccagaggcggacagcgatggttcgacggccacggccgcatccaagggcaccatgcttatcgcaggcaactccaaaaccgtggcactcggtccaggcggcatggccttggctcccggcctgccgctcggtcttggctggttcatccgacgccgcttgggattggatgcctccgacattctggaccgtaagctcggcttgaagtaacggctggttcggacgtgattgctgtcacgtacggatcatgacgacagcgcgaaggtcctcatcggtttacgtcgatgaggaccttcgcgcgcattaggggagtctgttgcgggctgcgctacgcgggtcatgctgcgcgggcgtgctatgcggacaaactacgcgaacaagtcgttcagtgcctcggcaatcgtcggatgcgtgaacaccatatcgcgcaacgtgctggccggcgcgtcaagatccatcgccaacttgacgatattgatcacctcgtgcgactcgacggaaagcagcatcgcacccagaatgcggccagtattgcgttccacaatcgccttcatcagaccatccggtcgccgcattacctgggccttcggcacagcggccaccggcaatcgcttgaccacataatccaatccggccgccttcgcctcgcgctcattcaatcccacgcgcgagtaaggcgtggcgaggaatgtgctcgacggcacatgcttgcggtccttcaccgtgtacgggcggtcggaaccattgagctgcgaccacaccacgcgatagtcatccagcgaaatgtacgtgtgctgcgggccgccgttcacatcgcccagagcccaaatgtcggctgctgtggtgcgcagaagctcgtcgactttcacggcaccgcgttcggtgagctccacgccagctgcctcaagatgcagtccctcgacgttcggcgtacgtccggtggccaccagtaccgcgtcggtggtcaggcagaatcgggcttcagccggctcggcgaaccgcggctcgccatcgtctgatggtttcgtttgaacgtgtgacatcgtggcgtgatcggtcgggttgctagtggggctggtggttgttgtagtgtcggtggcgccggtggcgtcggtggcaccggtgatatcggtatgagcgttcccggtgccggcgggggtggaatcgcaagcttgcgatgcgccgcgagtcatacccttcaccgcaacggacaacctgacgccgccgtcagcagcaggcgcgatggccttggtatccgcgttgaacaggaacttgacgccctgcgcttccaactgtgcgcgaatcgcggccgccacatccgcatcctcgcgcggcaggaactcggcattgtgctgcagcacggtaaccgccgtgccgaaatcggcaaacatcgaggcaaactcaagtccaatgaatcctgaaccgataatcaccagtcgctgcggcatatcgtcgagatccatcagtccagtgctggtgtagacgccgggcgtagtgtggataccgggaatatccggaatgcgcggcgtggcaccggtattgatgaagatcttgctggcggtcacggcgaccgggccctcagcggtggcgatttccacgctatgagggccggtgaagtgagcgcggccggtgattacggtgatgttgtcttggtcggcgagcttgtgatagttcttgtcgcgcagcatcgaagtgacgcggcgcttctccttgatagcagcctcgaacgctgcttcgcgggtttcgggagtactgttcgcgccatcccgccgcgcctgttcggcggacaaaatcagtgacttggacggcaagcatccgatattgatgcaggtgccgccgtacatgtcggcgcttgcctcggcgacgacgaccttgcggccggctgcactgagcttggcagccaaggttttgccgcccttgccgaatccaatgatcagggcgtcggtggtgatagtgggggaggtgctgggtgtgctgatggcattgggtgtgctgatggacatggttacttccttacgtattcgagtgataagagtgcgttgtgctgatgtgttgtgtgccgtgcggcgtctgttttcttctttgactgccgaagcgttatcgactgatgctggctaggggaaacgcgcgggattattagcctttgcgctcgctgaatatctgttcggtgatgtcgtggatggtggtgtgttcgagttgttcgaggcaagtgcggttgagcccggcatagatgtcgttcatcactgcgcccattgaagatgacaccagacagtcctcgtgtacgtcgcccggtgtccagttcactttcacaaaagtggtgccggtggcttccgctaccgcgcgcaaagtgatttcggcggcgggccgggccagagcgtacccgccttcagcaccctctttagtggcgatgagtccggctgaggcgagcggtcgcattactttgcgcacgcgcgccgcattggtacatatgttctcggccaggatctgactgggcaggtgtgtggcgcgatggtcaaggtagaccaatgcgtgcactgccagtgaatggtcgccgttcatgaaacgacctccttaccgagtcgatactgtaactatgatgtgtacagttatgatactgtaatcatatcagatacagttagtgtgtcaaatcggggttgaagaggtggatgactatgtgtataagtgaggtgtccacatggttatccacaatgaatgtgcgtaagtgaagctaggaccacatacctcggatcggcttccgtttccgcacccactacccatatggtggtgtcatgaacaggatgaccgacggcatcaccaactatggagctctgccaggctctatatacgatcagcctccggaagaatcggaggcagtttttgttccgcccgaatttgcggggtcattttctactgactcgaaatacccgacttctcgcgactcgtcatcgccgaacagtggtgcacatgattctgcagcgacaccgaccatgagcgaaagcctcgcccagcgcagacgcgacatggtcgcacgctgcaccgaggaagcgaaacgggcgggcaagaagctgcttttcggcatgaccacttccctcgctctgcaatccgtaccgattcccgccgattgcgacctcgactcggccaagctgcacactgtatccagcgttaagggcaagcggtttcgtacacgccatgcaccactgcaaacgcatatttggaaacatgcggctaaagccgccaatgtggaaatgaaccaacacgtgtttgcgctggacctgtttcacgtatgggcccaacttgccccgtatgtttcttttgagtccctgattgtgctcggggatgccgtcatcgctgctacgagcaaacagccagtattggccaaggatcgtgatgctgctgcaatctatcaggatctggtgaagttcgtggagcaatttacccgattcagagggcgcccgtcctgcgttcgagcattgcctctgatatcacctggtgctgattcgcccaaagaatcagaagaacgactctctctggtagcgcatgggattccacagccggttgcgaactatgtggtgccggatgcggcttttgcatctggagctcccataacgttggacttagcgtggccggagttcaaggtcgctgttgaatatgatggcgatcatcatcgtacgagtaaggctcaatggcgccgtgaccaagagaaaaggggtgtgctggtcgggcggagatggctggtcttcgtcgccacggcggcaagtatcgctaacgaggacgctcgtgctgaattcgctttcaacgtggcgagggcgcttgcttcgcgcggtgccgtattcgagtttcatgtagttgccatgtctcttgaagagttggcgcagagcctgctgtgaccatgatgttcgaaacggactgatgtaaaggcaatatttgtacgacctgttgttgtggtgtgtgcttgatattgcatgccgttcgattgcgatgcctcgtagtgatggatttcgtgaatgactagtgttcgattgtggagggaaatgtgtcatagtggtcgattgggggtgttgtcggtgcattgagtgtggatttgcgccaatgggtgtgggacgctacgcatgttttgccgatttttgcgtggcgtcccacggcccctcgggtaatggctgtgacgggtgtggcaggaatggcgtctttccggggtttccagtttgagtgtgtgggatgggggaaatgtaaaacgattgacttagctgttgtcccacgcttttgtgggatggcagctctggaatgggcaaattcgtcgtggcgtcccacaacgatgttaaaactcgaccatgatgcaagccgaccgaacgcttcggcggtcatctggccgctgtgaccccacaatgatgatgggaaactcggtcataatataggtagtcgaacgtttcgcggtcatctggccgtcctgccctgcagtgatgttgagaaaatgcagtcatggtgcatgaggagaaccgttgacctgcgtgtttcagtggtcgcgaactgcatatgcgctaaaaaaagctctgcagtggattgtatgaatccaatgcagagccttattggttgctgtgaacgcgactaacgcagcgatttcactcgctcagggccttgtcgaccacgacggtggcctcgtcgagcaccttgtccagagcctcgggggagacgaaggactcggcgtacaccttgtagatgttctcggtgccggaggggcgggcggcgaaccagttgtccttggtggtgaccttcagaccgccgatcttggcgtggttgcccggtgcctcggtcagcttggcggtgatgtcttcgccagccagggtggaggcggtcacgtcgtcgccggacagtgccgcgaacttggccttctgctccagtgtggtcggggtgtcgacgcgcttgtaccaagactcgccgaagcgctcgacctgctcctggtgaagctgggccgggttcttgccggtcttggcagtgatctcggcggccagcaggtcggggatcagaccatccttatcggtggtccacacgcggccatccttgcgcaggaagctcatgccggagctctcctcgccgccgaaggcgacttcgccgctgaacagcgggtccacgaaccacttgaagcccaccggcacttcgatgaccttcgcgttgatcgatgcggccacgcggtcgatcagggaagaggagaccagcgtcttgcccacggctgcgccctcaggccagcccggacggttgccgccgaacaggtactccacgcacacggcgatgtagtggttcgggttcatcacgccccagttcgggcagacgatgccgtggcggtcggcgtccgggtcggtgccgccgaccagatcgtacttgtcccaagcgccggcgttgagctcgtcgaccaggcccttcatggcgtacggggaagacgggtccatgcgaatcttgccgtcgtggtcgatggtcatgaagcgccaggtcgggtcgacctcaggacgcaccacgccgatgttcaggccgtacttctcgttgatgagcggccagtagttcacggaagcgccgccgagcggatcgatgcccagacgcacgccggagttgcggatcacgtcgaagtcgatgacgttctccaggtcgtccacgtagtgctcgcggaagtcgaagccctcgacgtactcggacttgatggcctcctcgtagggcacacgcttgatggacttgaagtcgccgagcagctcgttggcgcgagcggcgatggcgttggtggtctcggccggggccgggccgccggtgacggggtcgtacttgaagccaccgtcggtgggcgggttgtgggacggcgtgacgacgatgccgtcggcgaggccctcgccctcgaagcgctgggtgccgtcgaccgcacggttgtgggtcaggatggcctgggagaccaccggggtgggcacgaagtcgtcacgggagtcgacgcgcacgtgcacgccgttggcgacgagcacctcgatggcggtcttcttggccgggccggacagcgcgtgggtgtcggagccgaggtacagcgggccggtgacgccggccttcttgcggtattcggcgatggcctgggagatggcgatgatgtgggcctcgttgaacgaggtcttcagggacgatccgcggtgaccggaggtgccgaagatgacacgctgctcggggacttcgggatcggggacgaggtcatagtacttgccgataacctcatcgacattaatcagatctgctggggtggcgggctgacccgcattgtttgctaccatgttccctattctgccacgtttttcgccactttgggtactcttatgttaagagttgtcaacttttgtgcgaatcgtgtgccggttgtctagcgcttggtcatttccttctcgatttcctccagcgacttgcccttggtctcgggcaccaagcgcagcacgaacgggatggacagggccgagaacacgccgaaaatcgcgaacgggccgcccacattgttgccgaacgcatcgagcagcacgaggaagaactgggagacgatgaagttgcccagccagttcgccgccgagccgaaggatgagccgatgccgcgcacgctcagcgggaagatctcgccgataagcacccaggcgatcgggccccacgagaccgcaaagccgaggatatagaaagcgatgagaatcatcgtcggcactgccagcacggccacgtcgcccacgaagttcatcacggcgagcaccgcgagcgaaacggtcatcacggtggaaccgaagatcagcatgcccttgcgcgggaaacgatccatgataagcgtggccacgatggtgctcacgaagttcaccacgccgatgcccaccgacacccagatcgcgtcgccttcagggaagccgaagcccttgatgaacacctgcggcaggaagtagatcaccgagttgatgcccacgagctgctggaacagcatgataccgatggcggccaccagcgccggacgagcgatacggaacagttcgcgcacaccacccttggtgtcctgtgcggccacggccttgatttcgtccagctcaatctgcacctgggtctgatccacgtccttgcgaatcagcgtaagcactttgaaggcgttgcgggtgtcgcccttgttcaccagataacgcggggattcgggcagcaacaggccgccgagcagcaacaaggcggccggcaccagcgccgaaccgagcatccagcgccagtcgcggatgccgaagaggttgtggttcaggaatccgaggttggaggcgtaggccagcagaatgccgaaggtgaccatgagctggaacagcgtggacagtgagccgcgacgctccttcggcgccagttcggccaagtacgccggggtcagggcggaggccgcgccgacggcgagacccaggatgatgcgggcgcacaccatcatcgcgaatccggtggaggaggcgcacaggcctgagccgagcaggaacagcagcgcggagacgatgagcagcttcttgcggccgaaccggtcagacagtgcgccgatcgacagcgcgcctgcgcacgagccgatcagcaccgaggaggtgatgaagccggtctgagagacgctcaggccgaagtccgattcgataagcggggaggcgccggagatgatgccggtgtcgaaaccgaacagcatgccgccgagcgcgccgaaggtgaagatgaatgcgctgttgagcgggaagcgcgtggagaagccgtgcgattcggcggcttcgaggtcctcgattgcgttggctgccgcgtttgtggccgcgcccgccactccggccacgccggtttcgatggtttcgattgcggtggccgccgcaccggttgcgctggtttcctgcgccgcggatgccgtctgtttcgatacgggtgatgccgttgtcgtcgtcattgccttgtcctttcgccgttgacggaccgcgcctgttgcgtggcccctctgccgcgtgcaaggtcaggcttcgattgtctgcagtcgcccgaaaacaaaaaaagacctggaacaacgtggaattcgcatattacgatacgcaaattccacgtcgctccaggtcttgcctcgttttgagtaacaaccctgctacgcaacgtgtgtgaaagatagaatacgacttccgcagtcgcgacactccgaataggcagcaaaaaacgatgatttttgacaacgattgcaggattctgcatggtggaatgatgtcggaatgggcgctgcggcaaatacggagaacgggtgtggcgaagcatcatcgcggaacattatggcgggacaccatcgcggagcaccgtagcgcatagttgccgtttcgcgatgctttgccggcattgccgtgcttttggggcacccagcgccgataatggaacacagtggcatacggcagcaaggaggaaccgtggcgaacgcatcgaacgcaacgcctgcagtgattgcggcgcgcatcgtcgatgccgtcggcggccccgcgaacattaccagcctgacccattgcgccacgcgactgcacttcgaactggccgatgccggccatgtcaaccagcacggtcttgaatccatccccggagtcctcggtgcattcccgcgagccggcaatcgttatcaggtcatcatcggcggagcggtcgcctcggtgtacgagcagctcgttcggctgcggacggcgcgattgatgccggcagcgcaattgccatcggcagtgatgcagtcagcgtcgcagtcaacgcaacccactcagtcaacgcaacccactcagtcaatgcagcccactcagccagcgcagcccgcgcagtcagcgcaatccacacagcccacgcaacccgcgcagtccgcgccgtacctttccgacgatgccgcaccatcgcgcgatactgccaccgacgccgaacaaagttgcggcccatccaatacatcccgtcacttcacgcctcgtaccgtccgcgagtggggcagtgccgtccgcgcttgggctgccgcgtttttcgactacctgtctgactcgttccgcccgattctgggtgtactgctcggtgcctcgctggtcatcgccatcgtcaacgtgatcgttgcactcggcatcgtgcctgacggcgagacctccgccggctggatactactcaaggcgatttgggagggtgtgttcaccgttctgccgattatgatcgcctacaatgcggccaagaaactggacgtcgacccctggctcggcggcgcgattatggccgcgctgatgaccccgcagtttactggcgtgatgtccggaatgtccggaatgtccgggacgtccgtatccagcgccctctccggggcgattcaatgctcggccaacgccgtattcggcgccgaaacctgcaccgtgtcggcgttcggcataccgattcaactcaacgactacggcggcaacgtcttcgtgccgttgctcatggctgccgtgctcgccgtggtctaccacgggttgaagcgcgtcattcccgacagcgtacagctggtgttcgtgccattcctctcactggtcgtcgtttttgcg

SEQ ID NO: 3197 - DNA, 26371 bp, Unknown
  R53_2m  MAG No. k141_3495
acggacgcatgccggtgccgcgataccagtccataatcgcctcatgcgagggcagcgtgtgctcccgtttgaatcgcagatactgttccgaatcccgggtaaccatgctccccacgctaatcagccgttcacatatcggccgatattatctcacaattcagccaagcagggcgtcgcggcgggcgatgagcccgtcaatcgcggcctcgccttcgatgacggtgaaggtcagggacttacgttcgctggtctgcggggcgatggtgtgcaggtcgccgcgctgctcgtgccagccgcggccgtggacgctggagttcgagggttcgaggccgaccacgtagtcgcccgcacccatcgacttccattccatgaagtatgggaagaggctggcgtcgaagtcgatgacgactccaagtccgagcttgcggttgaccacggcggcgaagctgcggccgttctcgtcggcggcgagctcgtgcaggtacacgctttcggggcggttcgcctcgggtgcttggatttcgttccacggcgtggtgtcggctgcggtggtctcgtcacgcggggtggccttgcggctggggatcacgacttcggcgccttcggcgagcaacggccagccgaagttgcagtggtacatccacatcagcggctcgtcgcggaaggattcgttggtcacctcatcctcgaccgtgatcgacggctggccgtacacgctggtgatcttgcggcgcatcaccagattctcgccgaacagttcggcctcgcgcatttcgccggagacctcgagcacgtagtcgccttcggcggtccagtgggcgtcggagcccacatgctcggccggcgtggtgcggatgcggccgtgcatcgggaagctgccggccgggtacttgccgccctcaggcgtgacgtacggcgcgcagatgttctcgaagccgcaggtgaagaacaggccgcccatgatggagcgctgcgcctccagcccgttggtgtcgaactggttgcggccgttcaggcccggcttggacaggaaggtgaggttctcgccgcggtattcgaactggcagacgtcgagggcgcggtcggccatggatacgaagcgtagcgggccgttcttcacctcgatggccttgagaccgtgggcacggccctcctggtactcgatcgggcgcacgtaggcggcctgctgaaggctgcccatgtgggccaacatgtcggctcgcgtattgtgttctgtggatgtcatcgtcgtcaccgctccttgcaatcatcggcttgttgtccgtgtgcacatcatactgtaagcgttttccgcaattgtcgctatcaacaacgtatacgcatgtcgaaaagttggaccgaagaacaacgcaagcacaacgaaggctccccgaagggagccttccatcgtagcacacgttacgcgagaattcgtcgctcgcgctttacgcttccgcggcatcgtccttcagcgcacgcagcagggccttgttgcgggtttcgatgatgcgcttgccgtcctcgccctgccaagagaagaagccctgaccggtcttggcaccgaggttgccttccttgaccttttcggcgagcagcgggctcgggccggtgccgttgtccatgtcgtcgaacaggtaggtgctgatgttgtagaacacgtcgagtccgccgaggtcgatgctggcgatcgggccgaccaggttccagcggcggccgaggctgtacttcatcacgtcgtccacggtggccgcgtccgctatgccctgctggacgatgtagaacgcctcgcgcaacacggccagctgcaggcggttgcccacaaagcccagcgattccttcttgatctttgccggcttcttgccgatcttggccatgaggtcgaaggtgatgtccaccaccttcggatcggtcttttcacccggcaccacttcgaccagcggcatcaactgcgcggggttccagaagtgcgccaccacgaagcgctcggggtgccccatcaccgactgcagcgcggtggggctcaggccggaggtgttcgtggacagaatcgcgtccttgggggcggcgtgctccacttcggcccagacggacttcttgatgtcaaggttctcggccacggattcgatgacgaagtccacgtccgccacgccgctcgcatagtcggcgtaaccggtgatgcgggccagcaccgtgtccacggtgtcgccggccttgagcagtccggcttcggcgaagtcctcggcatcagaacggatcgccttcatcgccttctccagcgaggcctcgctgcggccgaccagatgcaccggatatccggccagcgcgaactgcaacgtgatcgcatggcccattgttcccgtgccgacgttcgcaatcgtcttgatatcgtccgctgtctcaatcatggagaccccttctttccggcggttcgcctggcgttggcgtacgcaggaacagcaccgtgccgttatgcgtttgctcgcattctatgccgatttcgctacgtgaacatttactgaacatttcgcggattcgactagcacaaatccctatatcagcacaaaagcccgttgtctatttagaagtgcaacatccttgttgttcggttaatgatagtagttcgtcggcgaatgcctcggccggggtgcggtagccgagcacgcgcatgggacggtcgtcggtctcgtccacgatggcctgtatctcgtcggccatggacgggtcgacgcgcgtgcgcttgggcaggtagcggcggatcgcgccgttgcggttctcgttgccgccgcgccggcacgacgggtacggggcggtgaagtaggcggccatgccgagccgttcgcgcagttccgcgtggcgggcgaactcggtgccgttgtcgtgcgtgacgccggtcctggcgcggcggcgtccggccttccggtgcgcggggccggagatgtggcaccggccggtccacggccccgtcttgagacgctccggccggtacggccggtaggattcgttctcgttggacgggaaccatgtgttgcgtttgattccgcggctgaccgtggagacgtgtctgccgatcaggccggcgatccgccgtatgctcgtcccgttgccgatctctatccggatgatccgccgttcctcttccgacaggtgcgaatacacttgacccaaggcgcgacaccccttcactggttatctggacaatctccaatctaaagggtgtcgcactttcaaatagacaacgggggcaacaagtcagcgggcaagcggcacggccccgacaagccgcgcaatccgctcactaacggaacagcgagacgcccctgcgggccatgcagaatgcgttgccaagccacgtgtgcttggaattcggccacaccgcaccgagcctcggggcgttctggctcagccagatgctgggcacgcggccgtcggcgctgcgcgagcccagcaggttgaacccgtttttctcctgaagccagcccggatgctgcgtggcgatggccagtccctcctcgagcgtgaacggaatgcgctcgtcggagtcaatgagcttgcgggccacgtcgggctcgcggtttgtgtgtacttggtaccggtgcgcggttccacgacgatgtagaacggtccctcgggcggctcgaagccgtcctgcggcaaaaagctcgcgatgtcgcgcggcggcatcgtggcgaaaccggccatgcggttgatcgacgtacgggaaatcagcgattcgggcgacaccagctcgcgcgtgggcgccagcaggatgcgctcgtcaaaatcggtatgctccagcgcctcgatcagcggacgggccagggagcggaacgccgcggcgctcacatccgccacgtccgggtaccccaatgccacgatgcggtccaactggcgctgcgcttctaccgacgccttcgacatgactcccagtgtagagcatcgcggcggggcggtgccgtgacgttccagccggttccggcgtcccgtcgcaccggcgatccggcccagcatacgggcacccggttcttcttgttccgcccgattcgtaagattgatggatacgtgtggccatttcgctacggctgcccgaacgtgaaatcaatccgtcaaacccagaaggttgttatgtccgaaaagttgaaagtcggcattctcggcgccaccggtatggtcggtcagcgttttatcacgctgcttgagaatcacccgtggttcgaggtggtcacccttgccgcttccgcgcacagcgccggcaagacgtatgccgaggcggtcggagaccgttggaagatggaaaccccgatgcccgaatacgtcaagaacatggtggtcgtcgatggcgacgatgccgagtccgtggcctctggcgttgatttcatgttctctgcggtaaacatgccgaaggaccagattcgcgccattgaagagcgttatgccaagaccgagaccccggtggtctccaacaacagcgctcaccgttggaccccggacgtgccgatggtggtgccggagatcaacccggagcacttcgaggtgatcgagcaccagcgcaagcgcttgggcaccactcgtggtttcatcgccgtcaagccgaactgctcgattcagacctacacgccggcactggccgcatggaaggaattcgagccgcgtgaggtggttgtgagcacctatcaggcgatttccggcgcaggcaagaccttcaaggattggcctgagatggtgggcaacatcatcccgttcatctctggtgaagaagcgaagtccgagaaggaaccgctcaaggtgttcggccatgtggacgccgaaaagggcgagatcgtgccgttcgacggcgacctcaagatcacttcgcaatgcatccgcgtgcccgtgctcaacggtcacaccgccaccgtgttcctgaacttcggcaagaaggccaccaaggaagagcttatcgaccgtctggtgaactacacgtccaaggcttccgagctggagctgccgcacgcgccgaagcacttcatccagtacctcaccgaggatgaccgcccgcaggtcaagctcgacgtggactacgagggtggcatgggcgtttccatcggccgtctgcgtgaggattccatcttcgattggaagttcgtgggtctggcccacaacaccctgcgtggtgcagccggcggcgccctcgaatgcgccgaaatgctcaaggctctaggctacatcactaagaagtagttgaatctcgttaaaatcgcaaaagccctccgcaaggagggctttcatcgtattaggcgcggaattcgcggctcagcggccagtaccgccgtacaccacggcttcgatctgatcggcatcgagaccgtatgcagtgtgcagcgccttgacggcgtcgttcagctggtcgagcggcacaagcgcggcgatacgaatctcggaagtggaaatcatcagcacgttgatgccctcatcgctcagggcctggaagaacttggcagccagaccggcgtgggtcttcatgccaacacccaccacggctaccttgccgacgttggtgttcacatcaaaggagtggtaacccagcacttcctgcttgtcgagcagcgtgttctgcacctgcttgacggccgattcgggcacggtgaaggagatgtctgcagtgccaacggatgcgccggcctgcacgatcatgtccacgttcacgtcggcggtggccagctcggtgaacaccttggctgccatacccggctcgttcggcacgccacgcacggtggccagcgcctcggaacgatcgtgggcaatgccggaaatcaccggtgcctcggggcccaggtcagggaacaggtcgcccatggatttcgcttcttcttcagtcatgtcttgccttgtcttggttgaaattacttacgattattgttcgctgtagccgcgctcagtcgaggttcggcagcgtgcgcgggtcaatgccgtcaggcacaaccagcgtgccggggcgacgggagaacgaagagcgcacatgcagcggcatgttgaaacgctgagcgtactctacgcagcgcagtgccagcaccttggagccgcaggaggccatttccagaatggcttcgtagccgatggaaggaatacggcgggcggaaggcacgatgcgcggatcggcggtaaagatgccgtccacgtcggtgtaaatctcgcagatgtcggcaccaagggccacagcgagtgccacggcggacgtgtccgaaccaccgcggccgagcgtggtggcgtcacccttggcgttgatgccctggaagccggcaacgatggcgatgtctcccaatgagagcgcgttcttcacgcggtccggtctcacggccttgatgtgggccgcgccgtaacgggtgtcggtgaagaagccggcctgctgaccggtgaaggagtgggcgcggctgccttcggcgtgaatggccatggccagcaggctcatggaaattcgctcgcctgcagtcatcagcatatccatctcgcgctcgggcgggttggagtcgatgctcagcgcctgatcgataaggtcatcggtggtatcgcccatggcggagaccaccacggccaccttattgcccttcttctccgtctccacaacgcgcttggccacacgtttgatcgaatcggtatcggcgaccgacgagccgccgtacttctgcacgatgagagccactgctgtcctttgttcttctcttagggatttgtttggtcgatattctacgcaaacgcaacgattataagggctgtcgcgttcaccccgcgaccccgcgccggcatgcggacacgggtatggcctacgttgttcagcaaatattcaagttttcaccggtggttctttgagacagccgcatccatcctttgagattcgagcggttaactatcaattaccggcaaacgaaagcaaaccggcgaggtttccgcagaaccccataactgaataccttcttcttcctctctccttttcaaggcccggtcccgctctattgtggaagttggaccattttcgttgtggaagttggaccatccctattagggaagttggacactagattacgaactagactttttcggacttcttatacccctacattgcccctatatggcccctatatggccctcgtcggcatgttgcatgaaaggcttggtgcggagtaacgtttcgcagtgtggcacgtgcggcgttgccacttgcggcagcacctatgccaaccacgactaagacgggccggctgtcttgtataagcaaatcatgagcagatcaagcgaaggaacaggcgactatggcattgctgcatcgacgttcgacgagtaaccgtgcctcacagaaaatgcgggaaaacaacgcggccatgcctgatgacacatctgcaaatgacaacgtttccccagcgcatcccgagcccacagcattcgttccaactccatttgacgaagtcatcgatattagcgatctcgtggccgagcgccgacgcctgcaacgcaatctgtgggcgatgcgcatcatcaccattgtgttgctgatcgccgcaatcgccgtggcctgtttcccgctagcgttgcaattcgagtccgaccgcaacttggccgccaccacagccaccacagccaaagaagtagccggctggccttacccgcaggcgaaagacaagctcacggcggcccgcgcatacaacaagaagctcgctgaatccggccagcccatcttgggtgaagccgtcgatccgttctccgccgcccaaggaggatcccaagccagcggcgaggattccgcctcaaagaaagacaaggaataccagtcactgcttaataccggcaacggcgtgatgggcgcaatcaaggtgcccaaacagtccatcaatctgccgatttatcacggcacttccgaggaagcactggcttctggtgccggccacttgtacggcacgtcgctgccggtgggaggtaaatccacccattcggtcattaccgggcaccgcgggttggttgaagcgctgatgttcacccgtttggacgaggtgaaagagggcgacttcttctacatcgaagtcatgggcgaaactttgggctacaaagtggaccgcatttcggtgattttgccggatgacacgtcgaagctcaagattgtgccgggtgaggaccgtgtcaccttgatgacctgtacgccatacggcgtgaacacgcatcgactgcttgtctccgggcaccgcgtggcaattccgatgccggcccccgagccgaatgacgtgcttgacgcgcgcaatatcgcccttggtgttggcctgggcatactggcggcaggactgttcattatctggttggcacgacggcacaaggccgcgcgcatcatccgccacggcgcattctggccgtggatgcgccgcaagggcgaaagcgccaatgatacgctggcctaggcctcacgccgaccggccagcgccctgcccagcgtgatttcgtcggcgtactccaagtcggagcccaccggcaggccgctggcaagtcgggtgaccttgacacctacgggtcgcaatagctgggtcaagtagctggtggtggcctcgccttcaatattcgggtcgagcgccataatgacttccttgacctcatcgccttctaagcgtttgagcagactgggaatacgcaggtcggcagggccaacgttggccattgggttgattgcgccgccgagcacatggtataggccgcggtattcgcgcgtgcgctcgatgctcatcacgtccttgggctcttcaaccacgcagatcaccgaacggtcgcgtctcgggtcggcgcataccgggcaggggctggattcgcacacgttgccgcaaatatcacagaagcggatcttggccttgacctcctcgatggcctcggccaaatcgcgcgcttcatcttcgggcgcggacagcatgtagaaggcgatacgctgcgcgcccttcggcccgatgccgggcagccgcccgaaagcgtcgatcagtcgctgtattgcgccgtcataagcaagtgccatgggtattcctcgttattcgtcctcattattcatccgagtgcttcttggcaggctggatgttcttggggttcttcggatcatctgccgcgaattgctcgacttttttgacctcgaatagctttttcagatcgtcaagattcatggccgtcgcctcgccgagcgactggtcgttcatcgagtattcgtcgtcctcggccgcgacttgcggttgcggctgcggctggctattccacgggtcggcattcggcgtcggctgtgcgggctgcggttgattccacgggtcatcgccggcagccggctgcggaaccgattggggctggttccacgggtcatcgcccgacatattgcccgacatattgcccgacactgtctgaggaaccgaagaagccggagtctgggactgcggctgattccacggatcatcgtgaggagactgctgatatggctggttccacgggtcggcttcgaccggttgcagtgccagcgaggccgtagcctgagattgcggctgattccatggatcatcgcttgcgccggcaactgccgtagcgggagctgcggtggctggctgccccgtggactgtccagtgggtccagcggacgcaacggacgcagcgggtgcaacaggagcagccggagcggcccacggatcaacaccatcactgatgtccggaaccgcaacatgcttcttgtgatgctcttcgggcgcaggcgcagcagcgggctcgttaggtgcgaacccgtctgcagattgcggtgaagcgttgcttacggccggcttggcccaagggtcatcgtcactccagctcttcgccgccgtggatgcactggattggccggctcgatggctgtcgtccgtatcctcggcttggcctgttgcagtcggcttcggagctttcggctcgctccccatatgaatgcccagacccgcgcccaaactcgacgcggccaatccggccttggccatggcaatctgctgcttgaccttggccaattgctccgggctcatacgtttgacggattcgactcgctcgccattcgccgcgaccgcagaaggtgcaataaccgcattggcaccgaactcgttgcgcacggcatccaacaccacggacgccgccttcttaccgctgttgtccacggccaaggcgaaagcgtgctggctcagcgacttgtcgaacgtcatcgacaggcaaggcagactcttacggttgggaccgaattttacggtcggcaccttgtctcgtgacacatattcacgaatggtttccggcaaagcggcgacggctgcatcccacttctcgtcgatggaccgattatccgatgccgcaggcgaggtcaccggttgggccgggacggccggcgacgtggcgggagcaccccaggcattggcagcagcagttgctgcggcaggttgcgcagacggagagcccgcgggccggtcgctgactgggctgctgacagggccattgtctcccacagcggattcatgggaagcggtgctctgaggcgcggctgcttgctggttgcgtgcagcaccggagaatccaccatgtgaggctccggcaaacccgcctcgcgatgcgccggcaaaaccactggcacccgtaccggaagcggctgacgtagtcgaagtcgaagaagcagccgcaggcggcatgccagaagaagctggcgcgggagcggctgttgcaaagcctgattcactgccggccaacaatcgtgcggccagcagttccaagcgcatacgcggagaaatggctccggtcatggcacccaacgtagtgttgatgatgtctgccatggcggtcagtgcgcccagtcccagcgccttggcttggcggtgcagatcgtccatatcctcggcctcagccgtgtcggacagcacggattccgcacggtccccggccaacgtaagcaccagcagatcacgcacacgagccagcaggtcttcgacgaatcgtctcggatcgaatccgccgaccacgactttctggataacgccgtacagggcttcgccgttgtgattgattaccgcatccactgcctcaccgatcagcgcctccggcgtgaagccgagcagggctacagcggcatcatgggtgataacgccttcgaccgaaccaaccatcagctggtcaagcacagacagggtatctcgcatggagccgccaccggcgcgcatcgccagtttcagcacaccgggctcgggcttgatgccttccttgtcgcagatcgtctccaggtagggacccatgacttcctgcggcaccagacggaacggatagtggtgggtgcgcgaacggatggtgccgatcaccttgtctggttcggtggtggcgaagatgaacatcacatgttcaggcggctcttcaacgattttaagcagcgcattgaagccctgctgcgtgaccatatgggcctcatcgagaatgaaaatcttatagcggtcgcgcgcaggggcgaaaccagcgcgttctcgcaattctcgagcatcatccacaccgttgtgcgaggccgcatcgatttcgaccacgtcgatggaacccggaccgccggtggccaggtccttgcagctttcgcattcgccgcaggggtgggaagtcggccctttggcacagttgacgcaacgggccaggatacgcgcggagctggttttaccgcatcctcgcggccctgagaacagataggcatgcgtaagcttgccttcgtccaaggcgcgcatcagcgggaccgtgacttggtcctggccgatgaccccttcgaaggtgtccggacgatagcgacgatacagtgcaagtgccatagctactaacctacctttgccctcagaattaaccgataaaaagtcaagataaaccgggctcatagctgccgaatcgggaaaactctttatattccaacgacattcatctgacaacggttaccgcatttttattgttattaaccgctttctttgtattaacatagtgtcaataacggttgtagtcaggaggtacccatgagcgatatcctcgacgagaaacgccccacccgtggcgatgcccggcgcgacgccatcgtgcaagccgcgcgcaaggtgtgtctggaaaaaggcttctccaaaatcaccgtttccgacatcgcaagcgaagtcggtatgacgcgttcgctgttctaccactacttcgaagacaaggaagccgtagccgacgcagtactcgatgacgtcatcgacgaaatcctcaccacgttgaagcagtggaaccaagcgcgcgaaacaggcaacgtgaacaaggcattagacgacatcgtgcatgtgctccgttccctaatcgccgacgagagccccttctcaaaccgtatgatccaagatggcaacgccgaactgtatatcaagttcattgaccgcgcggcggaccgtattgccgactacattgcccagaccaccgtacgtgatttcgagcagatgcatggtctgccaatcaccaatgtccatgagacattcttcacgctaatcgtggggcttatctcgctggttcgctcgcatccgaacatcagcgaccgaaccatcaaagaggtcatggcgcagacgctgcatatcgaaagctatgtcgtctgaggtctgacggccattggctctggtaccgctctcccgcactcccctcagtccgcttcgcggccagctcgtccgcaattgcggacagcctacggctgactttcttctggttcgactatcgtcgaaccctcgcctacaaacatcccactgggctgtttgctttacggctcagcctaatgaggggagccaatataatcaggtcaggcgaactggccggttacggggtcgcgaccgtctcgggcgatggcgtcgagcacttcctgtcgggagtccacctcacgggcggctacggccggcggtaccagcacgcgtagcgcgcagtcctcggccactaccctgaatggcagatgcccgatgtattcgccgtccgccatcagcaccggtggctcgtcgccttctgcggctcgcgtgacttcgatctcgcgtatgcgcttccacccgaacacctttgaggcgagcagcttgccgttataggcgttcgagatggccaccgcacattcgccgaagttcggcacatgattcatccacaccaggtccaacagcccgtcggagaagcaggagtacggtgagacctcgatgccgccaccgatatgacgcgaattcgcaatcgtcagcaacggcgtgatgatgtctcgttcatccgtggtaccgtccgccagcgtggccttgacgtggtacccataacgcttcatatgcgtcagctccaccagcaccgccgcaaaatagcgcatggtgccggtcggcagatgcgaatgattcgcacggtcgttgatacttgcgtcaagaccacaggacagcatgcccgcatagtaccggtcaatcgggtgctcggcagacttgttctcccggtactcgtattccccgccggtggatgggttcacggcatagccaccatccaaagaggtcacgcgtcccatgtccacatcaatgtgtgatccgcgcacgatagcgccgacgataccttccactgcggtttcgatgcgattgaccggcagcttaagtccccgagcgaaatcgttgcccgagcccatggccacgatgcccagcggcttaccgccgcaacccacggcattggcaccgagtgcgatcatgccgtcgccgccgaccaccaccagatagtcgtactcgtgcgcgcgttcacgcgcctggttcagggaatcgtcgaaacttacgccggtgatgtcgatgacgtcgaagttatgggcacggccggcgtcctccagcagtcccaatactcgcgcatccaccttggcaccacggcccttatcggaagtgggattgcccaccatggccaccacgcgacggcgttctgtgcgttcactctcgctcatgctctcaccttaaccaaaggtccagaagcccgccagagcatcagtgcttacggtccattattgtgataattgtctccttccgtacaattcaccggtccggcccgagccatccgctccacggatgatgccaccggaaccatggtttccaccttgatggttaccaacacgtcttcatcccgcacggagcaggagcccagcgtgacgccattcgcttcagccatgtttgcagcaagcgcgcatggatcaccgatatccacatgccacagcgcatacgcggcgtcaaaggcgatgagatcggcgagggaacgcgctcgattctggcagatcatgaggttgcccacacttgccgccaccgcgagcgcaatgcccaccgccataaccagcatggctccggccatcgtgcccgatccctcctcataacgcattccctgcaccgcagttcctttctattgcggccgcccagccagcagccgaccagttattggcttatcgccgtagcgttgccggtgacccgcgttggagtgacatccagtgggccgggcagtaccgaacattcgaccatcacgctcgtcgattggccgttgtgggcaatgctgacgcggggatctccccctgcaacgtccgcagctatgctgcgcgcggatgattcgtcaccggtaaccacaaactcgcgtgcagccgccgtcgcggcaccttggcagtccatggaaacgatgaccacacgtcccattgccagtatcagcccggcgatggcgataacgctgggcaatacgatcgcgaattcggcggtggccgatcccgtgcataggtctggcggcagtctggcgagcctccaccggcatctcatggtcttcatggctgtcacccgactttcagagcctgtttgatgatgttggtcagcaacgtcttgatggcatccgacttcaggatggcgaccagcaccgccgcaaagcctgtagccgcaacgagtacgactgcgtattccgcagtggctgcgccttcttcgggctcagccatgagggcgcggatgcgtgcgtccatgaggcatagccgttctttcgccttggcgttcagcgtggccacacgagccttgctgtgcgcaaagatgccggcctgcccgtcgacgatgacggggataggggtattcattggcgttcctttcggtaaggaggggaagctgcgcagtggcttcgcaccttccccatgcgtatgtgagtggttggcccccgcgccgggttgacgcggggtgcataccactgtggactatcaacgcttcatgcaccaggaaaaacggggtatgtggttctagcttgccgagttatccacacctcgacgtgtcgtccaccacaaatgtggataaccaaacgcagccaagtacaataccgagcaatacaacaagattcagcctaagcgcactcagttcacgcctatattcacatcatgaaggacgcaatcgccggaatgactcctaccagcacgaatgccggcagaaaacatagccctgtaggcatcagtagctttaccgacagcttcgcggcattccgttcgatagcagcacgctcgtcacggtccagctgttcaatggcggattcgaggcgcacaccaggcatatcgccatgcgtccatgacgattccaaagccgattgcagcaggccaagatctcgttgcgtggtattcgtatttcccttggatggactatcagctggcgcaccctcatgctgaacagccatagcggcatgccacgcatcagcccagggaacccctctggtcagggagttcccgacctcgctcatgcgagcgccgcagtcgccgccgacggctttgcccaccatgtcaagcgcccggggaatcgaggagccctgacgcaaggacacctgcaacatacgcaatatgagtatggtccatgacgacccgcaatcatgcgctacggccggctcctcgcccggcaagcggctgtcatgacgagacagagccttatacagccaaccagcaatcgccgcacagcctgccgcggcgtgtacccacaccgtactcataatccgctgcctttcaacaatgcccgcatccatgccaagccggcagcataacaacatcctcccaatgtcaagcagaccacaccgcgtggcgatccaagcaagaacgccaatggtctagctcccagaagctcgcccaatgccacagtgacggccggaagcgcgctcagcagccccacagtggctttaggaacggcacatgcttgcgatcgcaagttctgcatcagcctcatctgccggtaagcagtcaataccgcttccagacatggcaccgcttggcaaccgagctcatcgctcaaaaccgctgcggcggcgaccccgcgtgcagcttcaagtacctgcgctggtgattcgtcgggcagacgccgctgttcgaacaccgttatgagccgttccacagtaatgcgatgagtggcgaagcgtctgctggattgttcctcgaatgcttcaaccaatgtgccgccacctcgcaatcgcgcgatggcggacgtaatcacctgcgcaacgcccacgcgaggtgagtcggcatatcgaggttcgtttatggctgcggaatcgaccgcgcgcccgcggtaagccagccggtacagcctcccggacttgttccccggccatatcagcacggcgagcgccaccagaacagcacaccacatcatcacccaccaccactcggcctgggaacgatgccccatcgttcaatgaagtgcccccattcggcggcataccgaggaggatggcagccattccataccgccagcggtgttcctgccagttcaccatgtgctacgcgcagttcgccgatctgcgtgatacgccgctgtccgttcactcgctccaaatgcaccaccgcgtcgaaagcgcctgccgccagcatggtcaacgcctgtggactgactccggcgagtaatccaagcgaaatcagcctggacggtactcggttcacgccgtccgcatgcacggtggtcatgccaccgtgatgaccagaattgaacgcgcgcaataggtcgacgatttccgcgccacggcattcgcccagcaccacgcggtcggggcgcattcgcaacgtcgctttgaccaagtccgccagacttatggctccgacgccctccacattcgcctcgcgtgttaccaacgagacatgatcgtcgcgtcccagttcccccagttcacgaacttcctctacggtgacgatgcgctcgttcacgtcgcattgcgccagcagcgccttgagcaaggtggtcttgcccacgcctgttccgccggtaatcagcactgtggcatgtttgcgcaccaatcccacgaacgtcggcagccaagcagccgggaatacgcctaatttgctcaggtgctgtagcgatgccatggttcggtcagggaatcgtatggaaatcgcggcaccttgtggcaccaatggggcaatcaccgcatgcacgcggatgccatccggactggcggcatccgctatcgggcaggcatcatccagtctgcgcccgagctgcgcgcacagttggacggcgtattctcgaactacttgcggcgagcggaacggcacatgcaatactgtttcgcgcatgccattgccgcggtccgcccaaacgcggccatcacaggtcaccgccaaatcggtaacctgcgggtcagatgccacgtcatccagcagaccgaagaatatggttctgagcgctgtgccagcctcattggctcgcgtgctgacggcagccatagcatcactggtccttgtgagaagctcccgaaaccgggcgaatggcctgttctacgagatcggcaagcaagttcatggctttgcgactgcctttggtcaccgatctgatgccgaggccttccagtacgtctccgcacagattgacacttggcttgatgggccccaataccgtggcagtcaaatagtcctgcgcctcgccaatacccacgtggcctctcccacgtggagcgccacgtggttccacgccgacgatatgtggcgcttcacagccccatgaatccaatctggaccggtgcgacttggctctggccagccccattaccgacaattccgcggcaatcacctgcaggccactgcgcagatcgggtacggtctcaatgagtccaccctgaccggcatctacgatgacaacgtcgttcgtttccgccaaagcccgaatggccgcttgaacttcccaccagtcaggctggcgcgcgctccaagggtcatagggaagtactcgcacaccctcccacatcatcagctcatggttcatcgcctcaccctcgatacggccgaggggcgcgtcgacttggctgaaccgcaagcccggctctcgttctacaccaagcagcaggtcaaggcatccggccacgaaatcagcgtctatgagaacgcagctgtgttcacgtctcgccaatgtccatgcaagcatggaagccatgacactcaaccccacgcctccatgacctgacgtcatcgttacaatgttatggaagctggtgtctgtagttagggcgagtgccggagcctcgcccgatctctgccgttcgcatgaggccaacggcctgggcggcggagtgtagtagcgatacgctggaattggcgcatcgtccgtgggcagcggaatgcccggaggtgctaccgctggcgaggtgatcctacgcgccacgcggggtgtggtgttgctattcataagccgattgaaacgtgtccgagttcaatgctcaacacgaatcgaccattgtggttctagcttgctgagttatccacaccccggcatgtcgtccacgacaaatgtggataaccacgctgctgtttcacgcccatctcatgcagaaaaggccctgacctcacatgcacagtcagggccttcattttcacgacgattccttatgcggtaatctacatttcttgcttacttatcgaggttcttaaggccgtcttccatagcatccaactgagcatcggtcaccttggccggcttcttcttgccgaacttggccttgagcagaccgatgatggtcggggcgagcgagaccagcagaatcagcacgatcaccagctcgaagtggtcctgtactgccggaatgttaccgaagaagtagcccagcagcgtgaacaacgtggaccagcacaggccgccgagcactgagaacggcgtgaaacggctccaacgcataccggaaataccggagatgaacggcatgaacgtacgaatgaacgggaagaaacggcccaggaacacggccagcgggccccacttctcaatcatgtgctcggttttggccaaacgctccggggtcaaggccttcaccttgccggactggatgatgcgacggccgaagaaatgaccaatgaagtaattgcactggtcgccgataatcggggcgcaccagaccaccggcagcagccagaacagcggcagcgcggccttgccggtcgcggcatcgggagcggcgaacacaccggcggcgaacagcagggagtcgcccggcaggaatgggaagaacaccacacccgtttcgataaatacgatgaggaagatgaagccgagggtcggcgccacgcccatggcaatccaaccggcaatcgcggcacgcggatccttcagcagttcgaggatgaaattaacgaagcccatgtgtttcctatgagtcctaaatcttgtattgagctgccagcccaatgaaccagacagttatatgcaaaccgtcaaataccctaccagccggctaacacaactgctacacctgcggcgaggaagcgcggtaacgcaacgaatactccacatcaatacgccgcctcggcgcccgagcccccgtcttgacctgatcaagaatcgacgtgatggcaatctcagcaatacgcgcgcgctgcggatccacagtggtcagcgagggaatcgtgtacttagcctcatcgatatcatcgaagcccaccacacgcacgctttccggcactcgcacgcgcatttcccgcagctgactgataacacccatcgccagcaaatcattcagcgcaaaaatgccatccggtcgaatgccctgcgcatacatctcacgtaccgcctgagcgccctcggcactggtccattcgccgcactcgcggatcaggttcagatcaggcgtcactccacgttccgcaaaggcgctgagataccccttggttcgcatcgaacgagaggacggcacggattcgtccaacgttccgcccaccacggcgacggtgcggcatccggcctccagcagatgcgtggtagcggcttgggcacccaattcattgggcatcaccacgtgcggcgcaggtgcgttgaagatacgctcgcccagcactaccagcgggtagtcgccctcgagctcggccacatcctccgcccgcatggccgtggggctcaaaataagtccgtcggtcatattgctggccatggcatgtgcgctctcgatctcgcgctggcggtcgtttccggtcgattcgatgatgatgcggtatccatattcccgtgcccgcgtgatcatctcttcggccagttcggaaaagtaaatctggttcaaatccggcagagacaatgagatgagtcctgtgcggccggaacgcaaattgcgagcctgctggttggtcacatagcccagctcgtcaatggcctgctggatacgttcgcgcgtggccggcttcatataggggtaatcgttgaggtaattggacactgatgccacggacacgtgcgcacgtttcgccacatcgtgcagcgtcgccttgcgcgaactcgcaaccatagcgcccccttatgttcagtccatcaaccactcggcatggcaccatccacgtcgccatattggttgtcgaacgtttcagatgtgtgtttccagcataaaccatgtgggatatcgcccccgcaggccgtttcgcttaggcgtccgcagaatcacccccagtcggccttgccgacagccccgctagcagggacgggtccgacacgccgcccacgactcccgctgcaaccgtcaacagactccgccggcggtaataaatcagggccacttcggcaaaccaacaaagaaggcccgccagacaacgagaattcgtaccggacgggcccactcgaggagtagaaactatgcgatattcctatctataggctcacctttcgatggattcgttgacctgctgaatggccttcagcgcggagtcaacggtggcgtcgccggtgtagatgttctgcatctgcacaccgatctcgtcgttgagttcctgggaggtgagcttgcgctcaagcttggaagaggcctggcccttggtcaccaaatcgatgctggccttggcggattccgtggcgtcagacggcacttcgaccttcatgtccttgtcgaccggagcaccctgcagcgtgttgatccactcctgctggccttcgccggtggtcatgaactcgatgaacttcatggcggcctccttcttcttggagtccttgttcacgctcaggccgaagtccacaccagtggtcgggccggtagccttgtctcccacctgcgggaattccatcatgcctagctcgtccttctcaacggccgtgcccttggtctcatcgttcggcagcacggcggaaacgtgccaggagccggtcgggaagaaagcggacttgcgggcgtagaagtagttgtcgcgagcatccgggtaggtcgcagtaccaactgcaccatcctggaacagaccatcaccgatcatctgcttccaagccttcatggtcttgacgaaggtctcatcagtgaacttggccttgccttcggcggccttgtacacgtcaccttcgccgtactggttggacagccacacgaagatatcgtcgaggtgccagccatccttggcgccgagggccagcggcatcagacccttggccttgagttccttgttggcagccacgagctcgtcgtaggtggtgggcaccttgatgccctgctcgtcaagcagcgtcttgttgtacaggatgtattcggagccggaggtgatggtcggcatggccaccatcttgccatccttgttggtggtctgcgccacggcgccctcggccaccttggaatcccagccgggcatgtacttgtcggccagctccttcatatcgtcggcgaaacggccgtactgttccacagtggaaccggcctgcacaccgaacacatccgggccttcgccgccggccatcgaggtctgcagcttcttctggtagtcggccatttcagaagtacgccaccagttgatcttgatattcgggtacttcttctggaaggcggcgtaaatcgacttccactgggcatcggtaggctgccaggtccagaaggtcagctcaaccgggctgtccttggtaccgactccctcatcggagccgccgctgcccgaaccgcatccggcaagcagacctgcagacatagcgagagcgcccactgcggcgatcgccttcttcatgttcaacatgattgttctccttattttccttgtttctcttattggttcacttcgttgtggaagatcatcggaattggatggcgaagccagccacacccgatatgtgcggctgatgttggctcaattgccggacgcactcctttcctcgatgctggattccagcgatgtcctctcgtatccggtcagggatgcgcgatcaagagtgatacgggcacgggccgcattgtccgcaaacggcacctgccaggttttgccacgtaggtgcagtcgcatcgtgccgttcagagcttcgatacggatggtgagcacggctcggcccgaacggtcacggcggacgttgtcttcaaagacacgcagcctggccggctccggggtggaaggcagagacttgccgttgcgcatgaactccacggatgatgccgtgccggacaaacggtattcgccaagagacaacagcgcctgcccacggctcgtctgcccagcgaaatcaaggacgaaacggttgctgaccagcgggtatgccagttcgagtgttaccggacacacgccgctggacctcacgccgccgtcgatgacgagtcggcggtcagcatgcaattctcgaccgagatcccgcaatccggcaccccacagattcacatgttcagtggccgcatatgcgctgaacgcggcccccgttcgcaacgagaacaatcccgcccgaccgggcttatcactgatggtgcaggacgcggcgaaacggccatcaatgcggatctccagcctgcagtagcggcgctcaagccggtactcatgccaggcatgggaatcgaagtcatggaggtcggcattggtcacgcgttcggaggcaacgccgccgatcacatcgaccacgctaattacctgacggccagcatccacctcgagtttggtgaggttgttggcatcctggtaccgcaccacgataccgaatcgtgcgcccagtggggtgacgggagctttggcccagacgtcaatcacttgggttgcggacgatttgcccgacacagcgatgaatacactggattcgtcggcaacaagcgcgtgaccgtccacatcggattcggtgtgggccgcgccggaaataaccgaccatccggcgttcaggccatccgcaaaatcatcatgcacagtgccatacagcggtgcgctttgagcggcggcggtaggtcctggggtgtcgagccctccttcggcgtagtacagcgggtcgatgcgcattacgcgctgttcggtgcccacatacagctcgtcatcggcgttacggccgtggtagacgatccagtcatcaacggcattgggcgctttgactatggagttgtggcccgtgccttcgacctttgggctgcggataagcagcggatcgaagcggttctcgttgagctgtttcgtccaatcgagctgatcgatgtgggcgtcggcctgcttattcggcagctgtgcgtacgagtatccgacgaagtagtcctcatgctcgtaggcgttggccgagtaggtgatgaacgcgcggtcacggtaggcgaagtatgtggcgccttctacggtgtgccagtcgcggccatcgccgaaacggttgcgggcaaagatctcctcgtccatggtgggcacgatgagcgggcgcggtttgttctcacgcgaatacggggtcacaaggcgatcgatcatcacggaggttccgggccggtcatcgctcaggccggtgacctgattgtcggcgtaaagcaagtacaactggccgtcatcgccatagaccacttgggagtcgatggcgaaggtgttgaacagctccgctttcttttcgaacgggccgagcggatcctcgctcacggccacacgcatgatttccgtgtgggtgtcggtctcctcggccggcatattcgagaagtacatgtgaaagacgccgttgatgagaatcaccgatggggcccagaagtttctgcgtccggcttcggtgtagcagaatccatgtgaggtccagtgcaccatgtccggtgaggtggagaccagaatgccgtgctcgtcggtggcatagcagtagtagaggtcgcggtatttgagcacgaacgggtcgggcgcggtatgggacttaccgtccgcatatggaaccggattcgtataagtgcgttcggccagcggcttcaaatcgccagattcggcaagcaaggcggtggggtcagctgcgccgagctcgtcttccgcagggctgtagctggcggatacaccgttgctgatggttgcggtcattttgggtcacctcagctcttgacggcgccggcggtgatgccggactgcagccacttctggctgatcaggtagacgatgatggacggaatcgtcatcagaatcagggcggcgtattcctgggccaccatctccggcgtctggctgcgggtctccatgaagtaggtggaggccagcgtgaccggatacttggattcgtcgcggatgagcagcaacggaatcaggtattcgttccaggagtagacgaaggtcagcacgccggtggtggcgatcatcggggtggagataggcatcaagatacgagcccagatgcgcagggaaccgcagccgtccacgcgggcggcttcgatgatttcgtctggcacgccgttgaagtagttgcgccagagcaacagcatctgcagggcgttgaacgccaccaacgggatgatcatgccgaggtaggtgttggtcaggccgaatgtcttgatggtgaagaacagcggcatggtcacggaggcaatcggcacggccatgcaggcgagcagcagcacgtagatcacctgggaaccggtgaacttcatcttggcaaaggcgtagccggcgagcgaggtgatgaccaccacgatcacggcggtgaccacggagatgaaaaagctgttgaacaccacgcggaagtagtgcacgtccttattgttgatcacggacaggtagctgttccagccgcctgcctgcagggacttggtgattgccgtgtaaatcgggaaaatccagatgacgaagaagaatacgaggacggtgtacatgatgaccgtcgcactggttttacgcttcatgatgacgtcctctcgttagttgttggcacgcttgttgaaggcaagttgaatcagggagagcatcacggcgatgatgaggaccatcacgccgatggccgcggacagaccgccgttgaactgctgcacgccggccttgtacaggtaggtgttcaggaattcggtggaacggccagggccgccgcctgtggtctggatgacgatatcgaaggtcttcagcgagccgacgatgccaagcaggataagcgtgttggtggtgccggacaggttcggaatggtgatgcggaagagggtgttccagaatccgcagccgtcgatcttggcggcttcgtagatgtcatcggagatagacatcagaccggcgtagtagatgatcatcgagaagcccatccattcaaagatgttgatggcacagatcgagtagagggcgatgtgcggatcgccaagccagctttgggccaggaagtccaagtgcaggaagcgcagggcctcgttgatggcaccgacgttcggatccatgatgatgcggaagatggcggcgatgatgaccggggccatggcgatgggcatgaagaagatcgccttgaagaagctggaaccgcgcaggcgctccttgaggatcaccgcgagcagcagtccgagcccggcctggatgaccacggtgacgaccatgaagatgatgttattcatcaaggccgtccagaacacggagccgggagcgagcagcttggtgtagttcttcaggccgatgaagtccatctcactggagatgccgtcccagtcggtgaaggatgtggccacggtgaagccgatgcagtagtagatgaagacgccggagagaatgaccagcggggcgatgaacaggtaggggcgcagcttgctttgc

SEQ ID NO: 3198 - DNA, 10255 bp, Unknown
  R53_2m  MAG No. k141_3643
ctcgcagaggctcattcactgttatgactgctctcaccgtcggcagccgtccaagccctggatctatgccgccaataaattgcagcaaatcgtcggccacgatacaaccattggactcacgccgacgctagattccacactcagacagaagccagccaatatctgaaccagcaccgacggcgtacaaagcataagcactgttaaccgtcaattcgccgccctctaccagctacatccgccttcgccgatgatatcttgttcgaatccccaaagcacgttgttcgaatgacattactgatggtggataagttttgcatgttatccaccattccgaattagtggcctaataccttgaaattatcgggaatatctcactccaagacagccaagctccgaggctagaaccacaatggctgaaattcatacttacgctgcttcgttccggctacgctcgacgtcatgaagacacacaaagcagtggcctcgctcatatcagccgcgcagaatgagctgagatgcgtctattcaagaaatgaagcggaacagaccgctctacgccgccgtgcccagagtggcgagttgttgaaagtgtatgacggcattcccagtctttatgcaaataccgcatactgggatggtttgacgccgccggagcgaacgttgcatatggcccgcgctcttgcgcaagagcatcctcagtgggtttttggcggcttggtggcagtaagtgcctatggattcgaacatcaatggcatttgcatgatggctgcataaccatcgtgacctccgatcatggatctcgtcaatgccatcagcgcttacgacatgtctatatgcccgatatgaacaatccgaagacacattacgaggcctccggcctatccctgatatcaccggctagaaccttggtcgaggccgctatagaccttgattttcggtttgcgttgccgatctttgactcggcccttgccaagggaataaccaaggaagagatagccgccgactgcgttcaatggagaatcgattatgcccgagtattccgcctgctgcgctatgcaaacgaaaggagcgagaatggtggagaatccctcgcgcgaggcaccatcatcgaggatcgcttcctcacgccgcgtattcaggtaacggtgaccgacccgcagacgaataccgagcaccgcgttgatttcgtatggaagctcgatgacgggcgcgtgatagtggccgaatacgacggcacacaaaaatacgtggacccagccatgaccgatcaccgcagcattcaggaggtggtggccaaggaacgagcacgcgacgagggactgaaacgagccggtgccaccgaaatcgtccatttcacatacgccgacgtcatcgaacgcactccgctgcgggtaaaactgctcaaagccagagtgccccagatggaggcatccgcagagcagcgggtcccgtgatgcgatgaaccttcatcgcatgggttcacatggattcagcccgcaaaatatgccaatatcaatcggcaagctccagcccatgcccctccttccctaccgagaacaataaacgggcccgcattccagcccgatgcactcgccatatgggcatgtccggaagaccgtccaaattccgtacttggttttaccgtcagccgtcaatcgtggcacatcgcataaagccgactagtatgaggtgggaatcgatgattcgacaacaactacatacaggagagtggcaatgggtgaagtgatcaccgccaaggacaaggaatatgaggccgaggagcgcgctacggcgccgggcgcgaaccagtcgatgagcgaccgtgtgaacaaccgctcgctgcgcccgcagtcggctgcattcaaggagtttatgaagtccggctgggccgacgatgatccggagatcaagcctctcgaatcctccaagttcacgccagcccgccttgaggcgctgggcaaagccttcccgggcgagcgtctggtcattccggccggccagccgaaggtgcgcaacaatgattgcgattacatgttccgcccggacaccacgttcgcctactacaccggtctgggttccgattacgaggccggcgccgtgctggtcctgaacccggtcgaccccgactcccccgaagccgccgccggcaagacgcacactccggaactgttcgtggcgccgcgcgccgacaactccaccgaggacttcttcatgtccgcccactacggcgaatactgggttggcccgcgtgctggcctcaaggagatgcaggcgatgaccggcatcgagacccacgacatcgcccagctggccgacgccctgtccaaggacgtgggtgccgaggccggcgccgtgcgtgtgcgcgtggtcagcgagaccgatcccgaaatcacctcgatggtcgagtccatccgcgaggccaacggtttcgccgatccggacaagaactccgcatccgacgataagctgcacgagttcgccgccgaggcacgcatggtcaaggacggctacgaaatcaacgagatgcgcaaggccgtggacgccaccaagcatggcttcgaccgtctgctctcctcgctgccggccgcgctcgacaagccgcgttccgagcgtatcctcgaaggcgcgttcaacgccgtgtcccgtgagctgggcaacgccatcggctacgactccatcgtggcctccggcccccacgccccgattctgcactggatgcgcaacaccggtgtggtgaagaacggcgacatgctgttggtggatgccggcgttgaggtcgattccctgtacacggccgacatcacccgcaccttcccgaccaacggcaagttcaccgacttccagaagcgtctgtaccaggccgtgctcgactcgcagcaggccggtttcgaagccgccaagccgggtgccacctactccgacatccaccacgcctgcatgcgtgtgatcgccgaacgtctgcacgattggggtctgctgccggtgagcgtcgaggagtcgctgtctccgcaaggccagcagcaccgccgttggctcgcctgcggcgtggcccaccacctaggtcttgatgtgcatgattgcgcgcaggcccgctatgagtcctatcagggcgcgaagatcacgcccggcatgatcttcaccatcgagcccggtctgtacttccgcgaggatgatctgctgattccgccggaataccgcggcatcggcatccgtatcgaggacgacgtgctcatgaccgagaacggccccgaatggatttccgccggcatcccgaagcagatcgacgacgtcgaagcgtggatgcggagccgtaaagcaatcagtccggtggactgattgtaggcgacgccgaacgctgacaagcgcgaggaaaatgaaatcatgcgcgaagcgcaccatattaagcaggctgcccaagccaagtaacccttaagctccctcatcagagggagctccttttttctactaaggaggcaatgtgcctactccggaatttgtgttggaattgcgtaagaagatcggccatgatctgctatggctcaatggcgtgaccggttgtgtactgaacgaacatggtcaactgctgttgggccgtcgttcggacacgggcgaatgggcgatggtctacggcatcaacgagccgggcgaacagccggcggacacggtggtgcgcgaaatcaaggaggagacgggcatcgatgccatcgtcaccgatttggtggccgtcacctcgtcaaacaaggtgctgacctacgccaatggcgacaacaccatgtacatggatcattcgttcctgtgcgccctgaagcccggcggcaatgccgagccgttcgtgggcgacgaggaaagcctcagcgtcggctggttcgatctggatgacctgcccactcccctggcggccagcacgagcgagcggctggagctgttccatacttacatcgagaacaaaaagcacggcgacgcccacgccctgttccagttcgatgggcagcagtactagcggatataaagttagctccctctgacgagggagctccaatgctatgcgattacgcctcttgggctaggagctcgtggaggtgggcgcggtgctgctgctgttcgcgcgggtcgggcacgggcagggaggccagcagcttcttggtgtacgggttctccgggtgctgcataatctggtcggcatcgccgtgctccacgatctggcccttatgcatcaccatgatgcggtcggcgagcatatcgaccaccgccaaatcatgggtgatgaacaggcacgcgaagccgatttccgcctgcagtcgcttgaacagctccaacaccttggcctgcaccgacacgtccaatgcagaagtcggctcatcggcgatcagcagcgacggcttcaacgccaaaccacgcgccaaagacgccctctggcgctggccgccggacagctcatgcgggaaacggttcatgtaggcgcgcggcagctggaccatctccagcaggtcgcccacatagttcttggcctcggccacggaaccgtacttgtggtgcacgagcagcggctcggccacattctccgcgatggtcatcagcgggttgaacgaggagcccggatcctggaacacgaaaccaatgtccgcgcgcttgggcttgaagtcacgctccttgacgccgttcatctcgatgccaagcacgttcagggagccgccggacaccttctgcaggccggcgatggcacggccggtggtggacttgccggaaccggactcgcccaccaggcccagcacttcggagcggtggatggtgaagttcgcgccgtccacggccttgaagtcgggctgcatgagatggcccgggtacgtgatggtcaggttcttggcctcaacggcgatcggctgttcgcgccaatcggccttgcgctcgatcggcttgccctcgcggtcgcgcacgaccagcttctgaccgatgcgcggcacggcacccagcagtcgcttggtgtagtcgtccttcggatggtagaagatctgctccacgtcgccctgctcgaccacgtggccgcggtacatgacgaccacctggtcggcgatgtccgcgatcacgcccatgttgtgggtgatgatgagcacggaggcgtcgaactcgtcacgggcgaggcgcagcaggtcgagaatttcggcctgcacggtcacgtcgagggcggtggtgggctcgtcggccagaatcaggccggggttcagcaccaacgccatggcgatgacgatgcgctgcttctggccgccggagaactggtgcgggtagtagtccacgcgggtttcggcatccgggatgccgaccttcttcaggatgtcgatggccttggcgcgcagttccttcttgtccttcatgccgtgggcgcgcaggccctcttcaatctgccagccgatggtgtacaccgggttcagcaccgaattgggctcctggaacaccatcgcggcctcggaaccacgcacttcgcgcagctgttcgccgctcagggagagcacgtccagcgaatcggagccatcacgcttggacaggtagacggcaccggaggtggtggccgtctccggcagcagcttgatgatggagcgcgcggtcacggacttgccggaaccggattcgccgaccacgccgaccacggtcttgcgcggaatggtgaagttcacgtcctcgacggccttgatggaaccggcgtcggtcatgaaggagacggacaggtccttgatatcggcgagattcttgttgtcttcgctcatctctcactccttgccttccggcttgccttcgccggtccattcggaggcgacgatggtcgggtcatggtcggtgacggtggccggcgggtcgacgttcgcgtcgagttcggcgatcacctcgttgcgtgcggacggcttctcgtttgggtcgacggacgtgtcttcgatcgatccgaccacttcgccggcggacttgcgggcgcgcagacgcgggtcggccagatcgttgagcgattcgcccacgagcgtgatgccgagcacgataagcacgatggcgatgcccgggaacacggcggtccaccagatgccggcggtcacgtcggaaaccgaacggttcaggtcgtagccccattcggcggcggcggtcggctcgatgccgaagccgaggaagcccaggccggcgagggtcaggatggcttcggacgagttcagcgtcaggatcaccggcagcgtgcgggtggagttcttgaacaggtgcttggtcatgatgcgccaggtggaggcgccgaccacgcgcgcggactcgacatacgcggattccttgatgcggatcacttcggcgcgaattgtgcggaaatactgcgggatatacaccacggtgatggagatgccggaggccaagatgccgctccacaggccggactggccgtgggagatcatgatggccatcagaatggcgagcagcagcgaggggaaggagtagacggcgtcggcgatcatcaccaggatgcggtccacccagccaccgtagtagccggacaccagaccaagcagcacgccggcgaagatggagagcagcacggccacgacgatggcgatgacggcggtgcgggcaccccacaccacacgggagaacacatcgaatccggcggcggtggtgccccagatgtgttcggcggagggcgcggcctgcgccgggaaggacgtgccgtcggcggccttgatctgggcgtggccgtagggggcgatcagcggggcgaagagggccacgagcaggaagaacgcggtgatcgcgagaccggtgatcagcatgcccttctgccagccgaccgccacgcgcagttccttgatgattggaatcttggtccagaacggcgtcttggtgctgacgttgagcttggtgaggcggtcgtcaccggggacggtgatcttgtcggaggatgcggtggtcatctcagtacctcactctcgggtcgataagcgcggcgatgacgtcgacgaggaagttgacgacggccacgatgatggcgataaggatcacgatgccctgcacggccacgaagtcacgggccttcaggtactgggacagcatgaagcccaggcccttccattcgaaggtggtttcggtcaggaccgcaccggcgagcatcagggcgatctgcatgcccatgacggtgatgatcgggatcagggccggccgccaggcgtgcttgttgagcaggcgcttttcggagacgccgcgcgagcgggcggcctcgacgtagccggaattgtaggtggagatgacgttggtgcgcaccagacggatgaacacgccggcggtcagcaggcctagggcgacggccggcagcacggcgtggcgcagcacgtcgacgagcacgttcatgtcgccgagctggatggcgtcgatgatgtagaagccggtcggcgataccagacgggtgaactgcatttcggagttcaggtcggagcggccggaggctggcaggatgttgagccagacggcgaagatgagcttcagcacgaggccgaggaagaacaccggggtggcgtagcacaggatggcgaagatgcggatgccggcgtcggcggcacggtcgcgtttgcgggcggcgagtcggcccaggccgatgccgacgatcagcgccacgatcagggcgaggaaggccagttcgaatgtggcggcgccgtagtgcgtaaggatgctgatcaccggctggttatcggtcagcgtcgtgccgaggtcgccgtgcaacaggccgccaagatagtcgacgtattgcacgatcagcgggcggtcatagccggccgcgtggatgcgctgctggagttcggcgggtgtcaggcggccgcccagggcggcggaaatcgggtcgccggtggcgcgcatcacgaagaacacgatggtgaccagaatgaaaacggtggggataatgaggaggaacctcgtcagcacgaagcggaagaaactacctgacagtcggttcttcttcgtcttggctttcgccggagtggtgctggaggtcgctgtggcgctgtctgacacgcgatgctccttggtgttggtaatcggtatataaagcaataaaggctcccctctccgaggggagctggcggcgaagccgactgaggggagtcatacgagttgggctcccctcagtctgccgtcgccagacagctcccccctcaaagaggggagctcatgctggatcagcccttggtgacggaggcgtagcggaagcggaaggaagcgtcgagggtgacacccttcatggaggtgccggtgacggcgacctgggcaccctgcagcagcgggatggtggagaggtcttcggtctcgagtttctggacctgcttgaggatgtcctcacgggcggaggcatccttctcgccggcctgcttgacgatcaggtcgttgacttccttgttggagtagccgttgttcacgaagttgccgtcgcggaagaacggggacaggtagttgtccgggtcggagtagtccgggaaccagccgagctggtagaccgggtacacaccgtcggaatcgtcggtgaccacgcggtccttggagtactgggtccattcggtggactgcaggtcgaccttgaacaggccgccttcctcaagctgggacttcaaggccgcgtactcgtcggcggaggcggagccatagtggtcgctgttgtactggagcttgaggtcgaccggggtggtgacgccggcatcggcgaggaccttcttggccttctcggtgctcggcttgccgttgccgtcgccgtaggcggacttcagcgtgtcatcgtgaccggccaggccgtccgggatgaaggagtacatcggggtgtaggtgcccttgtagaccttggtggagagctcttcgcggtcgatgaggttggcgacggcctggcgcacggccttggccttgttagcgtcggcgtcgggctgggattcaccgtagggctgaatcttgaagttgaaggcgatgaagcgctcctcaccgcccgggcccttgacgaccttgaccttggagtccttggagaggtcctcgatgtcggtcgggctcagggagcggtaggccacgtcgacctggccctgctggacggccatcttcaggttggaggcgtcggcgaagtacttgacctgcacggcggagttcttggccggggtcaggcccttgtaggagtcgttcttagcgtaggcggcggactcgttgatcttgaaggcggtcagcgtgtacgggccggcgaaggccttcttggagacgatggtgtcggcgtcggtgagcttgtcggcgtcgaaggtatcctcatcgacgatcgggccggcgggactggacatgacctgcttcaaagtcacgtcgaaaggcacggaatccttgaacaccacggtggtgtcgtccttagcggtcacggattcgacgttggcgagcagggagctcgggccgttcgggtcgttgatcttcttgatgcggtcgtaggagaacttgacgtcggaagcggtcaggtcgttgccgttggcaaacttcaggccgtccttgagcttgacggtgaattcggtgccgtcatcgttccaggtaccgtcatcggcggcgatgtccgggctcagctcggaggtgttgtagtcctgggcatacaggaacgggaacacctggatctgcacggcgtaggagccgttgtcgtaggagccggcggggtccaggctggtgatcttatcggtggtgccgatggtgatggcgttgccggaatcggcgcctgcggtggtgtcatccttcacaccgccgcaggcggtcagggatgcgatggcggccacggagacggcggcggccagaatcttcttggaattcaacaggaatcctctctcataacttgtttccacgccatcactgcgggcgtggattaccgcctgactatggtgaggatgtgttactcctgcgtttccacagccatcgacttatgtttcgcttgtggcgaccatggccggttttatgcggtatcgagcagtattacggattcttgtattacgacgtgaataacgttcaaatggtgagatgaacatgctatcatgtcaccatttgaacatgcttgtagacgaatgctttccattcgtcaaccggtcggcctactgctacttgagcttgcggcccgcgcaccacacctgttcgaccgtccaatcggtcggatcggcaaggttgaaatcggcggcgaagccgggggcgatgaggccgataggcaccccggtgaccgggttcggccggtcgaagccgaacgccttggcc

SEQ ID NO: 3199 - DNA, 43600 bp, Unknown
  R53_2m  MAG No. k141_3868
ccctcataaagtgtcaggaaaagttgagggcgcatcgacaccgggcacatcccatgatggagccgagggagacggttgaggtgcgggccgaggggtggcgggagcggctggcgttgggtgagtggtgctggttgatggctgccgctggatgggcgtgggctctgattcggatgccccggacggttcggctggcacggatggtgcttcttctgcctgtttgatggcatccgagagacgctgggtgaaagcattgaggtcgtctgcggctttgttcagggcagcgatgtcggtgatggtgtgcagggtgttgcgggcggtgtcgagttgggcgccgagcgatacgcgtgtctcgctaacgttagtgtcggtgttggcttcggtgtgctggtagaggtcttcggcttgggtgatggcgtcggagagcttcgtcttggcgtcgtcgagtctacgtgcttgttgcgattgcttgacggtggcggttgccttcgagagttcgtcgagggctgtcttcgtttgcttgttgcgctcgtccgcagtgtgggcgttctcttcgagatgcgccgtggaaagatccgttgagcagtgaggaatttcgttcgtcgcgtgatgttctaccacgttgcgtagggagaccagtgcctcggtatcggtcgcgtcggtgtcgcccaatgccagcagtggcttggcgtcgtccagggctgcgttccattggtcgtatagcttgtttgcttgttggattgcttgattgcatgatgcgagggcctgcgcatgggcatggcgttgccctgcgatgatggtcaccgatgccaggacgccagtcaggatggtgaaggcggtcagggccaggatgcgtgcccacgggacgcgccgacgcaccctgatgggtggctcctcggtttcgtccgccgtcgaatcgccggtgaatatttcttctgcctccgacatgttggaggcagaagaggatgccgcgttctggtcaggggtctcggattccgcgattgtcgaggaatcagaggcggtggaattgcccgacttattcgatttgcccgcttcgggcttcttttcctcccataggatcggctggatggcgcggagtcttcgtttgcggggtgtgcctgtcggtggctcgggtggtgctccggctgtcgaggggtcgttgagcgcgagtttggcccatgtggcgagatccggccatgcggccggatgccggggaacttggtcgagtaagtcccagtgctcgggggcggccatgaggtctgcgagctcgtggggatcgagccgtgggttgatgcgtggcatgctctccgctcctttctcggtaagggctgcggctagtggatgtaggtgatgccggggttctcggcttgctcgcgtgtcagcaggcgtgtccaggcgcggcgttggccaccgccggattcgctgatgaggatggagccgtcctcgtggatttcctcgacgatggcgacgtgcccgtattcgccgctggctcccagcactcctcgctcgaaactcatcacgtcgcccagttggatggtgccgccgatggggtacccgtgtcgctcggcgctggccgcccacatgtagccgtggcccatgtaggggtccgccggtttgccgatctgttgccgtcgggtggcggcccaccaggtgcattggcccacgctgtatgagttgatcgaggccacgggcacgccgctggcgtcgatgtcgatgctggtgccatcgacgaccaagggcgggctaagggcgccgatggtggctccggccgtggccgagcatgagccgccggcgttgatggcgggccgcacttcgtccagatattccttggtgacgttcgggatgtcgggatatttcattaggttgccttcgcccgcgttgtgcgcgatgaccaaggcctccagatcggatagccgggcgaattgcgcgtcggggtggctggccttgagctgtctgacgccttcgagccggttcttgagatatatgccgccgtattgggcgtggatgtttggatcggtgatgccttggggcggggtctggtccgcgccttcgggatgcacgccacgccacacgctgcggttgagctgcaacaggccccaggtgcctccgttgctgtcatcagcatacgcctcgggattgaacccggactcgcggcgcatgagaacggcgatgaaatcagcgcccaatccactggactgggcggcccgttcgacccagggcttggcctgttcgggcacctcggcgacgctggactggcaggtggattgtccgcccacggccacggtcgggataagccacatcaacagactgatcatgagcatgacgatcgcgccgacgaccagcaacggcagaccggcggccgccgacaccgtggccatgaccgccgccttggccgccatcatggaacgggccatagtccgaacgacccattgcgtcgctcgcatcgaggaaccggcgccggaacggactgttcgccgtgctcggccgtctctggctagaacagggcccgtgcgtttccggagtgcgctttgagtcaggatggaacggcctccacgcatgttgccacgacgagctacgcggactttgccgggccgccggctcttgcctcgcggcgatatgactcgggaggcaacggaagcgggagaatggccgagggcttcgccatcagccttatcggtgtcgtcgcttgagatttgcgcttgcagcaaagcggaggtctcctccgttgctctcgccagatggcgcagcgctatccggcttggcccatcggatcggcttggtctggccaacgccggcttggacggctgaccctcgatcttcggggcaggagcggcattgccggagaacggcgggacgtcctcgcccttaagcccgatgggtcggccggcccgcagctttcggggcgctgggccggagggctgcgcggtttggcttgcccgtccgatgggctggggcttgttcatggatgctggtcctcgaatttggtggtgtacagctggtagagcaggctgccggtgtcgagtcgtccgtcgaaggggatgaacgcggtgccggacttggccatgccctgtccgggctggacaccggtgaagaagccacgctgctcgtccgagagtttcagcagatcgcacagggcgtcggcatcggtgggattctggttcatcaacagcaggaagtcgctgttggcgagcatgagccgggcggccggattggtcaacagttcctcgatgttctgggtgatgccggtgggtgacaggccccatttgcgcgcccgcttgtagatgcgcaggaacgtctcggccgcatatgggttggagaacagcaggtggaactcatcgacccacagccacgtgcgccgccccaaggcgcggttgcgcacgacgcggttccacacctgatcgagcacgaccatcagaccgaaggtcttcaattccgcgcccagacccgacacatcgtagaccagcagccggttcgaggtgtccacgttcgtgggatgcgcgaaggcatccagactgccggtggcatagatctccaacgtgcgtgccgcatccacggcctccggctctcccagcccgtccaagcgttccgtcagatcgaccagggtcggcgcgggcctgtcgggcttctcatggtgctcgcggtagagttgcgtgaccgcgcggtcgatcaggctgcgctgggccttgtcgatgccgtcagcgccgccgatcagcgcctcgaccatgttcagcacgctcgcgcttttgccccgaatgggattgccctcggaatcgtccgagtactcgatgtcgagcgcgttgatgtgattggaggagcgttcgccgatctcgatgcgctggccgccgagcctgtcgcacaggggcgtgaactcatgctcggggtcgatgacgatcagatcgtcctgctcgcgcagcaggaacgtctgcgtgatctcgttcttggcggcctggctcttgccgcttcccgtggtgcccaggatgaacccgttaccgttcatgcccagggtgcggtcgatgaccagcgggttgccgctcctggcgttgacgccgtggaacacaccacccggctggcacagctcctggctggtgaaaggaacgagtatcgaggcgctggacgtggtcagggtccgtctcatcggcggcaagggattgcccaggggcagcgctgcgttcaatccctcgacctgcatgtaggtcagggattcggccacgcacgactggccatccaccgtggcctccacctcgcgcacgacctgcgccagccgctcgggagtgtcggcggctacgtcgatgaccatgagcgtatccatgagccggtcgccgttatgctccaggtcacggcgcaattcactggcctgccccatgctttcctccaagtcatgcggcagcaggtcctcgggcagatgctggcggcggttcctgcgcctctcgtcgatggcctgcatgtccatctccgcaatcttgcggttcaccagccgcaacccctcggccttcgtatggggccgcagatgcacgctcacgatgatgtctgccttgatgtccgtcagggaggcgaccagctggtcggaaagccactcggggaaatcacgcaccatcaggcactgatgccacgtctcgcgcgtgcccgagcacagcttgacccgacgccggtcgcccgtgtcgatggcatacggggccacgcagtccttcgtgcacaggccatgcgaacgggagaacgcatcctcgtcgaatgtgaaacgcacgccggggcgcagcacccggtgcagcaccttgagccgttccgcgcggttgagtttggagcctcggcagccgcccacggaacgcaattgcgcgatggcccgcaaagccgctcggttgagcgtggccacggcccgctggccgtcctgctccgcaagggtcagcgtcaggtacttgtcgcacacggtgccgctcgactggcccgacggcttgcggcgcacatgacggtcgaaatcctctcgcaacgcatccaggccatcgcccttgacgcccatcgccaacccttggcctgccgattccgggtccaatgtccgggtcatcaccgtgacctggatgcccatgccctcgcccaccgagttgaggaaccgtccccaacgctccaccacatccatctgcacgtcctgcgaggcgatctgatagctgatgtcgctgatgcgcagcgtcacgctccaacggtcctgccccagataggcgacgccgccgggcagcatcgaatcataggcgaccaactccctgctcgaccgtgcgaccttggcggacccgccacctttccttttcatacgcctgccatccttgcgttccttgctctcaacggccacgcccgctccttcccgcgcccctgcggagggcgcgttccctcaacgacggtttcgcaggccacctggccggctccaaattctccagcgtgtggaagttcctgccaaagcgctggcagagcatgtaacccagatagcgttccggcttcagacccttgggacgccaccatccccacaacgccggcggcagacacaccacgaacaacaagtacgagcccaggtcgggctggcccaacagcaggaagaacacagcgacctcgccgcctcccagaacaagcatgagcgccgaggcgaccaactgccgccatcccatgccccacatgaccttcgcctccacgctggcgatctccgcatacacgcgcatctgcaacgccatcaagctcctccttgaatccccgtcatgctcactcgccgcccgcgatcgtccggctgacacgttgggagaccgcgatcacgaaaaacaacagaatgcccgccatcagcagattgccgaaattgcccgtcacccacgacaccatccccgacccgtcgccctcgggcagacgcaccgcgtcgatcacgatgcgctgatagaacaccaggcacacgaacacgcacaccgcgttgagcgacgtgcgcgcataggccttgaaatagcccacgcccaccggcttggtgtcctcatgcaccagcaaggcgaacggcaacgactggaacgcggtcagggcatacaattcgatgaacctgatgtatagcaccacggtgaacaccaccgccgcgagctgcgagaccagccacggaatcgccagcaggaagaacagggccgcctgccccatcatgccggcatcctcgacctgttcccgcatcaggtctcccaactgtccgccctcgccggacgcatcgaacgacagttgcgaggaagcgccctgcatgaggaactgggtggccgaatcgaacgcacgcaggaacaatcccgcgttctgaaccgccaggaacaccagcgcgaccttgaacaacgtgcccgccacgatcttcacgcccaactcgcggtcggactcgatgcgcgtggaattacgcgccaactccaaggtgaacaccaccgccagaaccaccgaggtcaacggcttgaccgccacgtcatgcacgttcacggccaactggtaaagcgccggattccacgtctctggcccctgcgacagcatgccagtggctatcgaaccggcgccaccgcccccgatcatgttgagcatcgcaacgatgaaatcctccatgccgggatccccgatgcctcaaaccggctcagcccatcgccacggcgctgaagatctgcgccgccgcgataatcatgccgccgcccacgatctgccacaggcccgactgcgtctgcggcccgttatgatccttcaaaccaccaccgaatgtcaccgcgccccacaccagccacaagccaccgccaatcgtcgcgaacttcacgaacaactccagcacctggttcatcaaatccacagccgcactcctccgcacaggaacggcacggcccaccgccatgcctacgcatacggccatcctcgtgcagtcccgtggaatcagcggcggacaaattcacacagcattcgttcagcatacttacagaaataggtaaatcaagacgctatagtattcgccaaaagatgcccgggaaagggaaaagaatgcaaaataacgaccagcagcagaatgatctttggattaagcaatctctcggcgctgcttcaaactgggaagaactagacgaagccgatcgagtcttccttcggaaagcagcagcatggtacgcaatcatcgccatcggattagctattggtgtggggattctctcattcaccattctgcaagacggcgcaaaggctacactcgtgacttcgtcgctcgccatcattggcgcggtctttcctgcgatagaaaaagtcgtgtcgggatcgatggaatactttgaatcaacaaacgagaaacttcatgttgcaaaacttaaattgatgcgcagttatttcaacctatatgcattgattctggtcggtgctgcgcttctcgatttcattgccgcagcattcctcggcctgtggcaataacgtttggagatgacgtgaaatggcagatgacatttgccgaatctgcggtaaagaagggccgctgagctttgaacacatccctcctcaatctgtgggtaatgatcacacggtgaagctctattcaggcgttgacgccgtgaagagcagcttgaccgggcaggatgacatggaaggcctgaagtatcggcaattgcaaagaggtcaaggattcaagacgatttgcagctcatgcaatagttatcttggtcaaaactacgtcaagccattcagtgagttctatcgtgcaactggacagcaaatccttgtctctgactttcaggaaggggataaatccattcatttcaagacagataggctcatgcctcttgcatttgtgaagcaggtgatgtcgaacttctgtgtatcagctggtgatatgcatgactgtaaggactatctcttggatagggagagcactgttttccccagcgatacagactccatatgtttatagtcgataacctgcgtgaacaaaagctgttcaccggatggatggttcccatatttgcggattacacgtgctgcaaaatggcatgtatcaggataccgccattcgctttcactttgtttgatctcagttctagtaataaggtgcctgaatgtccaggcaacataaccgatttagctagagtgccgtggggagagaaacctggcatcgagtttcacttgccagtgcttaaagcagcgaatcatagtccgctgtcatggggaaacgttggctaaagccgatggggaacagacgaaataggcccgcaggactacgcctgcgggcctagtatgcactgcctcgttttgccgggacagttgcatggtatcaccgtctaactgccaactggaatacgaaagttggctctaagcagcagatgggtggttgttattagttcatgggcggctccttgggattgatagtggtgacgagttgggcgaagtccggctcggggccatctccattgggactgccatcacggccagcgccatcatcattcgcgtcgttctcgtgcccggtgtggcggccgttggcgcgggtgaggcggatcgcggcggttgcgccggtgccgaggagcgcgaggacgaggatgacggcgatgaggccggcgatgttggtgccggtggtcgccagattgtccttgggctggtagccgttccagtcgtcggtgttgctggtcacggtggtgtccgcgcacagggttcgcccgtcgatctccaccgcgtcctcgggcagtttctcctcgtctttgccgtcgaaggggtcggggtcggagacgacgcattggacgagcggcacaccggtgacgatggcgcggtcggtgtgatgctcgctcacgccactgagggtggccttgacctccacgctgtctccgggcttgaggatcagcgtctgccagtcatcgggatactcgaactcgccgatctggccgtcgccggcgacgagctggtcggtgaggctcagctcgctcgccttgaaccaagggccgtctccggtgtcagggtcggtgggcgatgcgttggtgatggtgaacacgatgcgagtgtcgctcccgttcatgttcagcgcctcgtcaatggtgtcacggtcgccgtcgggccagccggattgctcgtcccatttctcgatggtgagccggggcgtcatgtcgggcgtgtgcgtggtgacggtgttcgagggccgttcgaccccgttgatggtctcggtgaaccggttggccacgggaccgcccacggcgatgcgctggcattggatgaacgcggtccacgcctgctcatgctcggtgtcggccgacacgagtccaagcatcagctccgtggcgcgcacggtgaccacgccgcgctcgttggtggcgagctcgaagagttctccgccgaaacggctggcgtcgaagtcggagccggcgatgcgttcgccccgctcggccagggtctcgccgtccttgatgaggtcgcgggcggcgtagacggcccattggccggtgaacttgtcgtaccgggtgtcgagcgggtcgctgatggaccagtcggagacctgcgggtaggcgcggtcgggcggcagcgtggagctgtcgagccggtagaggaacaggctgttgagatagatgctcttgccatccacgctctgcccgtccaccttgaccacgacatccttggccgggttgatcggcttcaaggggttggaaacctggttggtgtccttgcgcacgtcgttgaccagctgggtggccgtgttcgtgaccacgtaatcgtcggtgaccttgatgacggtcatcggcagcgtgacctcatacgaggtgcccagaagcgactggtcgatggccgggtccttcaacgggtcgtggtccttgtcgccaagcgcggcgtagatcttgagatcggctggctgggggtcgcccttgatggtctctcccgtcgccggaacctcggtgtcaacggttttggcgaacacgtatgccacgccgtcgatggcctggatgttgaaccggtcggtcacatccctgccgttggccttgtcggtcacggtgatatggttctcgtcgagttcgaggtattcgtcgtcccagtcatcgaccatgcccagccgccacaccttgtaggcatggttcgtctgcttggcgtcgagattgatccgatagtagatgcggtctccgagcaacgcggtcttgccgtcgatcgaaatggacgggtcggcctgggtgtcctccttgcccggctggaagtcgggcggatcgttccataccttgttgcttggcgtgaccgagttgttcaaggtcaacgcccactggttgccgaccacggtgtcggccggggcatcctcggccacgacgccctcgaacctgatgatgatcctgggattcgcgcccgccagccagttcgcccgcacatagtcgtcggcgaacacgagacgcacggcatggttcgcgtcgttccactcgctgcggtactggctcttggggatgaacttgccggtggtcaggtcggtgacctccagggtctgcttgtccggctggaagtgctcgtcatacgtgtcggtgaccgccacctcgacgatggcgtaggcgagactgtcgggcaggtgcggctgggtttccagacggtattcgagacgctggccggggaagacgatcttgccgtccacgctgtcctggccgccgccttgggaggattccccgaccacatccttgaccacgggcggtacgtaaccgcagaccttcggctcgttggtcccgaccgtgtgggtgttgatggtctgcgaaccggcgttggtcagctccgcgccgttcttgccggcggtgcagaacgtgatctcgtcgtccgcttcgatgtcgaagtcgtcgcgcacctggcccgccccggccccgttggcgtagtttgcgcggccgggcacgagcatcgtgatctgcctggccttcgccaagcccttcaacccggtaaggtaggaggccttggccatggcggtgaccacggtgccatcgatcgtgatgccccactggtcggtgatgtcacggccacggttggcgatgtcgctcacgctgctggaacgatcggtgcccgagtccgcctcgtacacgcggactgccgccgcttcatcggcgtcgaacaggtaatcggctgccgtccaatcatcgaccaaggtgagcgtctgtggggcctggatcaggttcgccggcacggtgccgttgaccacggaggccacacggtctccatcgaggaacaccttgccgtcgccgccggtctggttggtgcggccggggtcgatcacggcctgccacttgccatcggcatcaagcatgatccagcttttgtcgggattgggccgccaggtgtcgaactcgcgttctcccgcatcggcctcgggcagctggttccacttgccccacgcatggtcgctgatgttctggtaatcggatggcaggctgacggtcacatcaaagccgaacacatactcatgatcgaacggcatcatgcccctgtcggccgaacgaaccgcgctgaccgtgttcgacgcgcggtcccagacgatctcgaactcatcggagacatcgcgattgctgtcggtggcgtccacaagcgtgaagtcatccaccgtgtgatcgacgccgttgggttcgatcacgtccctgaaactcagctcgtaaccgccccgcccggtcccatacgtgatggtggtgcggttggtcatccggtcggcgctgacgccttcctcgatgctcttgaccggatctgccggcggcacggcgctgaccttccaggtctccgccggatcccggtccgtggtgtccacggccgcctgcatgcttccctgtttgggcacttggatgtcgatccaatacgtgccctcggcccaggactccatgccgaaatcacccggcgaggccaggttgtcgatcacggtgtcgccgctattggcgaagctgatcggcttgctcacgctgcccgccggcgtgtaggggccgccatcgtaatgcacgatcgcggtgccgcgcaggctctccttgatcgacgaaccgccgttgtccgcgtggatggtgtcgccgaccggcgtggtcgagccgacctgcatgtcggtctgctgacggtgcgaggtggtgacggtcaacggataatcgacgggcggctggttcttggccaacacgaccacacggaacgaggcatcgggattggcattgatggaatcctgcaccagactgtccaccgaacgcacgccaagccggtcggtccatgtggtgccggtcatgtacgactggccttggtactggtaggtgccacgtccttcggccgcccattgggattcccaacgctgacgcgcgttcgagctgacataggagccgctgaacacgccgttgccgaggcgcgcgtagccgacggcaaccatccggcattccgcgtcaccctccccggtgtacgaggccttgcactccgagatcgcgtcggcgaggatggcgttcatatccacgaactgattcgacccatcctccagatcggaagacagggtggtgcccgaatcacgtatcgcctgcttcatgccctccagagtggcgggccaggaatccttgtagatccaatgcacgtcggcggtctgcgatggaacctgcccgccggaaccgccaccgccctcgccggaaccgccaccgccgccctcggcgaacgcggcgggtgccagacatcccaaggccaacgctcctgcggtcagggcggccatcagcatcgtgcgcctgctcttcttcccacctgacatacgtatccgtcctttcatcggaagcgccccatgatgcgctccctcccgtttcacacggatacggaaaaatgcgggcgaccattcacggccgcccgcatccttccttgtccctggaagaagaacgcaccggcgggccttccgccgggacgcctttcccagcttccccctgccagccgtagccagcggcggacaactgcaatcgcatgaaacggtttaatgggactatctgcctttcttttctgatatgtgtgccttttgatacgctattggcttagttaccggctggaggttcgggctgaaccagtaaatgaagagggatgaatggcgggaattgcattttttgatatcgacggaacgctcacatacggcattagctctggcgcatttattgcggaccggttgggtaccggcgacaggatgcgagatgcagaggatcgatacgcacgcggtgagatcggaaatgacacggtatgcgatattgatgctcgtggatacactggccatcgggtaagtgaaattcacggatggttgaacgatctcccgcttgtgcaaggaatcgcacagtccgttgcggaatgcaagtcgaggggaatcaagccagtcctcgcatcctgcgcttggacagtcgtttccgagagccttgcgcagagatttggatttgaagcatggtgcggtccagaacttgctgtcaaggatggcgtgtttattggtaaaacagcggcatatgccgatgaacaaaccaaagtaacattcatgaggcagcaatgtgaatgcttgggagttgaagcttcgaattgcatcgctattggtgacagtcgttctgacctaccgctgttcaaagccgtcggtgtctcgcttgccttcaacgcggacaagcagacacgtgctgctgcgacttttgctttcgaaggagcggatctatccactgcgctagcccgtctctttgaacatttgccagttgaaagctgacttcagactgacaggctgcacactgaggacaagattgggaacgagcctcccaaaaagcttttcgaggtcgtatcattcgtgagcttcatgcgtgaacacctgcgcggtggtgcggttcacgccgactacacgttgcgtcatgtggcacattgcgaaagcctgcccacattcatcgaggatggatggtggtgctggctcttatcaagagcaaagccgaaaacataataaggaatagactgcatctgtatgtcagattgtttgcttgtatgaatgcgggacttgcagccgcacatatcacagtgggtggcttacgcactggctccatgcggatgatgtgtggaacactgtctcaatccgcgagagccacgcgcatgaccagttcaccgtcgtgttcgctaatgatggtgaagccaagcgactcgtagagatggagggcgttggcgttggtgcgctggaccgagaggctggctgcggcgtgaccatcggttcgcagtcggtccagtaacgccgtcatcaggcggtgccctatgcctcggttccgccagtcgggaagcaaggatatggagacttccggtgttgccgtatcgatggtgccgtagcctgcggagttgttcgggaagatccgggcccatgcggcacccacggcctgcgaaccgttcggtggctcggcgcgggcaaccatgcaggcgtcgccaggccgtccgaatccctcgatatatcgccgcaattccggcagctcgacaacgctcctgtccggtgccggggttcccggcggcacatggatcgcctgatacaggaactcgacgagcaacggatattcctccggtcgcatcgccgtgattgcgatggccggaggaacatgagccatgttcgcctccatgtgaagttttttgctatgtgctcgcggcataatcggtcgtgtcatactggtgtcctcttgctcggccattgccatcgatacagcttcatacgaaaaggaatgcgtcttgccgatatccaagtcttacgaaggaacgtaaactcatagatagcgtcatgacgcacatcgccatcgaatcgatgtgacggcattcagaaaccattcgtcatggctgactgcgaccaatgcgcccgcataggaggatagcgtattagcaagtgcctgtttggagtgcaggtcgaggtggttggtcggctcatccatgatgatgagctgtggctgttcaatcatgccgaggcacaacagaagtttgcgtagttcgcctggcgagggattgccgccggcgagcagtctgtcggggtcggcgttaagttgggcgtaggcgctgagcacaatggcgcgttgctcgtccgtcaaagcatgcaagcggttcattgcgttggcggtatccatgtcgctggaattttggggaatatacagatatggcattctctccgaatgccgctgcgcttcatcacgctccagcgcttcgatcaatcgtcgtatcaatgcggttttaccgctgccgtttggaccgctgatgccgatgcggtcgcgcgggccgatgctcagcatatcgggttggtccgcgatggcgtggtcgttggggatgcgcgtcaattccctgcgtgagctcggcatgacgttcatccagatggtgccgtcgtagcgtttggccgcttcgctgaggtgagcaagtctgtcggtgacggcggcgatacgcccgtcgaattgcgcgcttgtctgtgcgacagtggtgccgatagccggtttcaggtttttcagggctttacgagcgtcgatgtccttgatatcgatgcgcattccctgattcttccgcatatccagttcgcgcgcacgctgcgcccgctcccgcttgatgcgctgcatgcgttgcagctcctttcgagtggactgtatggcggccgtatcggcacgttgattgtcgcgcatctgctgcgcggcctgggtatatccaccctgataggtgttcgccgccgtgatgttacgcccacgcgcatgtcggcgctccagcatcacgcagcgcgaacacgtcgcgtcgatcagttcgacatcatgggagatcacgatgcctatgccatcgaaccgacgcatcgcctgcgtgatggcttggcgcgtcctgccgtccacatgattggttggctcgtccaacaccagcacgtcgggatcgccggccagcgcacaagcgatttgcagccgcttggcttcgcctccagagagagtctcgtatcggtatgcccaatcgtcgccgatgttcagcgcgtcgcggatggcgatggtctcgcccgtccaatccgccgcgaaatcatccagattcgtaggcgtttcatcagtacgttgcggacagtaggcgactgccatcttgcacgggttcggcgagactgtccccgaatcgggggaaagcatgccgcaggcgagtttggccagtgtggtcttgccaatgccattgtctcccagcactgcggcccagccggccgcgaatgtcgcggacagatgttcgaacaatggttccggcgcgcccggatagcagtaggaaatatcggttagtgtcaatatctgactcatggaagcctctttcgataaggcgcattaatcaaactgtgactatcgaaaagtggcggactgtgccatttattgccaagctgtattcagaaagcagtcctcgtgacggcaccgaaagtcgctatgctaacgagaacttcatcgaatcaggcattgcgattggtacaacggcagatacgcgcgataatgcgcagaacacgcggaatctctcctcatgcaatccgccactgctcaaatcaccaatgctctaaggccttcctgcttcggaaccaccttggcatgtcaggtgttccatcaaatttagttggattttaccatagcaactatcaattcctcaatcctcgcatctcggcatgcacggtgtcccttattcagtcgttgctggcgagtcggtcgagttcgtgttcgatggcgtggcgcaggatctgttgcatggcgtgccgtgttcggcggcggcgattttgaggcggttcttcagccggacgggcaggcgcagggagagcatgactagcggttcgccggcgttgttcttcccggtgggttgtttgtcttcggcctgttggtcgaggactttgtcgaagggcacgggtcggggcagtggctggtagttgcctttcatgccagttcctccttggcgatgcgcgtcagttcgtcggccagttcccggtattcgtacagttgtttggggttcatgccgagcgaggtcttgatcggttgtcgtttggcgatgaaggtgtcgaagcgcgcggtgtcggtttgctccaacgtggctagggtctgggcccaggcgttggtgttcgcctcgacgcgcaccggcagcagggccgccctggtggcatgtcgggcgcggtcgagcgtgtcccatgcctgctggaggtccatcggcgagtccgaggtgggtaggatgacgaaatcggccacggccagcgtcttgtcgagcagcgggccttgcggaggggcgtcgatgatcgaccattcctttgtggccggggcgccgcccaggtgggcgagggtggccatgttggccggcagtacgtcgaatggtagcgggtctcccgcctgttcggcggcggccgcccataggctggcgctggactgcgggtccgcgtcgtagactgccacctcgatgccgcgccgggccagcacggcggccagatagatgcagctggtggttttggccaccccgccctttgcgttcgccaacgctactcgcatgatgcttcctccttggattcgggaccattcgccggatcgtcggcatggttgattgtttgattgcttggttgtcggattgtttgattgtctgcttgcatgatggtttgacggtcatgtggcccgtctccgggctgggcgcggcctgcggcgcgccatcggcgttgcccgcgttccatgctggccttgccccgggccgtgtcgaagacctcgggatgggcttggagccagtcgacgaacaggccccagcggcggacccagggcaccgtgcggtcgcggcagggcacgccgtcggcttccgccaggcgggcgatctgacggcggtcggtgcacgagcggccgccgtacaagccccattccaagccggcggcgccggcgtaggccaggcattcggccctcaccgggcagtcgtgctcgcataccgacgcgcccgcctgccggaacacgcgggccaggggatgcgtgtcctcgaactccaggccccacatcaggtcggcccacggctgcgggaaatccgcgcagcatcccatgctcttccacgcctccggcgaacgaggcgcggcatccgctatgccggtcatgccttggcctcctcgtgggattccttgtcttcggcgcggtcggttttctccaggccgatggcgtggctggcttggttgcgccggtcgtaggcgcacaccggacactctgcctgcttggtttcgccgtcgaggtgcgcctggcacaatgcgatcgacaggatgccgccgccgtagaccggcacccgccaggccaagcccgaactaaccgccaccggccggtctggatcatggaccgacgtgagctcggtagcagcggcatggctgccggaatgctgcggacctcgtgcccgcttggtgcgcatgtcgaggctgacctgcgcgaagtagcgttcgaccatcgtgccgtccaccagccatgagatccagcgcggattgccatacgcccaatcaaggatcgtctcgacctccgtcagagagcgttccatcagcagctcgtggaccttgcgtcggtctcgcatcgacgccggcctggctgccttcgggtcgatggccgccacacggtcatggatcagcgtcagcacgcgaacctcctgcaaggcccgggaacgcacccgctcgtccgcatcctccgcccctggcgtccacaatgggtcgcgcactccccgaggtggcagcgccagacgccaatccggggcatcatgctcgcttcgttcctcttcgggttgttccccggcgaggggaatgtccccgtaggggacaaggggagcattggttatcacttgtctattgggtgacatgacgtcacctctcttcggacaggatgtcaccccaccgtcggaatcgccctggagtgacattgtgtcaggtgacactgcgtcaggtgacaccatgtcaccccgcgcgcactccttgctccgcgatggtccggccgcactaggcttcgccggaacacccttgcccgcgctggtctcgccgggatcggtgatgtcctccggctcggtccgcgcgcccttcatcaccacgtcccataccttggagcgatggcccctggggatgggttcgtggctgcggggattgcgcgcggccagctcttggtcgccctcgcgcaagtagcccagctcctgcaagcgtttcaacgcgcgcagcacggaacggcgcgtgcaatggcaatgcgccgcgatggtgttgaccgacggccacgcgccgcacccgtcgtcgtaatacgcccttcgcgccagatacaccaacacgaacttctccgacaggctcagctgctcgtcctgcaactgccacgcccactgctccgccggcccgctcatcgcgcatcctccccgcgacccctagcgtcatggagccgttcgccgatgcggtcgcccagcgcggccgcacggcacaacgcccacaccaccagcagacacacaacgattgcgacgacggccaccgccgccacagcccggaccatctcagacgccccggcggcgacggcgcgacgagcgcgcgggatgcagcagcaccgccagcaagtgcgcgcgagcaatccgcacacgcagcgacgggatggtttttacggctcccgccgcacgcggggcggaagcgatgataggattggtcattgcgataactctctttcaatggagggcgaatcccgggactcttgtcacttgaatcgcccggaatcccgcccaaggttgtcgatcagccctgcaccaagcgccaacacggtgcggagcgctttcgttttccatgtttttcccggcccagttcgaccagaccgaaccggggaggcggtcgtattgcgcaaccaagcgcgccgcccatagcatggtgcgcacaaacccccaagggcacgcaaacgaaaggaacggacatgaccggcaacaccacggcaagaacacaggccatcgaactgggagagcacctgcgtgaggtcgccgcatggaacgtgcgcctgcacctggccaaggaagaactcgaacagcaggccctgtgcgaggcggccggcgtgaccaaggccaccatatcggccagaatgaacctcgacgccgcatgggacctcaacgccatcgcggccgcggccgtcaccctcggcatgcctccggccgaactgctcgacgacacgctgtacgacatcgtcaacaacgacgacacgaacacaaacgaaggcaaaggtgcatcgttggtggcagcgctgacctcgacgctcctggcacgccacatcgccggcaggtgcgacccgttgaaaacaaaaggctcctgccgaatcacaatgatggcgacaggagcaaaccggtacccccagagagagtcgaactctcgttgtcagattgaaagtctggtgtcctaaccgttagacgatgggggcgaacaactcgaattactttacgggaggttgttcggttatgcaaatcgacggcatttcggcgtgtcgcaatcagttcagggtgacggcctgataggtgaagtcgtggatcgcgcggccggcggccaggcccttcttttcgaagttggtgagcacgcggccctcgaaccgctcggattcggtgaagtcggcgtgcggcatgtcggcggccatgtcggcattgcccttacccacgtgctccagcgggaggctgacggttatgctgcccaggttcttccagccatcgaggccgtccatcacctcgtgcacgtgcagggcgtagtcctcgatgtcggtggcgatgcgccagacgccgtctgtgaccagcgcgcgatgaatgtcgccggccatggcctcctgcacgatgcggcgcttgtgatgcttcttcttgggccaggggtcggggaagaaggtccatacctcggccacggtgccgggcgcggtcaccttgaacagctcgggcgcattgacctgggccacacgaatgttggtcagcccctgcttgccggcgagcagcagcgtgtgggccacaccggggtcatagacctccaaggctaggaagttcgtctccggatgggccgcggctgcggccgccacgttttctccctgcccggtgccgatttccacaatgagcggattgtcgttgccccatgcggactccacgagcgcgcggtcgagcgtgacgccttcgcgcacgtccagcagattgccggccgcaatgtccaacagatatgtgccggcatagttgtcccatgcgcgctgcaggcgatcgtccaaacgtccggagcggcgcacgaaggaaagcaccttgtgcagggggtgcgccggtgcctcggtgtggtctgtggccatcgcggcgacggaatcgattgctgtggattcgggatcggtcatatattcctcggattttccttgtgcgccgcaccgctgttcattcgttaggtcgatttggcgttcattaggtgggtggtgtgcgataccaaccaccatatcaagccatttacccggtgttcgtgcgggccggctccgggccgacctacctaatgaacgccagatcgacctaatgaatgcagatattgccggacgacaccaccgttttgtgcgattatgttcgtgtgatatactcaaattgtttcaaaaggtaacaaagcggaccaaaagtgaacagccgctgaactccacacggccgacacttgcaacccgcataaggaaaggtcaactatgacagttctcgtcaccggaggctgcggctacatcggcgcgcatgtcgttcacgcacttcatcaggccggcgaaaaggtcgtcgtcgtcgacgatctgagctacggcaagcccacccgcatcgaaggctcccgtctgtacggcatggatatcgccgctccgggcgccggcgagcgtctggccgaaatcctcgacgccgaaggcgtcgactccgtgatccacttcgctgcccgcaagcaggtcggcgaatccgtggagaagccgctgtggtactaccagcagaacatcaacggcatgctcaacgtgctcaccggcatgacccagtccaagaacgccaagaagctcgtcttctcctcctccgccgccacctacggtgtgccgccggtcgatgtggtgcccgaggacgtcgtcccgatgctgccgatcaacccctacggccagaccaagctgttcggcgagtggatggctcgcgcctgcgagcagccgttcggcatccgcttctgcgcgctgcgctacttcaacgtggccggctgcggcccggtcgaactcgaagacccggctattctgaacctcatcccgatgctgttcaaccgcctcaagcagggcaaggcccccgccatcttcggcgacgactacccgaccccggacggcacctgcgtgcgcgactacatccacgtctccgacttggccgacgcccacatcgccgccctcaagtacctcgaccgtgacgagcgcaagtacgacgccttcaatgtcggcaccggtgaaggcacctccgtgcgtcagatcgtcgacgaagtcaagaaggtcaccggtctgccgttcaccgaggctgtcatggcccgccgcgccggcgacccgccgcacctgatcggctccccgaagcgcatcaacgaggagatgggctggcacgccaagtacgacgtggaagacatcgtcaagtccgcgtgggatgcctggcaggccaaccccgaacaccacatcgacgtcgacacctggaagcaggctgactgagattgacggtcactttgcggtggatgccgcgaagcgtttccgtccataagggcgtggccggggttccggtcgcgcccttcgtcgttttgtggatgtttgtgacagacgtgttcgcgtgctggtgatagcaaaaaccttgaaattatgcggaacacgccgaagtttgcgcgaccggcgaatttcagtaatatatacatctgttgcctcacgcaagtgagaacaatggccccgtagctcagttggttagagcgccgccctgtcacggcggaggtcaccggttcaagtccggccggggtcgctggaatggttatgaaacccggattatccgggtttttgactgttcatggctctgtagctcagttggtagagcgagcgactgaaaatcgctaggtcaacggatcgacgccgttcggagccaccacaatgaagccccgccttgtgtggggcttttgcatatccgtcacgtacctactccggcgggctggccggtcaatgcaaaggctcgcgttcgccaacaactgtcttcctcgccgcaactacgcacgccaacagcaccaatgcgaacatcgggttagggttaaataaagaaacgtgggtcttatccgcgcgtgtcatggtcggtgcgatcgtccgccccagccgtttctggggctgtggcgctcatagagtcagtattgcagaaaaagcacctgcgaaatgcgcgtgcgaagggaatcgtgtgggacggcacgtgattttgccgattttcgacgtgccgtcccacagcgttcgaagaacgccctcagagctgagggcaaagaacggctctattctgcggttctcggcttatgtcatgcgggatagcagatacgtcaaacgattgatgtatctgctatcccacacttctgtgggacggcagatgaacaatggtaaaaaccgcgtgccgtcccacagaaacggagtcaggcctgccaccattggcgcagagggtaccacttgccgtccgggtggcccacgcgatccggcttgacagccaggaactggtgaatctggatgccgtcgagctcgaagttcagagcgcaggcggccatgtacataccccataccttggcgcgttcaaagccgacctgcttgaccgcgtcgtcccaatgctcggagaggttctggttccagtgatgcagggtgagcgcatagtgctggcgcaggttctcctgatgcaccacgttgaagccggcgtcatggatgcacgattcgatgaagccgggcgcgccgaggtcgccgtccgggaagatgtaacggtcgaggaattcgtcggtgccgggcttgccgtgaggcttgtcatggctgatggtgatctggtggttcagcagtcggcccatcggcttcaggagacggaacatctcttcgaagtagctctggtagttcttgacgcctacgtgctccatcatgccgatcgagcagataccgtcgaagtcatgctcgggcacctcgcggtagtcctgtacgcgcacttcggccagatcctgcagcccctcacgggcgatccattcgttggcgtacgcggcctgttccttggagagggtgacgccgagcgccttgatgccgcgacgggcggcggtgatgaccatcgaaccccagccgcagccgatgtccagtaagtgctggccgggctgcaagtccagtttgtcgagaatcaggcgcagtttgttggcctgtgcgtcttcaaggctcatgtgctcgttgtcgaatatcgcgcaggtgtacgtcatggaggggccgaggaagtcggcgtagaactcgttggacatgtcgtagtgaaagctgacggtttccgaatcggccttttcggtgtgcggcatcaggccacgcttgatgcgggcgaacttgcttgggccctcggtggcgggcaccggcggcttcttgaagccgtgactcagaatgccggcggatacgcgggcaatggatgcgggagtgagcgggcgaacgtatttggccagcgacaccagcttgcgcatcgccggatacgggtcggcgtagtcaatgtcgtccacgtcgaaatcgcccagaatgtatgcgcgcacgatgccgatttcattcgggtgcgcgagcagctggtacatgcagttcggcgtggcgattttgaccttcaaatccgcgtctgccgggccgaaatgcgagccgtcaaaagcgtcgatacgaacgggagcgtcggggtcgagaaacagggatgccatctcgccgaccgtcatagccttgccatttgccattatctgcctcattctcttatgatgatcaccccaattgtcgaggtatcttagtcctcttcaggagactgaaaccgttgaatacaccatctggtgaaccagttcgcgttcggctgatgaaacacgaatggaattaggcatctcgcatattgattgtgtacgcgcgaagtaagcagataagagacgagtttctcggagagcaccaagcgactccggaaaatggtcttatcgttgagatctcgggcgattgaactggtttggtcaatggacaataattcgacaagtgcggaattccgccatttcttgccattattttcagtgttgttctttcagcgtgttttcaggtgaatgctcatgcgcggagtagactggggaaccgttggaccactcaaagagtgagtggaccaccagttaagacactagctcaaaaggagagtccctatggtataccgcatgattttcaaccagactgcatacttcggacgtggcgcgatcaaggaaattccggccgtcgccaagcagcacggtttcaccaaggcatttatcgtcactgatccggtactgctggagaccggcaccgccgagaaggtcaccaaggttctggatgaggccggcctgccctacgaagtgttctccaacgtcaagccgaacccgccggtagagtgcatcaaggacggcgtcgccaagttcgccgagtccggtgcggacttcctgatcggcctgggcggcggctccccgcaagacacctgcaagggcatcggcatcatcaccgccaacccggagttcgccgacgtgctgtccctggaaggcgtcgcggataccaagaacccgtccgtcccgatcttcggcgtgccgaccaccgccggtaccgcttccgagacgaccatcaactacgtggtcaccgataccgccaacaagcgtaagttcgtggctgtcgacccgcacgatatcccgatcgtcgccttcgtggacccggatctgaccgactccatgccgcgcggcctgaaggttgccaccggacttgacgccctgacccacgccatcgagggttacattaccccgggtgcctggagcctgtccgactgcctgtccatgcagaccattcgcatgattgccaagaacctagccaagtccgccgacggcgacattccggctggcgagcagatggcgtacgcctcctacatcaccggtatggcctactccaacgtgggcctcggcctggtgcacggcatggctcacccgctgggcggccgtctgggcgtggcccacggtgtggccaacggtattctgctggccccggtcatggaatacaacaaggactacacgggcgagaagtaccgcgacatcgccgacgcgttcggcgtcgaggacgcctacaccggcgacctggagaaggtgcgcgaagaggccgtgcaggccgtccacaagctgaccgtggatctgaagaacccgaccacgatcagcgaggtcggcgccaccgaggctgatctggaaccgctggcccacgacgccttcaacgacgtgtgcacccccggcaacccgcgtcaggccaccgaagaggacatcctcgcgatttacaagtcgctgatgtgattcgtcgatgacgccgacgatgccggtgggttcccctcgtcgggaacccaccggcatcgctatctttcgtgcttttcgtcgtagacttcgtcggtgggggtctcgtcgtacagctgcttgccttgcgcctccgccagttccatctgctcgttgatccacgcggcttcagcaggattgatatccgcggaattcagcactttctgccacaccgggtagaacatgtgcatcgccggatacatggcggtgaacaacacctctggcttatgcgtgcgcgtatgttgcggatgtgcatcaaacgtattcttaaaacgtcgcatgtagttcaggaatgaactcagcgatgtgtccatccgtcgcgcgctcatcgcggcgatcatgcgcggcgagtacacggttttcagattcttgcccatcagatgcagggaaatatcgatatcctcgtgcatcacatcggccttatctcggcagacctcattcgcgatctgatgccaggccgaagcgcgcaaggccatattcgagccgaacagcagcggctggccgccatcggcacggtagattcgcttgcgtaaggaattgtcgcctttcaacccgaaatgacgtgagggcatgtcgtaatacatcaccggaccagtggcacccatcgcggccgggtcttcggtgaagatgccggagaccacctccacccagtcaggccggatcatacagtcggcgtcaaaacggcccagcacatcgccggtcgcggcgttcaggccaaagttgcgggtgggaatcagcccctgttcatcgttctggtgcaacagtttgaccggggtctcgggatgttcggcgatgaactgttcgacaatcgcgcaggtgttgtccgtagaacgattgtccaccaccagcacctcatgcggcatgatggtctggcgagtggcgttcagcagacagtcgcggatgcgttcggcttcgttccacgctgggatgatgatcgaaacgttgagcataacatcaacaatagaaaagcgggtgtacgccgccggcgtatccgagcttcaaacccctcgctacaatggggagccatgagcgaacgcgcgcgaaacataaacagcaccgacacgtcgagaagcggtgccgcagaagccggggcagacccggacgacgagaatcgtatcgactttggtactttgttccccgccaagggagattcccgcaggccaccggaatggttcggccgcgcgctactgtatgtggccctcgccgtcatcgtattcatgttctgctggcgctcgtggggcgacatctcctatctggtgttcgacatcatcatctcgctgttcctggcgctggccgtcgaaccgctggtggtggcgctggtggctcatggctggaagcgtggcgtggcttccgccgtcagtctggtgggcgtggccgtggtcgtgggtgtgctgctcacgctgttcggcaatatgtttgtacagcagatgattgccatggtccgcggtttgccggcaatgtatgggcagattcgtgagttcgtggaccagcatgccacgttcaagatgccggaaatcagcaatcttggcatggaaatcttcaacaatatccagacctcgtgggtcaccgatttcgccggcaccgccatgagtacggtgggtggcctgttctccttcctgctgaacctcatgaccgtggtaatgaccacgtattacatctccgccgccggcccaaagctgcgccgctccttctgccagtggctggcccccaacacgcagcgtcgattcctgctggtgtggaccgtggcccaaggccagatttcgtccttcctgttctcccgttcgattctggcgctgatcaacgccacctgcaccgccatcttcttggagatcctgcatgtgccctactggctgccgttggccctgttctgcggcgtggtatcccagttcatccccacggtcggcacctatatcggcggtgcgctgccggtgctgttcgcttggggcaaccgcgggtggacgtacgccgtggcggtgctggtgttcatcatcgtctaccagcagatcgagaacctgattctctcgccgaggatttcgcagcgcacgatggatatcaacgcggccgtcgccttcctctcggtgctggcgttcggctcgctgttcggcgcattcggcgcgttcctggcgctgccggtcaccgcatcgctgcaggccatcttccgtgcgtacaccaagcgctatgagctgattgactcaccgctgatgaacgatccgactccggagaagaagtccaagatcgtcgaggcgtccgaggcgttcggcgagcacgtattgcagccaatcggcgagcacatgccgcgtgcggccaggggatccaccaaccgcgtgccgatgaatgaggaactgcgtttgctgcaggaacagatttatgcgattccgtcgcacgagacgaaagaatccgatttggacgattccgccaccgtggcgattccgaagaacgtgctatcctccagcgctcgcaagggattacgcggcactgagccggagtcggatgccgatgataccgataacgccgataatacagtcggtgcggatgcaagctttgatgagccggatacggcggcgattccgcagcgtggtgccgcggatacgcagcagtctgagcagcccgagcagcctgagcggtccgccgaacagcctgagcagcccgagcaacgcaagcaaaccaagcagtctgatcaatctgcctccagcaatcctagggcagggtggcgctgatgactctgctttccgtactcgatattcttctgatgatcgtcggcggtgccggcatgatatatcagggactgtgcatcgtgatgtccctgttcgccaagcccgtgcgcttccccgacgccccgatgaccaaccggtatgccgtgctgatctccgcgcgcaacgaagaaaaagtgatcggcaaccttattgggtcgattcgcgatcagacctacccgtccaacctcatcgacatctggctggtggccgacaactgcaccgacaacaccgccgacgtggtgcggtctttgggctgccatgtggtggaacgccacaatcttgagctggttggcaagggatatgcgctgacgtatctgttggggcatatgctcgacatcggtgcggccgatgattatgaggcctacttcgtgttcgatgccgataacaagctggacaagcactacttcgaggaaatgaacaaggcgttctgctccggattcaagattctgaccagctaccgtaattcggtgaatctggcggataactgggtgtcttctggttctgcgctgtggttcatccgtgaatcgcgattcctgtctaactcgcgtatgattctcggttcctcttgccatgtgggcggtacgggattcatgttctcccgcgaggtgatgaagcggaacaagggatggaagttccatctgctcactgaagatcttgaattcactatggattcgattctgcatggcgaccgcatcggctattgcggtactgcgatcctctacgacgagcagccggttaccttctcgcaaagttggcgtcagcgtttgcgttggagcaagggattcctgcaggtattccgttattatggctcggcattgctgaaacgcgcggttcgcgaacgtgatttctcctgcatcgacttcaccttgatgctgtgtccgtttaccgtgttgggcgcgattcgcgcggtgatgggcttgctgttcgccgcgtgtggcttcgtgagttggccgagccagctgcaatcgctggccggttggtccagcggcatcatcatatcggtgttgggcctgatggcattggctgcattgaccatcattgtcgagcgcgaccagatcggtgccacgaacaaggagctgctcgcctatgtgctcagcttcccgatttacattctcagctacgtgccgatctccttccaggccctcttctccaaagcccagtggaagcccatcgcgcataagggttgaccgagtccgctagttggagctgctcagcggggcaatccaacagcaacccgggggtttgcttcgctgagggttggctggtggggtagagtggatgtatgagcttagacaatactcaaaggaatgtcggatttcagccgccgatgatgccagctgccgcccccgcgcctgcacagccgtcgcaaccgcagccacaagcatggccgccgaatccgaatgcggcggtgtccattcgtggcctgttcaagcacttcgaccggaagatcgccgtcaacggactcgcgctcgatattccggtcggctcgttctatggacttgtaggccccaacggcgccggcaaaaccaccacgctcaatatggtgaccggtctattggtaccggacgccggcaccgccatgattttgggccatgacgtgtggagcgacgtgaacacggccaagcgcatgatcggcgtcatgccccagcccgaccagatcttagaccgactgaccggtttgcaattgctcgtctactccggcatgctgcgcggcatgagccgcgatgagaccacgcgtcgcgcccaggacctgctcaatgctttcgacttggccggggccgccaacacgatggtcaccgattattcggccggcatgaccaagaagatctgcctggcctccgcgatgattcatagcccgcgcattctggtcctggacgagccgtttgaatccgtggacccggtgtccagcgccaacctcaaagacatcctcatcgaatacgcgaagaccggcggcacggtgattatctcttcgcacgtgatggcattggtcgaaaagatgtgcacgcatgtggccgtaatcaacaacggtctggtgtgcgcggccggcacggtggacgaggtcgccgccggcgaagaactcgaagaccgcttcctgcaactggtcggcggccgccacgaagccgcccatctcgcatggctcgacggcgggcaagcccaagcccaagcaccaacttcggtccagccggtccagcccattccgcttacaaccgccacgcccgccatacccaccgatgaggcccgccgatgatcagcagcgccatcaccctggtccgcctgcgctggacgctcacgctcgccaccctgcgaaaatcggcgtggcagaccgtcgcctatgtcttttccgccgtactcgcggccggcaccatcatcggcaccggcgtgctcgcatggttcatcggcatactgccgcccttcaccgtgaacgcggatggctttccgctgaacatccttggttccggaggcatcgtcaacatagtcgtcgtgctggtcggcgcgaccatgaccatcttcatcggcttcatccagctcatgatgcttggcgaaggctccaccatgaacccacgcaaattcgcgctctacggcatcgccgaccgcaacctgcaattcggcttgctgctttccggcctgtccggcatccccgcccttaccggcgtggcctcactgatgctctggacactggcctatcggcatatgggaccagccgtaatcatcagttccctcctcgccgcagtgctggccgtcatcaccatgatgagcatctccaaactgctcatcgccctatccaccacgctggtgaccagcaaacgcggcaaaggcgcgttctatatcttcatcgtgctgacgttcgttatcatctgtcagttgccgaacattctggtcaactccggcgtggccttcagcctcaacaccgaaacctggggcgcggcgaccaccatcgtcgcatggacgccgttcggcgcggccttccaactaccgttcgacgcgcttaccggagcctgggcggtgctgctcgcccgcatcgccatccttgccgtcacatggattgtctgcttcgccgtctgcacctggtgtctgagacatgaacggctcaccatcggcgcaaacagtccgtccgagaccgccaaaggcatcggcgcattcgcatggatgcccgattcggcatccggcgcggtttccgcacgcctgatcacctatctcaaacgagacccccgccaagccatgaccttcgccatgccggtcctgttcctgatcatcttcgccttccaggcacacggcatcagcgcggtcgtctggcagtcgctgatctggtgcggctggttcatgtccgtcgtggaaagcaacgggctcgcatatgacggccgcggcttcaccatggaagtcatcgccggcgtgcgtggccgggccgacagaatcggccgcgtacgcgtctacgtcggcatcatggtcgtctacatggtgctgctctatctcgccggcatcgtgctggtcggcgcactgaccggacgctgggcgcagcccgatgacctcgctaccggcctgatcttcctcgccacgggcatgggcatcgccttgagcggactgggcgtggccgaagtcacctcctgtgtactgatgtacccggtcgcctcaatggacaagccgttctccgcgcctcaaggccgcgccatggcccaaggcttcttcccgttcgtctacatgcttggcagcctgctgctcatgctgcccactggcatcgtggcgctggtcatgctgctgacaggagccgaaggcggcatgtggctggcgattattccggtcgcgctggccaatggcatcggcattctggcactcgggacatggctgggcggtaagctgatggatgcgcgaatgctctcgattgtggcaacactcgactcgttcgcctcattgcagaaatgattgccttggcataaggagcacgatggtatctacagcggtatcacgccgtcagcgacgtgaagcgcaacggcggacccaacgatcgcatcgccgaacactgaccgtcatcatttccgcactgaccaccatcgccctgttcgcggggtactgcgccgccgacatcaccgacgtagcccccggattgttgacgttaaaacctgtcaccgcacctgttttcgccaatccggccaccgccaaatcaggcggcaccatcgccggtgccctgaacgcgaacaaggccattgattccacggccgcttctgcactggtcaacgaattgctgtccgcgcaaggcgtgggaaacgatacgtcggtgatcattgaagacgcccaaggcaccgtcgctgccgaacatgagtcgaacactccacgcgagcctgcatccacactgaaaacgctgaccgcgctcgccgcctcatccaccctgaacatggcatccaccttggatacccaagtgttcctgacccaatccgatgacggcaccaatacgttgaccctcaaaggcaatggcgacatgctgctgtctgcaggcgattccgacgccaaccataccaacggacgtgccggtctgaacaccttggccaaggccaccgtggccgcgctcgcccagcgaggcatcacttccgtcaatctcgagtacgacgacaccctattcggcgactcacgcattcccgcaggtctgtcggaaggcggcgcggtcttaagcgactacaccgtctacttcacgccggtctcatcaatggcgattgatggaggccgccaacacaccgccgatacgcctgcgccggccgaccccgatgattcggccggatacccggaactgtcccagcacaccgccagcgacgtggccacgaaattcgccgaactgctccaatcgaacggtgtggccgttaccggagacgtgacggcaaacaccgctccatccggcgaaacgcctttggcctcggtgagttcggcaacactgtccgaaatcatggcatacacgttgcgacattcggacaatacgctggccgaggagttcggcagactcaccgctttggcgaaatcagcgacaaacagtcctgaaggcggcacggaagcggtcaaatccactctgaacgatctcggtctcgacacatccggtctgaccatggccgattgctccggcctgtctcccggctcccggctcaccgtacgcacgctggcggccgtccaacaacgtaatctgaccaccgagagcggtgctgctggtgcggaaggtctatccatcgcggggttggtgggcacggcgcaggatcggtatacggatgatgccgtggccggtctgctgcgcgtcaaaaccggcagcctcggcacggtcacgtcgatggccggcaatgtgtcccgcaccaatgggggagcgttgtcgtttgccgtggtggtcaacaatcctgaggattatgccgccgcgcgtagcgccatcgactcgttcatcaccaagctcgcggggctgtaaaagaggcatcaagggccatcaagggctacaaaggccgtaaacgtccataaacgcacgagtgcctataaccagaaaagggtggtgagtacatggcatattccgcacgattgcgcaaggccgtaggcgcggtccgaacaacgctgagcgccgtggaactatgcgatgtgcaggctcccgaattcgcgcagcatggggaccatgccgttgcctccgatgcaccactcgtgctcgtggcctgttcaggcgggcgcgattcgatggcgctggccgcggtaagccatatcgtatgcacgtccatgggcgtgcgttgcggtgtcgtgattgtggatcacggcttgcaggagggttccgaacaggtcgccggcgaggccgcggatcgttgccgtgcgttgggactgggcccggtcatcgtgcgcaacacaaccgtgcaggcacgcggtgagggcctcgaagcggccgcacggcaggcccggtacaacgagctgtgcaccgcggcgcgtgaatcaggtgccattgccgtgctgttggcccacactatggacgatcaggcggaaaccgtattgatcggactgctgcgcagccgtggcgtggatgcgttggccggcatgccgcaggtcttcacacgcagtggcgtgacttttgcgcggccgctgctgacccttactcgagacgaaaccaccggcctctgtgaagacttgggtgtggaatattgggatgaccccaccaatggcgatgcggtagacggcgagttgccggacgactatccgttgcgctcgcgggtgcgccacgacctgctgccggccatcgaacgattcgctggattcaatgtcacccgccatttcgccgaaagcgcacagttggccagaatggataaggagtatctggatcagcgatccgacgaggtgatgggggaggcggttacggcagttgaccggccggcatcgtcggcggcggtatcgaccgatacgccacgagcctgtgctgcagacgataccaacgattcgggccatggcatcggcctgatgatcggcgtcaaacgtattgcacgtgagccagaggcgattcggttgcgggtcatcgctcacgcgctgagccaggccggtgtgaacgccagtgccgcccagattgccgccatcgaccggctggtcgtcgattggcatggccaaggcggcgtctcacttcccagaggttattcagccaatcgcaagaaacacgtcattcgcgtgtgccaagatggagcgcatgcgaatcgctgacgttgaggaagatattgaccacgagctggtcagcaaagaacagatcgatgccaagatccacgagatggccactctcgcgagcgaggattaccgcgataagaatccgctgctcgtggcggtgctgaaaggggccgtgaatacgctggtcgcgttcacccaggccatgagcattcctgtacagatcgacttcatgagcctttcgagctatggctcgggcacagtgtcgagcggtgaggtcacagtcaggcaggatttgtccgccgatgttcgcggacggcacattttgattgtggaggatattgttgattcaggacgcacgctcgcgtggctggtcgcagaactgaaacgtcgtggtgccgcttccgtggaggtcttcgctttgctgagcaagccttcccgccgagaagtggacgttgatgtgaagtacgccggctatgagattccggacgagttcgtcgtcggcttcggcctcgactttgacgagcgctaccgcaacctcgattcgatcgcggtcctcaagccgtccgtctaccaaggagtgcaagcatgagcttcccacaagggccgggtaacggcaataatccgaacccggacaacaaccgtaacaacggcaacccgttcaccaacccgttcaaccgtggcaataacgggaccaatggcaaaggcaacaacaacgagaaccggccgatatggcagtccccctggctgtggggtgccgtactcgtggtcatggtcgtgctgatgttccagatgttcgccggcggtggcacgaagaccattgacaccaaagatggtttcgcgctgatcaatcagggcaaggccacgtacgccgagattacggacaacaagcaggtcgtccgccttaagctgaagaacgactacaccaagaagaacgccgacaccggcaaggtgaccaactacggcaagaacgtgcagttctactacaccttcgcgcagggcgcccaagtggccaaggccgtggagaacggcaaccttgagaagggctggacctcgaacatcgagcagaccagcatgctgagctacctcgtcacctcgatcctgccgttcatcatcttcttcgccctgttctggttcctgatgagtcgcatgggcggtgccggcggcatgctcggcatgggtggcaagaaaaacagcggcaagctgctcgacggccagacccccaccaccaagttcgccgatgtggccggcgaagacgaggccgtggccgaagtcgaggagatcaaggacttcctcaaggatccgtccaagtacaaggcgctgggcgctcgtattccgcgtggcgtgctgctgtacggtcctcccggcaccggtaagacgttgctggcccgagccatcgcaggcgaggccggcgtgccgttctactcgatggccggctccgacttcgtcgaaatgttcgtgggtctcggtgcctcccgtgtgcgtgacctgttcgatgaggccaagaagaacgcccccgccattatcttcatcgatgaaatcgatgctgtgggccgcaagcgtggctccggcatgggcggtggccacgacgagcgcgagcagacgctgaaccagctgctcgtcgagatggacggcttcgacaacgacaccaacctcatcatcatcgccgccaccaaccgtcccgacgtgctcgaccccgccctgctgcgtccgggccgattcgaccgtcaggtgggcgtggccgcccctgatctggaaggccgtgaggcaattctgagggtgcatgccaagggcaagccgttcgtaccggacgtcgacctgcacatggtcgccgtgcgcacgccgggcttcaccggtgccgatctggccaacgtgctcaacgaagccgcgttgctgtgcgcccgtgccggtgcccagttgatcgacaaccgcgccatcgacgaggccatcgaccgcgttcaggccggaccgaagcgcaagtccaagggcatggctttggaagagctgcgcaacaccgcataccacgagggtggccatgcgctggtagccgccgccctgaacaacaccgacccggtgaccaaggtgacgattctgccgcgaggccgcgccctcggctacaccgccgtcatgccgacctccgaccgctactcgcagtcgcgcaaccagctgctcgaccagatggcctacgcgatgggcggtcgcaccgccgaggaaatcgtcttccacgacccgaccaccggtgcctcgaacgatatcgagaaggctacgaacatcgcccgtacgatggtgatcgaatacggcttctccgacaagctcggtgccatcaagtggggttccgacgatgaccagaccactgtgatggacggtctgcagccgcgcaagtactccgatcgcaccgccgaagtgattgatgacgaggtgctcaagctggtggagaccgcgcacaccgaggcgtggaccatcatcaacgacaaccgcgagatccttgacgagctggtccgccagctgttggtcaaggagaccctgaacgagaaggaacttgcggcgatcttcgcgccgatcaagaaggctccggtccgcccggtgtggctgtccaacgaccgtcgccccgactcggacaagccgccggtggagattcccgaaagccttaagcgctcggtcggcatgaagccggaagagtagacacgatgacgattcagcccgacctgttcatgtggtttctcacgtacgcaggccgggccgacgtcgttgtggacaatgacaagggagagatgagatgaacgaatatatagagtcttgccagcgggagaaacgcacatacgacgaggaaggcgtgcgcgaggccgtacgtctgttcctgaagtcgattggcgaggatcccgagcgcgaggggctggtggaaacacctgaccgtatcgcccgcgcgtgccgcgagctgttcgccggtctgcaggcttccccggccgatgtgctggagaagcacttcgacgtggataccgacgaactggtgctggtcaaggacatcgaactgtattcggtgtgcgagcatcacctgctgccgttccacggcgtggcccatgtgggctatattcccgccaaggacggggtgatggggctgagcaagctcgcccgactggtcgaggtgtatgctcgccggccgcaggtgcaggagcgtttgacccagcagatcgccgacgcgctggtcgagtatgcgggcgcacgtggtgtgattgtggtgaccgaatgcgagcacctgtgcatgtctatgcgcggcatcaagaagtcttccgcccgcacggtgacctctgcggtgcgcggcatgctgcgcaatccggccacccgagccgaagccatgagcctcattttggataaatagtgtctactaagctccctcatcatagggagctcacttgggacctacatagaaggggaaacataatgactgatttgcaggcgttgcatgacactacgcacaccatggtgatgggtgtgctcaacatcaccgaggattcgtcctcggacggcggcctgtggctggacccggccaaggcggcacagcacgggcgcgacatgatggccgccggcgcggacatcatcgacatcggcgccgaatccacgcgccccggcgccaagcgcgtgtccgaggccgacgaattggtccgcatcaccggtgccgtcaagacattgattccggccggtgccatattgtccatcgacaccacgcgcgcatccgtggctgccgctgcgctgagcgagggcgcccagatcatcaacgacgtttccggtggcacgctggatgccgaactgccgcatgtggtcgccgaccacgactgcctgtacatcgtgcagcattggcgcggttggctcgccggctccaagggcgcgaaccccgatcaagacacctccgtctacgagcacggcgcattggccgacgtacacgacgaactcatgcgccaagtcgacggtgtgctggccgccggcgtaaagcctgagcgcattatcatcgacccgggcctgggtttctccaagcccggcatcgagcacaacctgccgctgctgaccggactcgagaccttccgcgccactggatatccggtgctgatcggccagtcccgcaaacgcttcatctcggcgatgcttaccgaggcgggcgctgccggtgctgatgggccgatcatggcccagcgcgatgacgtgaccgcagccttgtccgccctgtccgccgaacatggcgcatgggccgtgcgcgtacacgacgtggccaaaagccgcgccgccgtcatcgccggcaacacctggcgcgaatacgcatgattcccctggctccctgttttggttgcttctaggccttggctcccctcgggcgaggggagctggcgccgaaggcgactgaggagagcatttgagcagaaagccttaccaatggacaccatcacacttaccggcgtacatgccaacggcacccacggtgtgctcgcctttgaacacgaacggccacaaaccttcgtcgtggacgtcaccctgcaccttgatctggccgcagccggtcaatccgacgatctcaacgacaccatcgattacggccgtgtggccaaggacatcacggctgtcatcgaaggccctcatgtggacctgattgagcgtctggcccaacgtatcgcggacgagattcttgccgatgcgccggccgtcgcctccatcgacgtcaccgtgcacaagcctcacgcacccatcgtcgtggcttttgcagatgtatcggtctccatctcgcgcgtgcgtgccaccgataatggacgtactgctgaagagcatgccatccataacgcggtggtggccttgggcggcaatgtgggcgaggtggaatccaccttgcgagccgccgttcgggagattgacgcgctgctcggcacacaggtgaccggtatttcgccgctttaccgcacggccgcgtggggcatggctgacggtacgccggatttcctgaacgccgtggtggagcttgaaaccacaatgggcagccacgaattgctcgccgcgttgcaaaacatcgaagcgaaccatgggcgaattcgtgagaatcattgggattccaggccgttggacttggacattatcgactttgatggcatcaccagcgcggatccggatctggcattgccccatccgcgtgcttggcagcgcgcgtttgtgctggctccctgggcggcgctgaatccgaacgccaaacttgccggagcccatgaggggcctgtagccgatttgctggccgccgcaccggaccgtaacgccgtgcagctcgagagcgaagactggatgctcggcgggcatgcagtcaagcaaaaatcagcgtcggagtcggcacccgtctcacgcaaggcgattatttcgctggattccacctcgcaggatgtcgaacggctgttccgcgaaaccatcgtttccatcgacagtgttcctggcaatcaggtacagggcatctcgccgctctaccatgtcagccatttcgacggcccggacgcgatgagcgcggtcatccaaatcgaaaccaagttgccgcccgccgacctgattgccgtattgggcagcatcgaaagtgttcatgatctggcagtcgaccttgaccttgtcgacatggaaggcgtgacttccgacgagcccaactgcagcattccttggccgtcggcccgtaaccatgcgtcggtattggcaccttggctggatatggacccgaatgcttctctgggcggcgacccggtggccttccttttggccatggcaccggatgccggacaggtcggattgctatcggacaactggatactgtcgaacagttgagctgatggcagaaccagttacgaacggtaggctagaaaccagacggtgacggaccagtctccggcctcgaacagccgggcacggcagtgacgaaaaccaaatcaagatgaacagcccaggcgcgagggccgttcgcaaacagcaaacagcaacgcaacgataaggaggccggacatgaaaacacggcgaacaccatggtggcagtatgtgatcggtgccgtgctgggcctgttggcgggtatcggtctggcctcctacggcgaaagctcgggactgtcgctgattggtgcgccttggattgtgaccggattgctggccgtgctgggcgttatcgtgctgatcttggccctgcaagtgcataaatacgcgaataccgaccccaagaagcgtccgcatagcttcatcaatcccactatcgcggtgtatacgctggtgctggcaaaggcactgggattggcgggcgcaacgctcgccggctggtatggcggtcagattgtgatgagcctgagccatatcgaggcggatttctatgcacacgccgtcaccgagtgcgcaatcgcggccgtggtgtgcatcgccgacatgatcatcggcattatcggcgaatggttgtgccagctaccgccgaacgaaggccccgaaaacctgaaaatcaaggaagccaagcgccgtagcgacatagcccaagcctacagaagataatccgtgataagacctctctgacgaggggggctgtaggcgtagccgactgggggagagaagaaggaaaaaccacaccatcggccaagccgattcccactactcctgcggcacgcgaaccatagcttcctgagcgatggccgccaccaagtcgccattctgcgcatacactttggcgatgccgagtccgcgtccgtgcgcggcgataggcgtatcctgcacatataaatgccattcgttgatatcgatatcctgataccaccacatcgaatggtcgatggacgcataggaaatgcccggtgtggaaatcgacagtccggcgcggcgcagcaccggctccatcatcacctgatcgcagccgagtgccagcatcgcacgatgcatgacctgcggcacatcgacgtggccatcggccttcatccacaccatctgcttgccggaatcatgctcggcggaatccttgtctgcgcgcagcatcacggtcggcgtcacgtggcggatatcgaatggcgatttctcgacatagaaattggcgaacggcgacttttcggcgaacggctgcatgagttccttggcggaagtcaacgtttcgggatcgggcaggttttccggcatcggatcggcaaattccacaccctcctgaccggtctcctggaaggaggcgatggccgtgagaatcgacccctcggcttgggtgacgttgacccgacgagcggagaacgagcggccgtcgcgaaggttctcgacgtcaaacagcaggtcttgacgaatatcgccggcggcaatgaaatagccatgcaccgaatgcggcaggcgtgaagggcccacggttttggacgcggcgatcaccgactgggcgatgacctggccaccgtagacgcggccagtggggaagtacatactctcgccattgatgtatgtgtgattgcggtaagcggaaggctcgcccaacttcagcaccttcaccagatggtccaatggagttacggtggttgcctgagccatggcgttcctcgattcctgttctgctgtgttcgatattcggttatcgtattccaacctatggttggcagtctatccggtgggggttaagagttccgggagcgaaatgtaacgagactgtttggaaggtaaacggttggttatgcggtgcgttgccgctacgttgctgctgcactgccggtgtgttgccggtgcgttgccgtaggtgactgtgggattttatgggatgcggggc

SEQ ID NO: 3200 - DNA, 30389 bp, Unknown
  R53_2m  MAG No. k141_3891
atccgttgcgcaaagcagtgagaacgccacggccatcgtgcgtaatctgcttgatgatttgattcaggcttctcacgatttggaaaaccttgacgaagaggacagcgctctggtccgtgaagcggaatccgtccgttcccaactggctgaaacgcgattgggagctgatggaagagtcctcgaatggaacgacgaattcatcgaatccgatccacagcaccgccatctgtcccacctttacgaactgcatcctggtgcaggcatcacgtctaagactccgcgtctggaggaagccgcgagaaaatccctcgaagtgcgtggcgatgatggttccggctggagcatcgtatggcgcatgatcatgtgggcacgcctgcgtgatgcggaacgcgccaaacgaatcataggcatgttcctacggccggtggatgcgaacgctgaaaccaatctgctgggcggaggagtgtacgacagcggattatgcgcccacccgccgttccagatcgacgggaaccttggattcccggcggccttgtcggagatgcttgtccaaagccacgatggctggattcgcgttcttccggccctgccggaggattggcatgagggaagcttccatgcgctccgcgcaagaggtggaatccaagtggatgcgacatggacggatcagacagtggaatatacgttgcgctgttcgaagcccacggagattacgctgaacgttctggggactgatatgggacatgtcgcattgtctccggataagccattcaagggaaccatccggcgttaacgtattgcgttatatccgttactaaatgttgcggaccgtctttcctaatagaggaggacggtccgcaatctttttttgatgggaaaggagattccgccattttccacgattggtatgcgcagatgaacctgtacagtgaaagctatgcgtgtaatttctggacgattcaagggtgtggcgcttgctacgccgaaaacgggtacccggcctaccacggatcgcaccaaagaggcgattttctcgcacctcgactcatggggagtgctggatgatgcccgtgtactggacctgttcgccggtactggtgcgttgggcatcgaagcgctgagccgtggcgcgcgagaactcgtggccgtggaaagttcccggcctgcggcggcgctgattaccaagaccttgtcgcagttacagaagaatcgttcgtgggatgcttcgctcaaggcccgtgtgctggtcaaaaaaaccgagcaagtggctggcggctttggtgaatcctttgacgtgatattcattgatccgccctacgcctatgagaccgctgaatgcaatcagttgttggtcaatctggcggtgggcagcgccaccaacgagaacaccgtgattatgctcgaacgctcggtacgctccgacacccccaccgcccccgaaggctggcaaatcactgaaagccgcaactacggcgaaaccgccgtcttctacatcgagcccgcggatgacgactcggatatagagcgttccgacgattccgccgcgtagtgaatctcccaccgtgtggtgaattaatcggcgagccggcgcggatgggcggcggagacctcccagcccaaggccatcagggtcttgcggtcggccttatccagcgccttgcaatccagtgccgcgataaggtctggccggatctcggcggtgcgggccagcgcttcgttgcggcgaaaacggtccaccttgccgtggtcgccggacaacagcacgtccggcaccgcaataccacgccacacggccggcttggtgtactggcgatgttcaagcagtgcgtcctcgccggtgtaggattcctcgacaatcgaatctgggttgcccatgaatccgggcatcaggcgggtgatggcctcaagcatcaccgacaccgccacttcgccaccgttcagcacatagtcgccgatcgaatattcgcgtacgtcgacgccctgggagcggtagtagtccgggatgcgcgcatcgtagccctcataccggccgcagccgaacagcagatggtcggcatggctgagctcggtggcgtcgcgttgggtaaacaacggggccgatgggttcgggaagatgagcaccggtgtgccggatagggcggaggattcagacggccgcgagaatcccagcagttcgtccagacattcgctccacacctcgggcttcatcaccatgccggccccgccgccgactggcgtatcatccaccgaatgatgcacatcgtgggtccagtcgcgcaggttgtgcgctttgatctccaacaatcccttggcctgggctttgcccatcaggctgaggttcatcacctcaaagtattcggggaacacgctcacgatatcgatcttcatgttatccagcctaacggtagccccgcccgcattacacggccaccactacactattgcggtgatgaatacgacgatgaacctccccacccgcaaaaagcccgaagtgttgtccccggccggcaacctgaggggcctgaaaaccgcggtcgattatggtgccgacgccgtctactgcggcggcaaagccttcggcatgcgatcggcccccaaaaacctaagccttgaggactttgaggaaggctcgcgctacgcccatgaacgcggcgcccgcgtgtacgtgacctgcaacgtgctgccgcgcaacaacgagatcgaagccatgcgcgagtacgtcggccagctcaaggacaccggcgtggacgcgctgatcgtctctgacatcggcgtgatgatgatggcccgccaagtggctccgaacctggaattgcatgtctccacgcaggccggcgtcaccaattaccaagctgcgaacgccttctatgagcttggcgctcgccgtgtggtgttggcccgcgagatggacttgcaggccgtgcgtgatattcgcgccaacattcccggtgacctcgacatcgaatgcttcgtgcatggcgcgatgtgcatggcgttctccggccgttgcctgttctccaactatctgaccgggcgtgatggcaatcatggcgaatgcgcgcagccatgccgctggaagtattcgatcgtggaagagaagcgccccggccagtacttcccgatcgagcagaccgagaacggcgcctatctgttcaattcgcaggacatgaatatgctggggcacttggatgatttgattgactccggtgccaccagcctcaaaatcgaaggccgcgcgaaaagcgcctactatatcgccgccatgaccaacgcctacaaaaccgcggttaatgaatacatgattcaacgcggttttgaagacgctgatggcaatgttctgaagcctttccgtgaccgtgtgattcgcccgggcgaccccgattttggccaaggaaccgaagatcaagtgatgagcaatgccgatgccgcgttcgccggtgtggccgatgagggatatgaccgtggctctgatactgcggttgccgattcggtcaccggctcggttgccgcagaacgtgaccgcgtgacggttgctgatgccgccgactcaactgcctctggtacgtcggccggcaccgccgtcgaacccgacggcatgagctcccacgcccgctccacgcgccgcaagtccaacaccgcggtcgaacagatcgagaccgattggaagcatgcggccgttcgcccggccccgcacgtcgaactgcccgaatggctgctcgaggaaaccgacaaggtggcccaccgcgactactccaccggcttctattacccggagcacaaggtcacacagaacaccgaccgctccgcctacttccgctcatggctggtagtgggcgaagtgctgagctggagcgcggacgaaggcggacgtgtcacgctgatgagccgtaacaagatcgagcccggtcaacaggttgaattcctgctgcctggcgagagaccattggtctttaccgtgccggaaaccggcctgcgcgatgccgatggcgcgccagtacccgccatcaataatccggcgcacgtgttctcgatgccctgcccgcaccaggtgcccatcaacgccgccatccgctcgcgcaccaaaaagcccaccctcaaagccgaataacctaccactccgcccccgctgactgggggtggtcatgggaatcatgaacaccgcccgcacccaagaaagaatgccttatgcctgaatacagcgaagaaatcctcgattccaacagcatcagctctaccgataaagccggtcgccctattccggtgaccatccccatcgcactggcccccggcatcaaggtggtgtacaccacgcgactgggtggactgagcaccggcgattacggcaacctgaacctcggcggcaagtccggcgacgaacctgaggccgtgctgtcgaaccgcatcgcactcgccgaagcggtgcaagcccgcctatcgctggtctcccaagtacattccggcgtggctgtggacgtggacgactcgttcgtcatcaacacccccttcggcttcgacgtgtccggcacacatggtgagactgacactccgcacgtcatcgaggcggacggccaggtcaccgcacaatccggcatcgccctaggcatgttcgcggccgactgcctgccggtgctgctgggcgacccggtcaccggcatcatcggtgcggcccactgcggccgtcgtggtctggagcatggtgtgatcggcgccacggtagacctgatgaagagcaagggtgccgatccggcgaacatcgtcgccacactcggcccgcgcatctgcggcgactgctatgaagtgggcgacgagatcgccgaccagttcatcaagcgcttcccgctgaccaagacgaagacccgcttcggtggtgccggcatcgacatcgccgaggcggcaataatcgacctcgctttcgccggcgtacatcaggtggtcgattcgatgccgcgcgtgcacgccgccacccagtaccttgaggaagacccggaactcgccgaactgtgccgcacggacggcgaaggcccggccgagctcgcggagcgcatcgacaacatcagccacagcatgtgcacgctcgaaaacccactgtggtactcgcaccgccgcgccgcgctcgccaacaaaacacacgaaggccgcctcctcgccctcatcgtgcgtgactaaacggagaatgcgggcacattccgtggagaagatgtgatgcagttcacggacggccagccctcaccctacggtggtgcctatgactgagagagatttcgatacccccgtcgagacgcctaccgtccagccggcccccgctcagggcgccaaaccggcacaaaccgtgccggtggtggccgtggtgctggccgccggcttcggtacgcgcttcgaccccgacaatcccaagcagcttgtctccgtgggcggcaagcccatcgtgtgctggagcattgatgcctttgaacattgcgatcgcgtcagcgacatcgtggtggtggtcaatcccaaggtgcgcggtgaagtggaaacgttggttggcgagatgggctacaccaaggtccgcgtcatcattgacggcggtgacgaacgtgtggacagtaccgccgccgcgctcgacatgctggctactgctggcattccggacgatgccaagattctgatccatgacgccgtccgtccgttcgtggaacagtccgccatcgacggttcgattgatgcgctcgaccagttcacggccgcgaccgtggcctacacctcaaccgacaccgtgctgttgaccgaggatctgggcgatttgaaagtggtcaagtcggtgccggaccgcccgaacaccttccgcgcgcagaccccgcaatccttccgcttcgcgacgattcgtcacgcttacgatctggctgccgccgacccggacttccatcccaccgacgacacgcgcgttgtggtcgattatctgcctgatgaacccgtcgccattgtctccggtgcggaaaccaacctgaagatcaccacgctggaggatattcccacagctgagcgtatcgccgaggagattctcggtcgtgatcccaaggaagaggcccgcgcccgcatgcacgccctgctggcccaagcggccggccagatgcatcgctagactggcattatgcgtgaactcaatgttgtgatctccggcttcgaccactatgacggcgtggaggtcaatcccgccgtcgaagtgcccaaggccatcgccgagcaggggttgggcgtctcctctgctccggacgatccgttggagcaggtcgccgtcaccgtccatgccgtcagcatcccggtgagcttcgccaaagcctggcccacgctgaaagagacgattgaggccaccaagcccaatatcgtcatcgccaccgggctcaagcacgcagcccgaggcgtgatgcttgaacgatgcgccaccaacctgatggacgcgatcaagccggacgcggacaacgtgaccccacgccgcgaacccatcgaccccaatggcccggccgcctattggacccgcctgccgttgcgctcgatcctgaatgatttcacggacgattcgattccggccaccctgagctcggacgcaggcacgttcgtatgtaattcgctgttctacaacttgctgaactggaccgccacccaggagcgggtgctgggcggattcgtcagcttcccgccggtcgtgccggcggattccagccagcatggtctgccactcgaccagcagatcgccgctggccgtgatgtggtgcgcgaagccgtgcgctactatctcaagccctccagctccggcatcctcatcgcctagcacgctgcgcgccacgccggaatagaacatggttcgcacgcattgtaacgattgcgcgtcactcaacgcccagcgttagtgcgatgcgctacagtgcttcaaggatgtgccaagagctttatgcgtgtgcgaaaggaataaacagcgatggtggatcgtttcccggtggtgctgcgaggatatgacaaggagaaggttgatgctgccttcgacgctactcaggagagtatgaagcgtgcgcagcagacgttggccagcatgcgtgagcagattgcggcggatgacgaccgtattctgcaactgcaggcccagcttcaggaagagaagaacaagaagccggaaggcaacagcttcgcttccttgggagcgaacgcccagcagatgcttgcctccgccgaacagacgagtaccgaactgctggaacgcgccaagcaggacgcgtcctccatccgtaccacggctcaggcgcaggccgaaacactgatcaacaacgccaagctggatgcccagcatattgttgacgacgccaatgccaaggccgcctcgattctgacgaacgccaacaatcaggccgaatcagtgaccacctccgccaacgaggacgccgcacaactgcgctccgaaaccgccaagaccatcaccgaacagcgtcagaccgtcgagcttgagctcagcaacgcgcgcgaagagcacaccaagaagatggcttccgaacgctccatccaagagcgcgaaatcgccgatatgaaggcggaagctacccagcaggttgccgcaatgcgcaaaagcgccaatgaggagatcaccaagcttaagtccgattccaacgatcagattgaggcggcgctcgccgaggccaacaagaagctcgccgacgtgcgcgagcaagtgtccaagatgatgaccgaagcccagcgcaaggccagcgaaatcattgatgcggccaagaccaagggtcaggaaatcactgatgaggccgaggtcaagcgcaccagcacgatgagccaggtcaacgccgaagtcgagcagatccgtcacgacatcgccgctcagcaggatgaggccacgaagaaggtcaacgaactcctgcagcacctcgaagagcgtcgtgtggcggccaagcgggaagccgatgagttggtcggccaggccaagaacactcgcgaccaagccgattcatatgccgcgtccaagcgcgaggaggcggacatccaggccgccgcaatcgtgcataaggcgggcgaggaagccgatgcgcagatcgaggagcgtcgtgccgccgcccaaagcgagcttgacggtctgtccaagcgcatcgccgatctgcaggaacgcgagtccgtcatcacccagcgtgtttcggaactgcgttctatgttctcgcaggcgttctccggattcgctttcggcggtaatgcggcggcctctggtcaggatcaggaagccgctgccgcggcggcattgccggtggttgcgcccgtcccggaagtcaagcctgtacacaacgaggccgatgatcagccgggtgagttgagcggaaacgagtcggctgccgacgatcacaatgagacagatgcggcaccggctgattcggctgcgcagaatgagcagtccgaatcgtctgagccgtccgagcaccagacacagggcgaaccggaggccccgactcaggagaatccggccgtatctgagcagaacggcgaatgacaggccttcgattagactactagcggtaagaattacggcacctgcgctttcgagccaggtgccgtattcgtttggatctgcgccacaagcgcaccatcacagaaggagtatgacatgagtgaattgacgcctctgaccggcgaagcattgaataccctgcgcggcgatttcgcacagagcggcaccaaccgtctggccatgaacgcggtgaccgccgccggcatcgacaaggtggctcgcaattatgaccgcgctcgtctgatgcagcgccgtttctccaccatcgttgacaatggcgaagccacccatcaggatcgctccggccgctgctggctgttcagctccctgaacgtggcccgtttcgtggccaagaagaacatgaacttgaaggagttcgagttctcccagaactacgcgatgtactacgacaagctggagcgcgtcaactacttccttaaggatgtggccgctctggtggctgccggagagccttccgactcccgcctgatgcagcacctgctcgccgacgtgatgggcgatggcggccagtggaccatggccatgaacgtgtacaagaagtacggcgctgtgcccaaggacctgttcccggagaccgaatcctccaagaacaccggtgaaatgaacacccagctgcgccacatgctgcacaccgccgtggcgcacatgtacgccgctgacggcgatgcctccaaggtcgaggcgattattgccgacgccactgctgccggccaccgtattctgaccatccacctgggcgagccgccggtctccttcgactgggaatggaccgacaaggatggcgaattccaccgcgacggcgagattacgccggttgagttctggaagaagtacgtgggtccggctggtcttgaggactacgtgtgcctggtggatgatccgcgcaccgagcacgccaagggcaagaagatcggcatcgagcacctcggcaatgtggctggcggcgacgccaccgagtacctcaacgtgccaaaccagttcatgaaggactgtgtcaagcagattctcgttgagcagggcatcccggtatggttcggtgccgactgccacccgttcatggaccgtgagaacggcgcttgggccaccgacctgttcgagtacggccgcgtgtacgacgtggacttcgatttggacaaggaagcccgcgtgcgcttcggtgactccgccatgaaccacgccatggctttcgccggcgttgacgtggccgacgacggcaccacccgccgctggcgagtggagaactcttggggcaccaagatcgccgacaagggctacttcaccatgtccgacgactggttcaccgaatacgtctacgaggtagccgtcccgaaggccctgttgccggaggaataccagaaggccctcgaagagccagccaccatgctccccgcatgggacccgatgggtgccttggcctgacttcgccagcctcccggaatcggcctgacggccgatgctgtgttttttcgcagcctgccggctgctagggtctctccctctgtcagcgcgaagccgctgacggggggggggaggccgcggtcgcaggccgcacaacaacacagcatcgccgcaggcgagtccacgcaggcgagttcacccaaagtccataaccgccggcccaacaagcagtccccgtaacagactgctatagttgggcttttgcgtctatagcgccataccgacggtacgtatacaaggaaaggagtcgagcaatggcagcactacgtggtccggatagttccgaggatgaacgtcgtttgggggagcaggccgtctttcccgagaccgtcgatgtcaacattcgtcagcttgaccccattcccgcgccgcgtgccttcctcagggagcagccgctcaccgatgagatgagcgagctcgtgctccactcgcggcaggaaatccgcgacgtgctcaatggccgtgacgatcgattgctcgtcatcgtgggcccctgctcaatccacgacccgaaggccgcgcacgagtacgcagaaaagctggctgccgtcaagcgtgagcttgaagaccgtctcgtgatcgtgatgcgcgtgtatttcgagaagccgcgcaccacgatcggttggaaaggcctcatcaacgaccccgatctggacggtcgcttcaatatccgtaagggcatgtggctggcccgcaaggtgctcaccgatgtgctgagcctcggcctgcccgccgccaccgaatggcttgaccccatcaccccgcagtacatctgcgacgcgatcagctggggtgccatcggcgcgcgtaacaccgaatcccaagtccaccgcgaactggccagtggcctgtccatgccggtgggcttcaagaactccaccgacggctccatcaaggccgccgccgattcctgcttcgcggccggcttcgagcatcacttcctgtccattaacttggacggtcgcgtgatttccgccgaaaccaaaggcaacccggattgccatctggttctgcgcggttccagccacggcccgaactacgatgccgaatccgtgcgtcaagctctggaagacctcaaggtttccaaagcgtccggcccgagccagcatggcctcgtcatcgatgccgcccacggcaactgcggcaaagacgaaaaccgcgaagccgaagtcatcgaagagatcgctgagcgtctggcgcacggcgaacaaggcatcaccggcgtaatgatggaaagcttcttggtcggcggtcaccaaaagccggccccgctcgaccagttggtctacggtcagtccgtcaccgactcctgcgtgccgtgggaacgcaccaacgagctgctgcacaccctagccgacgccgtcaccgctcgccgcgcggctaaatagctttgtctttgtaaaaatgctcactgagacccactcagtgagcattctttgccaataacggtggtcatgtcagtttgttcccgtgacaccttatccttgggaaagatactgacccaaggagagatgttatgcagcagcaggaggaagcagcacattcgctgcatccgttgcaagtcggtccgcagccgttgaacaccccggaagagcttcgcgccattcgtcaggcgatgggggaggggaagaacccgctcgttgccactgatgtgccgcgctgggaagatcaggtgggtgtcagtcgcatcatcaaccgccgcgtattggagctggagccgctgcccacgcccgcgcaagtgctcgctgaactcccgctgaccgatcaggctcaggaaatcgtcgcctactcgcgtgatgagattcgcgcgtgcctgtacggccaagacgacaggttgttggtcatcgtcggcccctgttcggttcatgacccgaaggccgcgctggactacgcgcaccgattggccaagctgaaggacgagctcggtgagcagctgctcatcgtcatgcgcgtgtacttcgagaagccgcgcaccaccatcggctggaagggcctgatcaacgacccggatattgatggcagccacaatattcgcaaaggcctgttgcttgcccgcaaaaccttgcttggtgtgctgaaggaaggattggcggccgccacggaatttctggagcccaccagcccgcagttcatctcggacgcggtgagttggggcgccatcggtgcgcgcaacacggaaagccagatccaccgccaattggccagcgggctttccatgccggtcggcttcaagaacgccactgacggttcggtgaaggcggcggtcaacggttgcttcgccgctgctcagcagcacacgttcttcggcattgaccatctggggcgtgcctgcgcagtcgagacccttggcaacccggactgccatgtggtgttgcgcggctcgattcacggcccgaactacgatgccgagtccgtggccaaagccatggaagacgtacgcgccgaaatgcccgccgaatccgcagcctcgcacggtctgattgttgattgctcgcacggtaactccggcaaggacgagcatcgtcaggccgaagtcgtgcgcaatattgccagcagaattgcagctggcgaacagggtattaccggcatcatgatggaaagctttattgaagggggcaatcagaaggccgcgccgcttgatcagctggtctatggcaagtcgattaccgacaagtgcatcagctgggaagaaaccgaggccttgctgcgcgagcttgcggaagccgtggccacgcggcgttggcactgagttgcgtcatcggctctctcgcaggagcaatgcaacgaaacgtctctacccctcagcctgccattcggcggccacctcccctgacatgggagtcgaaagcgttgtgaaaggaacttacatatgggtatgaaaactgtagctattattggcgcattggatgaggaagtggcactgatcgccaaatcgctcacgcatgtgacgcacaccgccaagggcagccttgacatcgtgtccggcacggtcgactccttcggttctgacgtcatcaaggttgccgcaacggtaggcggcatgggactggtcaatgcggccgccaccacgcagctgctgattgacgagttcgccccggacgtcgtgattttcagcggcatcgccggcaacctcaacacccacctgcacatcaacgacgtggtgctcggcggcaccctgcgctacctcgacactgacatgcggctcgtaggccagtggaagcccggcactgcggacgctccggtggaggaattccactctgatgaccgtctgctggaagttgccgacgaggcgcttgccaatgcgggcattacccacatcaccggcatcatcgcctctggcaactacttcgtggacacgccccaaaaggtcgaggaggtcatccgactcaccggggctgacgccgtggagatggaaggcgccgccgtggcacaggtcgccgcccgcaatgacgtgccggcactggtgattcgtgccctttccgacaacgccgacaccgattacgaggtattcaaggagttcgacatctccgagtacgccgataccgccgcccgtctggctgtcgacatcgtcaagcgcctgtagtcggcgggctggcccatctcaccatccacgttttgggtatgatgaccacaatatgagcgttttcaaactattgcttataacctgagccatactcggtgttcggcacagcgatgtgcggggttcatcgctggggccacaagccgtaccagttcttctcccgcatgccggtcgctgtgctcaattcgttaagcgacgacaacaccgtcgcgaagcattgaatacacaatgcgcacgctgcactggggtttatctgcagcatgaggagagaaaaaatgactgcaagcgcaaccgcggctgtgaccaaaccggtgaagaaggattcggttcctgagatcatcgccgcttccatggtcggtacggccatcgaattctacgataactactgctattccattgccgctgctagctacttcggcatgatcttcttcacggacgtcgccaagtccaaccagaccctcgccacgctgatggccttcgtgaccttcgccgtttcgttcctcgcccgtccgttcggctccatgctgttcggccacttcggtgacaagctcggccgtaagaagacgctggttatcgccctgatgaccatgggtatcgccaccttcctggtcggctgcctgcccggttatgagcagattggcgcatggtccgtcgtgattctgtgcatctgccgtgcctgccagggcgtgggcctcgccggcgaatggtccggtgccgcgctggtcgccactgaaaacgctccggccgacaagcgcgccctgtacggttccttcccgaaccttggcgccccgattggcttcttctgcgcttacggcctgaacctgctactcgaatccaacctgagcaaggaacagatgattgccttcggctggcgtatcccgttcctgtgctccgccgtgctggtgatcattggcctgtacgtgcgtgcccgcatgtctgagaccccagtgttccagaaggccactgaagagaagcgcacctccaagcacccgctgcgcgacctgctgccgtactggaaggaagtcgtgctcggcaccgtagccatgggtatcacctataccctgttctacgtactcggcacttggtcgctggcctacggcgtcaagggcttgggcttccagcagggcgagtacctgctcatgcagatgtgctccgtggtgttcttcgccatcttcatcgtggtctcctgcgtgtacgccgacaaggtgggccgcaagaaggtcatgattgccgtgaccgccgccgccttggtgttcagcttcttcgtgccgatgctgctcgtgcactccgccgcccatatcatgatcttcctgtgcgtcggcttcatgatcatgggtggtttgttcggcccctgcggcgcctacctgcctgagctgttcccggtgcacgtgcgttactccggcgccggcctgagctacaacctcgccgccatcttcggtggcgcattcgctccgaccatcgcccaggccctggtcgcctccaagttcggcgttgccggtgtgggctggtacatggccatcatggccgccctcgctctgctcgctctgttcctgattaaggaaagcaaggacaaggactacgagctgtaaatagagctccccatattatgctcccgctggcgggagctgtccacgaaagcggactgagggtggccaatgggatttcggttctttgaccaccctcagtctcactgcgttcgacagctcccgccagcgggagcattttgttatgtcgtcccaccaaaaatgaacaatagacgaacttacgtagtttgggcatctcactacgccttgcacgttttactctggaaatcatggatatctggcagatcgtcgtgattgtggtgctcgccgcgctgatactggcgtgggttgccgtcatcgcctacaacaaaggccgcgtttcaggtcggctcgccgccgaacaggacctgtccggcgacgaggatacgcgttctctattcggtgatgatgcgcccgtgcgccccaccgagcgtcgcctgattgaagtcctgcccgaagccctgattgttaccgaccgcaacggcttggtccaatattcaagccccggctcagtgccattcggcctggtctccggcgaccgactcaactcgcgcgaagtcgaggacatcctcactcaggccgccgccgacggtggcgtgcgtgagcgtgaggttcagctgccggtcaatcgcaattcctatccgtcctctaatggccgaggactggaggccggccagtcacgcccgtccaacatgctgtatttgcgtgtgcgcattggcgatatcggcgatgacctgtacgccatcttcatcaacgacatgtccgagcagcgccgtttcgaggccgttcgccgtgactttgtgaccaacgtttcgcacgaactcaagactccggccggtgccatctcgctactggccgaaaccgtgaccgacgccgccgatgatccggacgccgtacggtatttttccggccgtatctccaaggaatccgcgcgcctgaccgaactggtacatcatcttatcgacttgcagaaagcccaaagcccgcaaagtgtgattgatgcgcggcgcatttccgcgctggatgtggcacgcgctgccatcgccgccaatcagacccaagccgactcccgccatgtggatattcgactgagtgtcaacggacagtcagtgcccacgaaggtcgaggagctggccgatggcgaaggttccttggaggaatcaggcagcccggccacgagcggtccgatgatcaaggccgacaaagaggccatgcaaaccgccgtcaagaacctcgtagagaacgccatccattactcgcccgaacacaccactgtggcggtcggcgtgggggagcgcgatggcaaagtcaccattcgcgtggtcgatcagggcatcggcatccccgccaaatcactggaccgcattttcgagcggttctaccgggtcgacccggcccgttcgcgcgagaccggcggttcgggactcggcttggccatcaccaagcactgcgtgcaggagaacggcggtcggatttcggtctggtcgcgtacgggggaggggtcgacgttcaccatcgagctgccggccgccccggatgaggatgacgacgaggcccggccggacgagtcgacacaagcgtaggaccttggttggtgcccgatatggtgccattccattgccgcacaatcacacagtgggcgaggtgcgcacaccgtgcgtagcacaattacgcaattacgtactttcaggaaacagcaggctaacggagaacaaatggttacgatagtatcggaaaactttgcgcctatgcgcacgggaacatacccaagaaaggctactatggcacgcattcttatcgtcgaagacgaggaatcctatcgcgagccgctggtataccagctcacacgcgaggggtacgacgtgtccgccgccgccactggcgaggaaggtctggaactgttcaccaagggcggcatcgatttggtgctgcttgatttgatgctgccgggcattgacggcactgcactgtgccgtcgcattcgtgagcagagccgtgtgccgattattatgctcaccgccaagagcgccgaaatcgataaggtcgttggccttgagattggtgcggacgattatgtgaccaagccgtactctttccgtgagctgctggcccgcatccgtgccgtgatgcgtcgcaatcaggccacggcccaggcttccggcactgtggatgacgatattccgctggtgtgcggcgatatcgccatgcaggtaggccagcatcaggtcaccgtacgcggcgaaaccgtgttcttcccgctcaaggaattcgaactgctcgaatacctgatgcagaacaagggccgtgtgatgacgcgtcaccagctgatcgaccgcatctggggttcggattatgtgggcgacaccaagacgctcgacgtgcatgtcaagcgcgtgcgctccaagatcgaggaagatccggcgcaccccaagtatctgactaccgtgcgcggtctcggatacaagatcgatactcccgcggagtaaatggaaggcggccttcgggccgccttttttgttgtggattgtgggctcgccgcaggcgagtccactccaaaaactacgtagcctcaacgtagcccacaaacatccaagtgttcatcttctgtttactgatttcggttttgggcccttgaaaccaccaatacgcttgtagttgtcatgaattgaccgggcagcgctgagccgcccgcgaatagttgatagagggattaagtaataatcatgcagaagaacatcctcattcgctccattgccgctctgtccggcattgtgatgctcgcttccgtggccgcctgcggcgataacaccgccaccacgaccgacaacagctcctcctccgattccacttccaagtccaccccggtctccggcaacttctcgggcgccggcgcctcctctcagcaggccgccgttgaagcctggatcgccggcttccagggcaccaaccctgaagccaagatcgcctacaacccgtccggttccggcgctggcgtgcagaccttcctgaccggtgccaccgcttgggccggctccgataaggcccttgccgatgacgaagttgagcagtccaagtccgtgtgcactgaaggcaccgccttcgatgtcccggtctacatctccccgatcgccgtggtcttcaacctcaagggcgtttccgatgccggcaagcacatcaacatggacgctgccaccatcgccaagatcttcgacggcaagatcaccaagtggaacgatccggccatcgccgatcagaacaaggacctgaagctgcccgacaccgccatcaccgtcgtgcaccgctccgataagtccggcaccacccagaacttcgtctcctacttcaaggacgtcacccctgacaactggacctacgacctctccgagaactggccgaacgaggttggccagggcgccaagggcacttccggcgtgatctccaccgtcaagcaggccgacggcaccatcggctacgctgacttctcccaggtcggcgacctgggcaccgtggccgtcaaggtcggcgacaagtacaacgagatttccgccgaggccggctccaaggtcatcgaggactccaagcaggacgacaccgttaagggcgacaaccgcatcgtcatcaagatcaaccacgccaccgaggccgagggtgcctacccgatcgtcttggtctcctacgacatcgtctgcccggcctacaaggacaccaagcaggctgagttcgccaaggcttggctgacctacgtgacctccgacgagggccagaaggccgctcaggatgccgccggcaccgctccgctgccctcctccctgaagtctaagatcaccaagtccatcgaggccatcaagaccaagtgatgacgtcggcccgcaagggtcgtgtggactggacctgacaactgaacgatagactgtagtagtaagagcagtcgccgccaactttaagccgcagtcgtaaaccatacggctgcggcttaaagcgggtcaggacccgaacggtttggcaaagtcacagacgaaaaccgcaccacttgaatacttgataaccaccctatataaggagaatccgtgagttcgcaagacaaaacggctgtgcagccagttggaggcaagaccgccgacaaggtgtttcgcggtgtggcatacgcctgcggcatcctgatcctggttgtacttgccgctgtgttcctgttcctgtttttccgcgcctggccactcatcggtggcgatcaggccgccaacagcgacaccgtgtccagctttaccggcggcaaggccagcagcttctggggctacgtgctcccgctgttgttcggtactgtgctcgtgtctttgctggcactgctgattgccttcttcgtgtccatcggcattgcgctgttcatttcgcactatgcacctaagaagctcgccaccgcgctgagctatgtggtcgatctgctggctgccatcccgtccgttatctacggtttgtggggcggcctgattctggtgccggccatctacccgttctggaactgggttgccaaccacttgggcttcattccactgttcgagggcccggccgccaacccgtcgcgcaccgtcgccaccgtggctgtggtgctcgccgttatgattttgccgattatcacctccatgtcccgcgatatcttcatgcagaccccgcgcctgcacgaagaggccgcgctggcgctcggcgccaccaagtgggagatgattcgtctggccgtgctgcctttcggcaagtccggtattgtgtccgcctccatgctggctctcggccgcgcgcttggtgagacgatggccgtgttgatgatcctgtccccgggcctcaactactccatcaagctgctgcaggcctcgcagaaccagaccatcgccgcgaatattgccgcacagtaccctgaagccaacgatctgggcgtctccacgctgattggaaccggtctgattctgttcctgatcacgttcgtggtcaacttcatcgcccgtaagcttaccgagaaagcgactgcgtgatgactgctgctgagaacactgaaaagactccgatggacggcacgcccgaaatcgacttcgatcgtttccgcccgacccgttccgccatccagcgccgtaatatcatggaccgcttcatgtgggccctgatcgcggtggcgtttgtgatcgcctgcatcccgctgatctccctgctgtggaccactatcgtcaacggcatcaagcgcctgaacctgaacttcctgagctacaacatgaccggtgtggtcggtggtagccagaccccgtccggtggttacggcggtgtgctgcacgccatcatcggtactctcgaaatcaccgctggcgctatggttatctccattccgatcggtttgatgtgcgccgtgtacctggtcgaatactcgaaccgcggcaagctcgccaccacgatctccctgctcgtcgacgtgatgagcggcatcccgtccatcgtggccggcctgttcgccttctcgatgttcacgattctgctgggccccggtaccatcaacggtttcgaaggctccgtggctctctccctgctgatgctgcccaccgtggtcaagtccagcgaggaaatgctgaagatcgtgccgaacgatttgcgtgaggcttccttggctctgggcgttaccaagcagcgcacgattaccaagatcgtgctgcgcaccgctctgccgggcatcgtctccggtgccattctggccatcgcccgcgtgattggtgagaccgcaccgttgctgatgaccgccggctacatctccagcaccaacgtgaacctgttctccggccagatgaccaccctgccggtgttcgtctaccaggagtactcgaagctcagcgcgaactgcccgcccaacgccgacgccacctgcgtgaccacgattccgatggaacgtgcgtgggctgcggctctcgtgctgatcgtcatcgtgctgctgctgaacctcattggccgaatcgtggcgaaggtcttcgccgtcaagaccgagcgctaagccagtcgctaagcctaagccttaagaacacaaggaaatataaggaaacatcatgggacaacgtattgacgtcaaccacgagaacatctattacggcgactttctggccgtggaagatgtgaacatcaacatcgagccgaacaaggtcaccgccttcatcggcccgtccggctgcggcaagtccaccgtgctgcgcaccttggaccgtatgcacgagatcatccccggcgctcacgtcgagggcgaggtgctgctcgaaggcaagaacctgtacgacaaggacgtggatccggtggccgtgcgccgcgacgtcggcatggtcttccagcgcccgaacccgttcccgaccatgtccatccgtgagaacgtgctggccggtgtgcgcctgaacaaccaccacctggccaagtccgacgccgacgatctggtcgagtgggctctgcgcggtgccaacctctgggaagaggtcaaggaccgtcttgacaaccctggcatcggcctgtccggtggccagcagcagcgtctgtgcatcgcccgcgccgtggccgtccacccgcaggtgctgctcatggatgagccctgctccgccttggacccgatttcgaccttggctgtcgaggatctgatcaacgagctcaagagcgactacaccatcgtgatcgtgacccacaacatgcagcaggccgcccgtatcgccgactacaccgccttcttcaacctgaaggcagtgggccagcccggtcacctcgagtacttcgcggacaccatcacgatgttcaacaacccgcaaaacgaagaagccgagcgctacatctccggtcgcttcggctgatcgtttcctgcgcgcggcgtaatgatttgtgcgtaggagaaacggcaaagcccgccgcaaggcgggctttcgcatattcaacgcgagtattgccgagtattatcgttctcgcaacggagcgagctggaatacttcgtcggactgggcggcgacttcccgcttcggtcgatcgacgggagaacggcgggtaaagcggtacaagacaagtccgcacgatgaatactctgtgatgaatcttctgtttacggtgcgagtgtggaagaatggtcacagcaaggtccagcaaaggagcataggtgagtactggtctgatcgtcggcattgtcgttgtcgttattatcgttgtcttgattggttggggcgtcagcgcctataacaacctggtgacgctgaagaaccgtgtgaagaacggttgggcgcaaatcgacgtgcagttgaagcagcgcgccgacctcatcccgaacctggtgaataccgtcaaggggtacgcatcccacgagtctgaagtcttcactcaggtgaccgccgcccgcgccggcgtagtggctgcggccagcaacccgagcacgaccactgctcagcgcgccgccgccgaaaaccagctgtcccgcgccctgttcaacctgcaagccacggctgaggcatatccgcagctgcaagccaaccagaacttcatggatctgcagaaccagctcaaggaactggagaacaagatcgcctacgcccgtcagttctacaacgacgtggtcctgaagctcaacaccgccatcgaaaccgtgccgacgaacatcatcgccggtctgttccactttgagcaggcgcaatacttcgaggccgatgacgcttcccgtcaggtgccacaggtccagttctgacccgcttcaggcccgtccggtaagccgccggccgggcccgtattgtcttaagagagggaagatatgcggatacgattcattcgcgccggaatcatcagcattgttgccacggtggtgttggcagttatcaccttggcgataatcgggacttccgcgttcggcgattcggccgacctcagctaccgcacgctggactatgacgtgaccgccaccgcgaacggtgatttgaaggtcacgcagcatatcgacgtcaagatgcgtgagcgtaccgacagtgacgacaacaccaagccgtggaagcagctgttccagcaatacacgctgaactccggcaccttgactgatatcagcgatatcagcgtgcgcaacgtcaccgacggcatcgactacgcacaacagagcgagcccaagctgcccagtgacgtctcttccgacaaggaatggaacagcgactacgccaaccattggtatgtcgccgatgtgagcgatggcagcgaccatccaaaggcatacacgcccggtaccgatggtctcaagcccagcgcctccgccaccgaagatgacacaaccgtggagatcggctggaatattccggtcaccaccgaggccgacagcatgaagttcgatgtaagcttcaccatgcacgatgtggccaccaaatggaaagacgtggcctccttccaatgggagccgttcggcaagaagaaccaagtgcctatcggcacggtcaccggcaccgtccatttccccaacggcatcaccggcaaaacctcatggacatggctgcacaccgagcgcacctcggaaaccaagcgcaacagcgacggcagctacacgttcacggcctacaacatccacaatggcgactacctcgatgtggtcgcggcgttcgatgccgccaaagccaagggcatcgcccgcaagggaaccggcaatcatctcaaggacctgaaacaggacgaatataagcaacagcagcgctggctcgacaagcaacgattcgctgccagagctcgtctcgtgttctggattgtcagcatcgtgctcggcatcgcgttgtgcgcgtggggtatctgggctgtgatctccagcaaccggcgtgcgcaatacagtggcagcgtcgaatactggcgcgaccagcccggcatcagtccggcttccgcagcccgtctgattcgcgtggtcgatccgtcgacgcgccaatccgatgaagaccgccagctgaccgccaccatgctgtcgctcgccgtcaagaaggccatcgccatttatccggggccgtcggacatgtatcgcggcatcgacatgagccaggccacgccggtgggcttgagccaaatgattgccgccgaccaaggcaagcagtatgcggcaggcatcaccagcaccatcgtgattctgccgctcgccattgatgaggcacccaacgcgcaacagttgggattgagcgaatcggaagatgcgctgctgaacctgctcatcgtcatttctcagcgcgtgggcagcccggtattcgacctgaaccagatgaaggcgacctgccagaactggcaagacggctatattgagctcggcaaattcaccggtgcatgcagcatggaataccagcggctgggtgccacgcgctctgtgggctggcaatggatcctacccggcgtattggccgccgtgctgggatttggttcgctgctggccaacagctttatcggatacccggtggctggtcttatcgggctgccgatattcctggtcggactgttctgctcgatggccggcgcgatgaccgtgctcactgatcaagggcaggatatcgccggccggactctgggccttaagcgttatatggaagacttctccaacttcaccgaccggggtaccgccgatttggccttgtgggattggtatatggtctacgccgccgcgtttggcatttccgatcgcgtgatgcgtgaactggccaaagcatatcctcaggtcaacgacccggcttggctggatgccaacgcctccaactcgttgttctactggaactaccgcccgtatggctggtacagccaccgtcataatggtccattcgactacgatgctgccgggcagatggacctaggcgttggcggcccagctccggcttacggaggcacgtcgtttgccggcggattctccgacctcggctcgcagctgaactccggtctggcggacatcagctcgaccatcagcgcggcagcaccatccgccgattccggtggcgatttctccagcttcggttcgggcggcggctccggtttcggcggctcgttcggtggctcaggtggcggctcgttcggcgggcggtagcgcatgcctatgtcgaaacgcattgttcgtgccctgggcttaagccttgtcggtgcgctgattcttgccgcactctgtgccggtgccttgattctcggcacagatggtgccgacctgagctaccgcacgcttgattacgatgtgaccgccaccgccgacggcgatcttaaagcacggagcatatcgatatcaagttgcgcaaacgcaaggatgacgatggcaagaccaaaccgtggagatcggctggaatattcccaccaccgtaaaaaccaacagcatcaagttcacggtgagcttcaccatgcatgacgtggccaccaagtggaaggacgtggcgaccttccaatgggagccattcggtgagaacaatcaggtgccgattggtacggtcaccggcacggtgcatttccccaaaggtgtgaccgcgagcaactcgtggacttggctgcacactgaacaaacctcggaaaccggccgaaccaaggatggcagcttcaccttcaccgtaaatgatgtgaaaagcggcgagtacctagacgtggtggccgctttcgacgcggccaaggcgggagatatggctcgtgtcgagaccgacgatcatctgcaggagttgaaggaagacgaagccgacgacgaacggttctggcgcaatctggaacgccaacgcgccacaaggcgcctgaacaactggatgaccaccatatcggccggcctgatattcgggattattggtgttgttgcagccttacgctcctccggacgttcacgttaccgtggctccatcgaatattggcgcgatcgccccgagctgagccccgcatcggcggccaaactcatcgatatcgtgacttccggcgacaaacccgacatttccgagcgccaactcgtcgcgaccttgctttctctggccgtgaagaaagtcattgctgtgttccccggttcggcggacctgtatatcggcgtggatctgaaacaagtttctccggtggagctcagtcagcgaatcgggtccgatccatacaagcgcaataatgcgcgtaccaatagcacgattgtgatgctgtggcagtccgattacggcgtatctgagggatttgatgaatcagtattcgtcgaatccgtatttgatggatctggatctggcggatctggatctgccgcatctagcgtgtccgatgcacaccagcccgatctcagtgcttctgagcgggcattgctctatctgctcaccgtgatttccgagcgcgtaggtcgtacggcatttgacatggatgacatcaaagacgcctgcaaggattggaaagacggctacaaggaactcgaaaagttcaccaatgcgtgcaagaccgaattcgcggcggcggatatcgcgccgaaaaccgagaacggatggctcattcccggggcaatcaccgtgctgatcggtggcgccagcatattcatcaacggtttggccggatatctggtggccggggccctcatcggcattcccctgatgacggtcggcatattctgcttcctgatggggaattcctacgtgctgaccgatcatggtcagcagatggccgggcaatgcttgggtctcaaacgatatatgcaaggcttctcgaacttcaagtaccgtggagtcgcggatttgacgctgtgggattggtatatggtctacgctgctgcatttggcatatccgaccgggtgatgcgggagctggccatggcctatccgcaagtatccgatccggaatggcttgatgccaatgcctccgacacggtgttctattggaattatcgtccgtacgactggtatgggttgcgtttctacaatggctcggcgttcgcggattccgtggctgacagcggattggccggagcggtgccagcgttcgggggcacgtcgttcgcggctgggttctctgacctcggcacgcaattgtcgtacggatttgcggatatcaccgcgacaatcaatgcggcctcgccatccggtggctcaggcggctttggcggtagcagcggcggttccggcggcggttcgttcggtggacggtaagcgatgtgcttctgaaagtccctatagctctgaaagtaaaaggcccggtgtcataagacatcgggcctttctctcaaaatcgaggtgaggagacctcaacagtcaggtccaacggggcgaaagtctgtggcgccgccgagaagattgcctcgaagctagcgtgacctttctgctacaacacagcataccagcctccaccgaagctcaccagtacactgggctgaccaaaccaaggtctactagcgtgccactttggcgcggtgtcgttgtgtcaaccggcataatgatgtctcaaaattcaagaggaggttctcatggtaggcaacgaccatgacaaccgtccgagacaagaccggcaataccgggaaggtctgatgaccggcctgttgatcgccctggccaatcaagttggacaggggcggtcgacggccatcatcattgccgcactggtattgctgggaatgagtctcagacgaggccactgatctatcagcggaacagccggaatccatggggttccggctcctcgttttcgctgaactgggtatgagtaagttgcgttttctattccgtgaagttgcggaaatttcatagattgattgtgcggacaggccgagagtgtgaaatccaacgggatgcttaggcttgattgtggatatcgagtttccataagtttcacgaagggaatcaccatggcattgttccgtaacctcggaccgttctccaccaccgccatcggccacggcgaaatgccgctgaccatcgaaaacaaccgcggccatgaggtcggcatcgaaaccctgcatgcctcgctggacgccggctgccgccacatcgacaccgcttgggcctactactgctccggcggcgaggagcagaccggtgaaaagctggtgcgcgaggcccttgagacctggaaggggccgaaggacgaggtgctggtggccaccaaggtgggccacttccgcaacttcaccgacggccgccccacgtgggatgtggacggtcgcccggagaacctgattcggcgcggcaaggagagcgcactggcgctcggcgtggacaccatcgacctgctgtacttccaccgcccggacccgaaggtgccgtacaacgagtccgtcgaagccatcaagcagctggtggacgagggcgtggcgcaggaggccggtatctccaacgcctccatcgagcaaatcgacattgcgcgcggcattctgggcgacaagctcgtggccgtgcagaaccagtactcgccgattcacctggagacccaggacacgctcgactactgcgccaaggtcggtctggccttcgtgtgctggagcccgctcggcggctaccgtcacccctatgatgagaccaagttcgacccgttccgcgaggtcgcggcggcccacggcgtgagctaccagcaggtcgtgctggcatgggagctcgccaagggcgaccacatgttcgtgattcccggcgcccaccaccccgagaccatcctcgactccctcaaggccgaccagctcgaactcacccccgaagagctcgccaagctcggctgattgcccattcctcatcctcccgaatttgtgccgctgacgttggcttaacgtcacaaattcgggaggattgattcgtcttgaaggaaccgccatgcgcaaaaaactcatcctcgacctcgataccggcatcgatgacgcgctcgccatcgcatatgccctaggcagtgccgacgagatcgatctgatcggtatcacggccacctacggcaatgtcgcggtgccgctggccgcgcgcaacgcgctggcggtggtgcacttgttcggccgtgacgacgttccggtctatcccggagtcgaccatcccatcgccccggcaacattgccgaaaatgcgtggcaccacaccagacgagcggacccaggcctacgcgcgctggcagaacggcggcgcggacggctggcaaacggacgcttcgtgggcaccaactcccggctcggtggcggtccaccatcccaacggcatcggcggcgcaatcatccccgactccccgcgcgctccggaagcaccaggctcggcggtcgatttcatcatcgccgccgcgcgcgaatacggcccggacctgaccatcgtacctacgggcgcgatgaccaccatggccaccgtgttccgtaatgccccggatctgaaggattccggcgtgaacgtgacgttgatgggcggtgcgttgacgctgcccggcaatgtaagcccggccgccgaagcgaacatctcccaagacccagagtcagcagactatctgttcaagtgtggcgcacgcaccaccatgatcggcctcgacgtgacccaccagaccgcgctcacccgtgagaaagcccatgaatgggcgtctctggggacgccggccggcgacttcctcgtcaccatgaccgactactacatcgacttctacctgaagaaccagccggagattcgcggatgtggactgcacgacccgctggccgtggccgccgcgctcgacccatcgctggtcacgaccttcgggttcaacttgcaagtcgatctcgagggcccgttccgaggccgtaccatcggcgatcgttcacggctccaggaccccgacaaacacacccaagtcgcattgggcgtcaacgtgccggaattcctcgaccgtttcatgacccgcgtcaccgccgccgcgcgcgggtgaacgattacgcttcggcagggaatagagttctgcgtcaagtgcgtctgcgactcgcatgatggtgttgaacgagggctgcgaattcgggcgaagcgccttatataaggattcgcggccgaggccggattttcgggccacattggtcatgcctcgtgcgcgtgcgaccacaccgaacgcatcttgcacaaatgcgggatcatcctcttcgagtgcgccattgagatatgcgatggcatcctcgtccgaattgatgtatgagaatcaccaaaactcaaccacctatttcacatacccgaaaaatcagaaaaagaatcagatggtcgctggattttccctgctcttttcgatctgacgtttgagatattcgcccagcccatctacgcaccaaagtgggatgttcgtcagccaagattgctccctatagc

SEQ ID NO: 3201 - DNA, 4820 bp, Unknown
  R53_2m  MAG No. k141_3962
gacgacgacaatccggagctcaaggtgacgtttgtgttgccgaaacaagccaaacaacacgtaacagaaatgttccggcagcgcgaaatagcaaaaaaagccaacgcacaagcggctgccgaatcccgactcgccgcacgggccctacgcaacgagggactcacgtatcgacaaatcggagctttattgggggtctcctaccaacgagcatttcaattggtcaacggcaaaacaaagcacaaaacgacagcgtccgaatcgcctcagccaacaactgaatcacgctccccacgcacgcaccatgccacaccgctatcgactccggtctcggcttagcgaacgggtccacaaagcccagactgtttccatcaccaagctcaagagcaccgagcaggatcttctcatcccagcagattgaggagatcgtccttggtgagggtggcgatggaggcgggggcttcggtgagggcgctggcaccggtgccagcttcgtcggcaagcaaggaagcatcggtgaactggcgggcgagctcgctcttggtatgctgaagctccaagatgcgttcttcgatggtgtccttggccaccacctgatacacgttgacgtcttcggtctggccgatacgatgtgctcggtcggtggcctgatcctgcgcggcagcgttccaccatggatcggcgtggatgaccacgctggcaccggtcaggttcagtccggtgttgccggccttcaatgaaatcaggaaggcgggcgtatcgtccgcattgaactggtcgacgagttcgagacgcttctttttaggcgtggatccggtgatggtgtagtagcgtagtccttgcgcgtcgaaacgttcggcaatcagatcaaggaagctggtgaactgggagaagatcagcgccttcttgccttcattcacgcaggtttccaccagttcggtgatggcggcaagcttggccgactgatccttggcatcggcatacagcagccttggatcacagcagatctggcgcaacttggtcagctcggcgaggatgcgaatcttcgacgtgttgaaatcggcttcttcgctgtgttcgagctgcattctgagccgctgctcgtgggccgcatacagtttgcgctgttcgccggcaagctgcacggtcagcgtggtctccaacttgtccggcaaatcggtcagcacttgggacttcaacctgcgcttgatgaacacgcccaccaacgactgcaattggcgagacacccgggcggcctcaggattgacctgtgcggcggcccgaccttcggccgtgctgccatctgcagcccgggcgttggagatgggcaactcgtagcgctcatggaatcgcttgtatgagcccaatagtcccggcatcaggaagtcgaagatgctccacagttcggagagtcggttctcgatcggcgtgccggtcaaggcgaaacgatggtcggcggccacggccttgaccgctttggctatcttcgtggtgtgattcttgatgtactgggcttcatccagcgccatgacattgaaacgttgctcattggcggtgtaatcatcgacatcccggcgcagcaggtcgtatgaggtgatgagcacggtgggttcatccgcccggaacgcgcggccgatggcggtgcggcgctcggctttggtaccggccaccaccacggcgttgaagctcggggcgaacttggcgaattcggcaccccagttgtacaccaaggacgccgggcacacgatcaatgatggatgcggcccgccatcttcggaatcgaaagtaatatgaccggttacggctgattcactattaccagcattaccggcatccatgccttgagcggtcggcatgccactagattcgttgtggtatcgcgacagcaacagggcgataagctgcacggatttgcccaaacccatctcgtcggccaaaatgccgccaaaacccttgtcgcacaacgtgttcagccattggaagccttcgacctgataagggcgcagaatatgcttgagactatccggcacttcatacgacttagggtcgatgatcttgagatcgtcgatgtattcggtgaacgaagcgtccttgactacatcggagccgtcatccggcagctcaccatccagtaggaatgctcgaccgcccggcaactcgatcagcccggagttgagctgctgctcgctcagatcaaggtcgctggccaatcggtccaacgtgctgagattcgcgccgctgagtttgaccagcgtgccgtccttcaaatgatggaatcgttgacgccgacgatacgaagacagcaaggcacccacttcgtccggcggtacttcatcagcgaggggtgatatctccaccaaattgcctttgatggacaatccgactttgacgcttggcggcttgggcgcgatcagccggtcaaaagccggtgtggtgaagacctcccctacttccttcagtgcgggcaatccctcgtcaaaaagacgaacaatctgcgtggtgtcatcgcgatcgatagtggccgcatcagacacgaattgtttggcggtctttcgcgcggccggcgttcggaacccattcaccgtctgatgagtagcggccgcaacgcgcttgcgctggtcaggcatggtaaagaattcacgcactacatcaatcgcaagatgctcagcgtcgaaatcacgcccaatcacgccccgagacaaggggatggaacgctcatccctagcatgcaccgtcgggccatcgggtagcaacgggacaatggcatcgccgtagtgtgccttgacctcgcattgcacaccatgctcatcacgatccagataaaactggaggctgcattccgtaggacttaattcagccagctcgcgaggaatctcactggcctccaacagtccggcaccaaccagctgaggcaatagcgtgcgtgcgaacagggcgatgtcatcgccggcaatgacctgcccctcgccatcgggttcaaacaggtctcccaatagtcctcgcaacggaatcaatcgtttcgggcaacggacgaatcggcatcccgctgcgcttttacgctgagaacccgccatcatggcggataccgcaccggccggattagtggaggcgagcaacagccatacatccttgccaccatcaatcacggtttccaccgccggcactccggcaagcaggtatccggcatccggaccatacgtattgaaatcacgccgcgcaatgcgcataagaaaatctggctcgccaccatcaaccggcaccgatgcaggctgcccggagaaccatgtgttcaacacgagctgtacgcctctgccctcacgtacggacagcaaccgggccacttccggtgctgaaagtgtcaggtgacggtcgatggcgatatgcccgtaataccggtcctgctgctcggccgcacgacgcacggccatcgcgtcgtcaaggaagcccagcagtgggcgcgaatcatcgtcgaacatatccggcgtatgggtaaaggcaagcttctgcccataatccgtatagtcgccgttcgccatggtaagcacaaattgcggaatcgatttcagtacatagctggacccattggaagtcgatccgatcttgaactccacgctccacacgccatcgatgaaactcaatatcggaacaagctgcacctgccccaagcccacagtctcactatcgccctgatacccgccgcctcgggtgccggcacgagagccgtatccgctattcgtacgtcgtccacctgcgccatttcgtctttttgcagtatcgaaccggcgcatgagcgcattgcggcgacgcgctttggcttgagcatcttgcctatcgacgtgctccatatagtcgatcagcgtccgagacggcctcacagccccggcacggtacccttcaaaacgctgcggatcatcgcagaatatgaaggcgagcgcaatcatgtgcttgcacatgccatagccacggccgtaagccgggcatgagcacttgccaccgacggcttctcccgtatcgaggtcgaattgcacgctggtacgatacctactcgatgggctggtggtgccacgtagaataccgtcaagctcggcatacccggttcgatgattttcgctgtataccggattgataaccatggtggccgctttgcgcgcaatgctacgggcacgagcgagcacggtattcgacgatgacgattccacatcgttgcgtaacgcaaggatagggacggcatgggcttcggcacgcttcgcagacccggcgaaatggccttcgtcctcatcgtcgaaccatacggaacgtccttgcctgaaacgatagggcatcaccgcatcggcggcggacaaactgtccgttccaccaaacgttacggctctactgccggcagcgcctgcgccaccaagcattccatctgcctcgccagagataccgcctataccgctgctcttgccggcaaagagacccctgtcctcattagtgccatctgtgtcatctgcgccataccgatcatcgtcgtaatcggcaccttcgtcgcctccccttttccaaggattgcgacggcgcaacgcatggccccaggaaacgccggaatcatcatcctcataaggcaggaggtcatcgtcatccgcattatcgggaacatggccaaatacaccataccctttgctcatgggcgagcctcctttccagcgaatgcatttcagtccaacacttctatcctagacgaggcgcgcggtagccttaatgtatggattcagacaagcctgcgcaacggaaatcctatgcagggaacaccaccctctaaatcttcgaggtgatgtggcgtc

SEQ ID NO: 3202 - DNA, 8421 bp, Unknown
  R53_2m  MAG No. k141_4047
agcaggatcagatcgaccacttcatccaaggctaacccccccccctaactgcgctcgctataccccctatctgctcacatcgtgaccgatataacccccctcaacatggatgcgctcattattggggcaataagccataaagctgtacgtccatattgagggggctttatcatcatgggcaagcatacgcagaattgcacgttgataggcaaaggagtctacggcaccataggagtggaccaacgttcccgtcttgccgatggcgcgcattttcacaccatgattgtgaccagcaccctcgaggcctcagttatagaaggggacaaactggtcatcaagagtggcattgtgcggtgtgatggtgatattcgcgtatccagcatcagcggcagcggcgacatcgaagtcggcggcgacattatttgcgatgaaataacctttaccggcaaactgcgatgcaacagcgatatcgtttgttccggaaatctgtccgtcaatggctccctaggcacccgtcatattagcggtcagacagtccgcttgaacggcgtgttgaagggtcatgacgtcaacagcagggctctggaagttcatccactgcgcagtacgatgttttctcgttttgatatggatgggtatgaggatggcagcatggttcgccatatcacagccgtcacggttgaagccaaccatctgcaatgccggactttgacggcggactccgccatgctacgcaacggcagtgcggtggaaagcgccacgtgtgccaccgcaataggcatcgaccgtacctccagcgtgctgctggtgaacggagactgccgacgcattcatctcaagacagcgtaaagcaggtattcctcattaccgtgggtgccgatgatgggactatcggcagtggccaccacgtcaagtccgtgctgttcagcacaggcgaccacgtcgtgcaatgcccgctcccgcaatgccggatcttccacgatgccgtttttgccgagtcctgcccgcccgacctcgaactgcggtttgaccagtaacacaatctgcgcaccgggagccgcgatgcgcgcgattaccggaatcacataggtcagggaaataaaggagacgtcggagacgatcatcgccggccggtaaggcaggtcgtcggcctctacttcgcgaatgttgacgccgctcatttcgatgacgtgctcgtcattggcgatgcgcgggtcgagctggccgtggccgacgtcgagcgccacgactttggccgctcccccgcgcaacagtacatcggtgaagccaccggtggaggcaccgatatccagacattccaagctttccggcccggtaaggccattgccggcaaaggtctcgaacgcgcccaagagtttgtaagcgcctcgggagacgtagtcgtcgcccttatccacggcgagttcgctgtgcccggctttgaccatgaacgatggcttggtgatggtctcgccgtccacgcgcacatgcccggctttgatgagtcgctgcgctttggcccgcgattcgaccagtcccgaagccacgagcatcatgtcgaggcgatcaagtggggtcgcgggatcgatatgttgctcggtcatataccttcctttcgacccaccatccaccaacggggtggctcggcatggacccaccatccagcacttcacgtcatcttccgctggcgggagaatgaatctcctctgctagctgcggctgttatcaagctcgtgttgtaacgattccagcacgttgcgataggtctcaagcttgcggtcgttgtcttgttcatcaatatccgcaagttcggggtatcgctcggtgaccggcgcgtgttcgctatccgtaggcataggactatgcctcgatggcgaacaccggtaccgtggcctcgctgagctgtgcgccttggtcggcggcttcccatgcggcgcatacggcggcacgcaggccgtccatactggtggggtcgctgacgcgtacctggccgttttcaaaccaagcgctagccttgcggcattcccaagtaccgctctcgtcgcggaccggctccggttgggcttcgccgagttcacgcagatcaagggcgatgaatgtgggcctcaggtgtgccggagccagcatcagttcggtcgggttggtgacaccggtcagcaccgccagcgaatcatagtcaccgcggttacctgcctcgatatcagtgtcgagtcggtcgccaatggcgatggacgcctccttgggcaccagatcgtggccttcggcggcgttcagttcgcgggcctcatcgtacatgtacgcttccggcttgccagcggaggcgaccggttcgacgccagtggccgtgatcacggcgcgaatcatcgatccgcaaccgggggcgatgcccagttcacgaggaatcgtcaggtcgcggttggtcacgaaatacgtggctccggcctcgaccgcgaacgcggcatcggccatcatctgccaagtcatatccggataccagccctgaataacggcctgcgggcggtcctgaggaccgtccacgatggtcaggccgttgcgggtgacctcatcgcgcaaatgctcggcgcccaatacctgtacgcgcgcgccggcgggcaacgccttggccaccacacgggcggccaccaccgaagaggtgatgacctgccacggctccacgtccaagccgaagcccttgagctggtcggccaccacgtgctggaagcgcgaggagttgttcgtggtgtattcgatggtcatgccggcggcttcggccgcacgaatggaatcggctgcgtattcgaccggattcttgccgcgatacaccacgccgtcgaggtccagcagcgcaagctgataggcctcggcgagcgggcgatcggtgcctttgaggaaacgggtcattacgccgctcactcctcggtttcggtctcggtctcgtcggactcagccggttcaacggcatcgtcagcggactcggaagactcctcggcttcagattcctcagattcttccgatgcatcctcggactcagcattttcgacatcggcctcatcagactcggcatcgccgtcttcagcctcgtcgtcctcatcgccgtattcctgctccagatccggggcgtactgcgcctcgtccggatcgatgccgagcttctcgagcacgtcggagtcgtcggtgatgtcttcgagatcgtggtcaatcaccacgtcgtcgctgttttcgtcaatctcctcgtcggcatactggtcctcaagacggtccagcaggtcgttgagctgctcggcttccttgctgcggccggcctcttcaaggaagtactgctcggcctgcacggcacgcatacggtactcacccggaagaccctgagagcggccgacggtatgaaccacttcaatggccttgtcccacatctccaaatcgccaagggcaccggcatacaccaggaacatctcgaccttgggagcgccatgcagctgcttgccctcatcggacagcgccagttccacggccttcttcggttcaccgacaccacgctcgcagtcagcgatgaacggcaggtagtcgaggaagccgttcatacggtaggcggtacggaactcacgcagggacagcttgtagtcgccctgacggtaggccacgaacgcgagcgtctcgcgggcaaagtcgatgcgggaggcctgacgggccacccacttggcgtgctccaaggcaagttcgggatcgctctcctccagcgcgaaagcggcgaggatgtgcagaccgatgttctccgcatgctccttggacaggccgcgcagacgttcgcgctcatccttggacagcatcgaccattccatgcccttgggcatcttgggctcgtcgggacgacggtcggtgtacgggttctgcgaggggaagctcatcgtgccgtcggagttacggcgcggacgcctcatgtattcagagcgcttctcctcacggtactggcgcttctcttcctgcgaaaactcgcggaattcgccgtcacgacggttgttgtcgcggcggtcgtccctgcggaagttgcggcgatcgccatcacggcgatcgtcgtcgcggcggaagttgcgacgttcaccatcacgatggaaatcacggcgatcgttatcccttcggtcatcgcggcggaagtcacgacgatcattgtcacgacggaagtcacgacgctcaccatcgcggtggaagtcacggcgatcatcgcgacggaaatcacgacgatcgttgtcacggtgctggtagcgcgggttctcgccgttctcgccttcgtgggaacggtagccgccttcgcggcgcggcttgaaaccttcaccgtcacggcgcggaccactgccgcggtaaccacccttgtggaagccaccggacttgccgtacgacttgcggtagccgccgtggccctcgccatcaccatcacggcgcggcgcgtagccgtcgccatcctcacggcggcgcggcttgaagccctcgccatcgcggtcgcggcgcggacggaagccgtcgccatcgcggcgcggaccgttgccgcgatagccgcccttgccaccgaaaccagagcggccgcccttgtggaagtcgccacccttgccgtacgacttgcggtagccgccgtggccctcgccatcaccatcacggcgcggcgcgtagccttcgccatcctcacgacggcgcggcttgaaaccttcaccgtcatgacgcggcttgaaaccgcccttgccgcgcggcttgaaacccttgccgccgcggttgcccggtcggcgatcgccataccccttatggccgccgccgtaggacttgccggaacgctcgttaccttctgccattacttgttttccttaattcgttgttgattaacggttttccacggcgccgagcgccttcttgccacgacggatgagcgcgaagcggcctgccaggaagtcggcttcggccagcacctgctcctcatcctcgatacggttgttgttgagatacacgccaccggacttgatggcgcggcgtgcctcggaagcggacttgaacagtccggcagcctgggcggcgtcgattacgcgatcgcccggcttggagacggggaagacgtgctcgccgttctcgtcgaccaccttgaagccgtcgagcacggattccagcgtttcctcgtcgatgtcttcgaggttgccaccgcgtccgaacagcgcaccagaagcgtcgatggcggcctgggtagcggcctcgccatgcacgaagctggtgacctcccaggcgagggtcttctgggcctcgcgcttgccggggttggtcttggattccttgaccagtcgttcgatttcggccttgggcaggaaggtgaacgccttcagcaggctttccatctccacgtccgggcggttgatccagaactggtagaacttgtacgggctgagcatcgtggcgtcgagccagacggcgttgccctcggacttgccgaacttcttgccggaagcatcagtgatgatcgggctggtgaacacgttgacgtccacaccgcgcaccttgtggatcaggtccaggccggaggtgaggttgccccactggtcggagccgccgagttccagcgtgcagtggtattcgtcaaacaggtggaggaagtcgttgccctgcagcacctggtagctgaactcggtgaaggagatgccttcctcagagttcaggcgacgggcgaccgtgtccttggcgagcatggtgcccagacggaagttcttgccgacgtcacgcaggaagtcgatgacggtcatcgaggcggtccaatcgtaattggacacgaaacgtacggcgttcgcgccttcggtgtccagaatgccgccgatctggttcttcagacgatcggcccagccggccaccacgtccttcgggttgagcgtgcgttcgccggactggcgcgggtcgccgatgagtccggtggcgccgccgaccagagcaatcggatgatggcccgcaagctgcaggtgacgcatgttgatgagctgcacgaggttgccgatatgcaacgatgcagcggtggggtcgaagccgcaataataggtgatgggctcgccgttcagtgcttctgcgagtcgatcccggtccgtggactgggaaatcaacccgcgccattccagttcctcaagcagggtgttgaaacccgcttccttgaagtcggtgacgtgagccatagcttgtcgcttctccctatcgaattgtgaatgagactgcccaattgggcacagtcaagtttcgcagaacatggcgacagtgccgaacaccagccgagccgcgcgattcagtaaaatgccttattctagcggcgcgggcccataagttcgcgcaaagagtcgatgatatcctgacgatccggcacctggaacttcgggaaggacttgagcatacgcttctgctgtgcgttgatgacgccattgatggcccagcgcagacgctcaaccgtatcctgcgaaagctcacgcatcctgtcggataccgcacgggagccccactgccacgtgccaccggcgcgtgccgccacatcctgcaccacctgagagacggaatcgagcacctgctcgaatccgagcatgcccgcaaccgtgaccgccaagtcgatgatggtgatcagggccagtaccgtgaccagcgtatgcagcatcggcagcggaatcatatccgtgacccgctcgacatatggctgcgaaccaagtaccacgcccacgccgccgagaccgaaaatcaacgcgcccagcaggcagacgcggccttggaggttgaagcggaaattcgagtaatcccaccagcgggcgtggaacagctgctccatgacccacgaggttgtgtattcgagtatcgtggcgcccaccatcgaaatcaggaagatgatgatcgggttatgtacgttgccgagaatggcgacgccgagtatcgcgccggtgccgtagatcgggcacagcgggccgttgaggaaccctcggttgaccaagcggtgctgttggcaggagacgagaatggactcgtacgtccagccgacgaaactgtagaacagaaaccagaggaaataatgttcgagtgtggtgatcatcgacgggcttcgatctcggcgtaaggcttcgcggcgggcaacgcgcgcttgttgaaccggtcgaacgagaaggtctcggcggtggcggagcatttgtccgccaaggtgaccagatagccttcgatatagcgcggcggcaccagggtcatcgggaacatgtggttctcgatgctgttgcgttcgatatcgttgagcttgaagtccttcagggcattgaccagggcggcgtggccatgggtgaagccatgccactggtgttcgccgttatcccagtcgtgccagtcgtacaggaagtaatcgtgcaggagggccgcgcgaatcagggatttgaggtcgacgcggtaccacaggtgcgcgcggtcggccatccacacagccaggcaggcgacacgcacggaatgttcgaacgtggtgacgttgccgtgctggtagtagcagcgttcgatctgcatgtggcgatgctcgatgacctcacggccgtgcttggcgaccaggcgttgaatctgcgttcgggtgagcagatgtcccacggtttcgaccctccgttcgggttggttcagtgcaatcccttgttgtgaattacgattacccgacgatattcaagaatccatcgagtaataccgtgaccgattgtagggcacacgtatgtccgtgcacactcatccaaaagaacgacaacgggaaccgttaatcgtggtgggtttcaagatagtcgagataaccctgaaaaccgccatcgaggcttgctacatcgtaaccgcgatcggcaaggatttcagctacttcctcgctccaccatccttgagcacaatagactacgacagtttgatctgtgggcacggttttgagcacatgggccagagggtcgagtggtgcattgatggcaccttcgaccgggtgggcggcgaagtcggctggttccctcaagtcgagcagcgtgaccgtattcgggtcgagcttggcaaattccgccggcgtgatgcggcggtacgatgcttcactgctctcatcgtcatcgaccgcattacgcaaagcaataggcatgttcttcccctctcgttccgatcttggctcccctcaaggaggggtgccacatagctctaaatcgcgcaggccggctgaatatagttggccggatcaatagcagtaatggtcggctgctcaccgcacaccgggcagtcgggcacatggttcggcaacggcacacggcggatgttcatggtcagggcatccacagtgagcatacgagccacgagcggctcccccacgccggcaatcagcttgacggcctcagtcgcctccagactgccgatcacaccgaccaccgcgcccagcacgccggc

SEQ ID NO: 3203 - DNA, 4887 bp, Unknown
  R53_2m  MAG No. k141_4056
cgtgaaacgccgtcgattttgtgcgtatgcatcgcgccggaccgttcggtatattgtgactcaagtcacatatgcaatgtgacaacgcatcaccggtcattttcggttactgaggcggtatcccgctggtgcaactgaggtgacgaggcgatggcccagaactttgccataataccccaagaagatcgaggaggaccccaagtggcagaagcaaagaagaaagtcgaagctgccaatccgaccccagaagagaagcaggccgcagctgaggccgaagttgacgcgctggttgcccgcgccaagaaggctctcgacgaattcgagaacctcgaccagaagcaagttgatcgtatcgtcgccaaggcctccatcgccgctctgaacaagcacctcgttctcgccaagatggccgtcgacgagaccggccgtggtctcgtggaagacaaggccaccaagaacatcttcgcctgtgagcacgtcaccaactacctggccggccagaagaccgtcggcatcatccgcgaagacgacgtgatgggcatcgatgaggtcgccgagcccgtcggcgtggtcgccggtgtcaccccggttaccaacccgacctccaccgccatcttcaagtccctcatcgccctgaagacacgctgcccgatcgtcttcggcttccaccccggcgcgcagaagtgctccgtcgaggccgccaagatcgtgcgcgacgccgccatcgaggccggtgctcccgagaactgtatccagtggatcgagcacccgtccatccaggccaccggcgcgctgatgcagcacccgggcgtggccacgatcctcgccaccggtggtccgggcatggtcaaggccgcttactcctccggcaagcccgccctcggcgtgggtgccggcaacgccccggcctatgttgattccgatgtggacatcgtccgtgccgccaacgatctggtgctctccaagcacttcgattacggcatgatctgcgccaccgagcaggccatcatcgcccacaaggacgtctacgaccagctcatcaaggagctcaaggtccgtaaggcctacttcgtcaacgccgaagagaaggccaagctggagcagtacatgttcggctgcaccgccggttccggcgtcaagcccgtgctgaactccgtggtgccgggcaagtccccgcagttcatcgccaaggctgctggcttcgagattccggccgacgccaccattctggccgccgagtgcaaggaagtctccgacgacgagccgctgacccacgagaagctcgctccggtgcaggccgtgctcaaggccgacaacaaggagcaggccttcgagatgtgcgagaagatgctcaagctgggtgccggccacaccgccgccatccacaccaacaaccaggagctcgtgcgtgagtacggcgtccgtatgcacgcctgccgcatcatctggaaccagccttcctcccttggcggcatcggcgacatctacaatgccatcgccccgtcgctgaccctgggctgcggctcctacggcggcaactcggtgtccggcaacgtgcaggccgtgaatctcgtcaacatcaagcgcattgctcggaggaacaacaacatgcagtggttcaagatcccggccaagacctacttcgagccgaacgccatcaagtacctgcgcgacatgtacggcatcgagaaggccgtcatcgtgtgcgataaggtcatggagcagctcggcattgtcgacaaggtcatcgaccagctgcgcgcccgctccaaccgtgtgaccttccgcatcatcgactacgtcgagccggagccctccgtcgagaccgtcgaaaagggcgcggagatgatgcgcgaggagttcgagccggacacgatcatcgcggttggcggcggctccccgatggatgcctccaagatcatgtggctgctctacgagcacccggaaatcgccttctccgacgtgcgcgagaagttcttcgatatccgtaagcgcgccttcaagatcccgccgctgggcaagaaggccaagctcgtgtgcatcccgacctcctccggcaccggttccgaggtcaccccgttcgccgtgatcaccgatcacaagaccggctacaagtacccgatcaccgactacgcgctgaccccgtccgtggccatcgtggacccggtgctggctcgcacccagccgcgcaagctggcctccgacgccggcttcgacgccctgacccactcgatggaagcatacgtgtccgtgtacgcgaacgacttcaccgacggcatggccctgcacgcggccaagctcatctgggacaacctggctgagtccgtcaacggcgagcccggcctggccaagaccgacgctcaggagaagatgcacaacgccgccaccatggccggcatggcattcggctccgcgttcctcggcatgtgccacggcatggcccacaccatcggtgccctgtgccacatcgcccacggccgtaccaactccatcctgctgccgtacgtgattcgctacaacggccagattcctgaggagcccacctcttggccgaagtacaacaagtacatcgccccggagcgctaccaggacatcgcccgcaacctcggcatcgacaccggcaagaccccggccgaagccgtggagaacctggcgaaggctgtcgaggactaccgcgataacaagctcggtatgaacaagagcttccaggattgcggcgtggacgaggattacttctggtccgtgctcgatcagatcggcatgcgcgcctacgaggaccagtgcaccccggccaacccgcgcatcccgctgatcaacgacatgaaggacatcgccgtcggtgcttactacggcgtctcccaggcggaaggccacaagctacgcatcgagcgcgagggtgaggccgccactgaggaagcctccgagcgctgattgcaggcggttggcggctgctggcaccagcagtagccaccaaccgcggtgttgcagcttagtggctgcatagcggacacaaggagcccgaccccattacaggggccgggctcctttgcatatgtggcgctccctcagccggcaggtgcctccatggggtggtaacctactcatggggcggtaacttgcccatggggcggtgaaaaccccatggggcggtgtacgaaaacggctctattctgcggaaggtaaaattttaccgtccgccccatgggctaattaccgccccatgagggaattaccgccccatggaatcgctgagcgtcgctaaatcactgcaataatgcagccaaaagcaataaagctggcaaacgcctcggtaatgccggtcaccacgggcttcaaggttgtgcgccgtgtaaccaccggcaacgcaacggcgcgggccaacagcagcacagtcatcgcaatcagatacgggctgcgtccagccggcacggcggctagcagcaatagcgccacatgccatacccacgaagccgccacgtacgaacgcttcccgcgttcccggatcatggttttgaccaccagaaccgacccatactgcgtcagtgcaaacagcacggtggcaatcagcccgttcacgggcaatgaacccgcaggccaccaggcgtgaaggtcgaatatctggctcaaatctggcatattccgaatcgcggcgcgtgcggcggtgacatcagcggctgcgcacgaggcatgtgctgcgttgatgggaataacacatgccgtctcaacagcgttgccaaacgacgcgatcaccgtggccatggccgatgcggcaatcaccgacacggcattgccccacagcgagcgctccttcctcagccacgaggacagcatcgacagcgcaaccagtactatatataaaggagcccaacgcagtatgccggtatgcgtaatcaggaatggcaagccgatgacgatgagcgctacggcataagtgagcatcggcggcagataacggcgtgaaaagtgtgctttgaaccagtgcgcggcgctgaactgcacgcaatagcacacggcccacgtcgccaacagccaaagcgtatcaagattaggcccgccgataaagaagccagccacagcgggcagcataaccattacccatgcgccaggttggttgtcgaaccaatcgcgtttaagagtcttgcggcgggaagccatatctgtcatgatatcgcagcgaatggttctcaataagaaagatgtgagacctgcattgcgacaatcgaacataggaagtgcgagaagccagtgcttccgccattatgcaacatgtgcgattgttcggaaatgttcatttggctcacattgtgtttatgtgagactaatctcgttgagtatcgccctcggcgctggaaatggcctcggctatcggatcttggctgaagtcgtggttgcgataatcagggtcgtccaccggcagatgctgcaccaaggtatcgaacacctgactgtagattttgccgcgctcgagcaccgcatcgagcacatggccgccgaacgtcttgtcgtcggacaggaagtgctcgtggaatccggccacagccgcgccgtgaaacatcacgggggagaagtacccgagcatggtgcccttgacgtcgtggcgcaggaacacggcctgccggtcggccacctctaccagcgtggggtagggggcctgctgcttgatgaccgcgcgtgtcttgatgaagctgaacgtgccgcgcacaattaccgaaaagaacgtgttcgcgcggccgttcgccttgacgatcttttcgttgagctcttctaggccgatatcatgacgctcgcactggtactggaaggccgcgcggtggctattagcgaatggcatggtgaagtcgtccggcacgcgttcggccacaccggattggcctatcttgtatgcca

SEQ ID NO: 3204 - DNA, 8668 bp, Unknown
  R53_2m  MAG No. k141_4082
ctttgaggtagcggccgtcgacgaggatgtcgataagatgcagcaattcaagcttgtctggtgtttctccgaggcgcatgagctcttcccatgtgtagccggtccacgaccagatatctttggtatggccgaattcctggcggatacgttgtgcgagcggcaccagcacgggagtgttgaggaatggctcgccgccaaggaacgtaatgccttgcacccatggcgctttcaggtcttcgatgatcttgtcttcaagtttttgcgtgtattcgtggcctgcttggaagtcccagatggaggcgttgaagcagtcgacgcagtggaaggggcacccggagacgtaaagggagttgcgcacgccttctccgtcggtgacgatgaaggttttgtagtcggcgatcatccgcttggacatgcgccggccatcccattgaccggctttcggatcgttggcaagaccgttggagggtacggaggggccacgcccggtctcgctggccgcaaagtcatggcgcttgggttcgggcttggtcgtatgcaactccggcatgattccctccttgcggaaagcattagctcccctctttgagggggagctgtcgtcgtaggcgactgaggggagcttcggaatagctcttcggactcccctcagtcagctttgctgacagctcccctcagagaggggagcctactcacgaataaccctacttggcctcttcgaaccactcgcgggtggtgccgtcatccagcgtcacacgaccggtttcgccgctcatgtgcttgactcggtgggcgatctcctcgtgacggccgtgcaccatcgggcgctggaccgggctgccgaggtagccgcaggtgcgcttggtgacgttgcacttgtccgggttggagttaccgcactccgggcacttgaagccttcctcggtcggctcgaagtcgccctggaagccgcacacgaagcagtggtcgatcggggtgttggtgcccaggtagccgatgccgatgttgtaggcgtaatcccacacggcttcgagcgccttcgggttgtcctgcaggcatgggtactcgcagtagttgatgaagccgccggaagcgtagtacgggaagtccttctcgtagctgagcttctccatcggggtgggctgcaaccacaccgggtagtggaaggagttggtgtagaagtcgtggtcagtcacgccttcgatacggccgaacttttcacggtccatgcggttgaagcggtcggtcagggattcagccggagtggagtacacggaatagtggtagccctccgctttgctccactgcttgcacagctcgttcatgcgcttgacgatggacagcgcgaactccttgccttccggatcccagccgtggtcgcgaatccagttcttgccgtagaagaccgcggtggtctcggcaaggccgatgtagccgagcgacacggtggcacgctcgttcttgaacagctggtccacgttgtcgttggcaccgagacgaccgaacgcaccgaagcggaacagggtcggggcgttgaccggggtggcttccttgcagcgcatgatgcggaactggagggcctgatgggcgacttccatacgctcctcgaacagcttccagaagcgagccttgtcaccgtgggattcgatggcgatacgcggcacattgacggtgaccacgccgaggttcatacggccgtcttcttcgtccttgccggtctccgggttgatccaaccctgcaggaaggagcggcaacccatcggagccttgaaggagcctgtgatcttgacgatgttctcgtagaacaccacatccgggtacatgcgcttggtggcggactcgagggcgagctgcttcagatcgtagttcgggtcacccgggtcggcgttcacgccgtgctgcacagtaaagacgagcttcgggaagatggcggtgtggtgttccttgccgaggccacgaatacggttcagcaggatcgcgcgctgcacctcgcgggagaaccagtcggtgccgagaccaaagccgacagtcacgaacggggtctggccgttggacacacggttggagttgatctggtattccatggtctgcatggcatcatagatggccttgcgggtacgaatcttggcgaggatttcacgctcctgctcaagttcgtcaacgtcggtgtggaacggggtgtccatcggcagcggttcacgggaaccgaaatgcagcttggcgggctcgttcctcttggcgctctcgacctgacgacgggcgaattcaaccggcatgccgccggggatggtctcacgagcttcctcaaggaacttctcgtaatccttcttggcatactgggcaagatgctcgtcggcacggttggcggtctggccaccatactggctggaggccacgtccttcatgatctgggtaatctgggtggccgcaatggcgatggacttcggggaagccatcggagcgttgccaagagtgaagccattggccaacatgtcccagaagttcggcaaggagcagttggactgggcagtgaacggcgagtagtcggcatcgtggaagtgaatgtcgcccttcatgtgggcgttggacaccgccggcggcagcatgttgaacgcggcggccttggacacggcaccggccagcagatcacgctgggtggagtagacgttggaatccttgttcgcgttctcgtgaatcagggtcgggtcgtggttgatgaagcgggaaacggcctcgttgacatcagtggccttggcacgctgaatgtccttgtcgagacggtagttggtgtaggcgcgagccacatcgtacaggtgggcgtcaatgagggcgtgctccacgaggttctggatgtcctcgatcttggcggggccggcgtaacgccccttgatttcgccttcgacttggttggcgaaaccacggatcatggcatcttcttcggggccgacttccttgttcaggtcaccgaaagcagacttgaccgcagagatgatgttaatggggtcgaagtcgaccacacgaccatcacgcttctcaacgagcacggtggaggccttggcggccaccttggtctcgttatcggtgacgatttcctccaacacctgtgcgcccatcgggcacccctttcctataaggcgaacactctcctgagttccgcattttggccgcactcgacgtgggccacacgaaattacattgatgtcgttttttgaacctctagaagaatacggcatctccaccactatatctagtgctcaacagtggtgtgtcgaactatttatagggttttcggctattttccgccaaaaccacaagtgtgtgattagcgtaactgttttctgctcgcgtgtcgcacagcgagctcactaacgactctcaatcgtcagcgcaacgcatatctcactcctcttcatagcacccgtttcttcgccataatgactcctttcttctgatgcaccagaccatctccatcatcggctgatacatcgcttcgtacggttctcgcattcatcatcacaccgttttcaggcgacggtaaatatttaccgtcatcaaccaacgcacttatagtggagtgcatgactactgcaatgggctacccatctaccggccgtccaccgaccgccgcttcactggcctcggctggctttgagccgggtcaaggcactttcgcgcctgatcagggcaccatcaatctgccgaatgagcctcgccctatcgatcagctgcctgcacgcgccgctgaaaccagcgcgcaaaatccgtggccggtaagtgtgctgagccagaagttctacggtgccgtggaacgatggccgtccgcgtgggtcaccggccagatcacgcagatcaatacccgtcgcgccggctcggcctacatcacgctgcgcgacgacttcgaggatatcgccatggaagtcaatggcttcggcaggttcgcggccgcggccagccagttcgttcagggcgaccgcgtggtgattcatggcaaaccgaacctgtggatgaagcgcacttcgctgtcgttgcgcggggacacgattctcaaggtcggagccggtggcagcctcaaggccatgatcgacgaattgcgcaagcagcttaagggcgagggcctgttcgatgccgatcacaaactgcctctcccggagtttccgaagactattggcctgatttgcgcacctcaggcacgtgcggaaggcgatgtgatcaccaatgtgaaccttcgttggccttccgtaaccttcaaggtggtccatgtgcatgttcagggcgagcaatgcccggccgaagtggttcaggccattgcacaactcgatgccgacccgagcgtggatgtgatcatcgtggcccgtggcggcggctcgtttgaggatctcatcggtttctcggatgagcgtgtggttcgtgcggcgtatgcctgcaccacaccattaatctcctccatcgggcatgaggatgactggacgttgctggatctggtcgccgatcttagagcctccacccccaccgatgcggccaagcgcgtggtgccggatgtgcgtgagcagtcgcagctcatcgaaggtgccatcgaccgtatgcgactgcgggtccgttcgcgcgtggagaacgagattcgacttatcgagggatatgcgaaccgcccgagcctgacccaaccgcataccatgctcgaaccgcatcagcggctgatcgacgattccctgcagcggcttgacatcggcctgcggcgtatcgtggatgatgcccagctcaccgtcgaacgcgcccatgcctcactgaccgcactcagcccccaatccacgctgaaccgaggctatgcggtggtgcagtccgccgatggccatgtgctggatgacgcttcgcgggtcagtaccggggatgacatcaccgtcaccctgaaaaagggcgtcattaccgccaccgccacatccgcaaccgcaaccgcgtaatgcaccatatgcattcacgcatatataccgtatatataaggagaacaaaatgaccgagaacaccacacccaccgacaagaacacccccgcctcgtccctgacggacaaggaacgcgagctcatcgcccagatgccatatgaggaggcgcgcgacaagctgattcaggctgtccaggcactggaaaccggcggcctcaatcttgaccagtcgatgcgtcaatgggaaatcggcgaggccttggccaagcgcgcccagggcctgctcaacgacgtacgagccaagctcgaccaggcacaagccgagcaagccgccaacgaagccaccgcaggcacgcagtccaacctcgactgagttgcctcccggcgcggcatcccgcggctcgcacctgaatccggactggactgagttccgcttcccggcatacgatagtggtgattaggccacattggtagcagttatagaagggaaatcccatgtcaacgctgattcttgtattccatccgcacctgaaggacggctcgcgagtgaacgcccgtctgcttgccgaactcgccgcacaaggcgaggacgacatcatcgtgcgcgacgaatacgccgaatacccgaacttctccgtcaacgccgacacggagcacgagctactggaggccgccgaccgcgtaatccttcagttcccgttctactggtactcctcccccgcgctactcaaggaatgggaagacgaggtcatcaccgcaggctgggcctacggtggaggccacgcactcaagggcaaggagctcaagctggtggtcaccactggttccgacgcctccaagtaccgcaaggatggcgagtacaaccacaccatggaggagctgctaagcccattcgcagtcgtggcctacaaggtaggcatgaactatgccgaaccattcctggtgcagggcaccgccaccatcagcgatgcggagctggatcaggccgccgccgattatgtttcggcgattttggactgaataagctgaggccgggtgcaagtcgcacccggccttgttgtttcgcgggctagccgcggtctctcccagtcagcctgcggctgacagctccctcgtcagagagagcttattttttggatcagagggagttgatagctacttcttcaacggcacgtagatcacgtcgtcaatgagctcgcgatagtgctcaacgatttgcgcgcgacgggtcttcaggctcggggtcagcatgccgttggcctcggtgaattcgtctggcagaatctcgaacttacgaatcgactcggcgcgggaaacgccctcgttggcggcgttcaccgcacgctctacctcggcatgaacgatggcgttcttggccagcgaggccagatcgggttccggtttggcgccttgggattccaaccagttgttggcatccgccagatccagcgtgaccagagcggccacgaacggcttcttatcgccaataaccaagcactggttgaccacgggcgaggtcatcacggaagcctcaagcagacccggcgacacgttcttgccgccggcggtgatgatgaggtccttcttacggccagtgatggaaatgaatccgtcttcggagatatcgcccaaatcaccggtgtgcagccagccatcggtgatctgctgggtggtgacctcagggttgttgtggtaccccttgcacaccagcggtcccttgatcaccagctcgccatcctcggcgatgccggcggtgatgccgcacatcggcatgccgatggtgccgatgcgattgtcttccggcaagctcacgcacaccggaccacaggtttccgtcatgccgtagccttccagcaccggcatgccgatgccgttgaagaagtgggagagctcggaatccatcggggctccaccggtgacggcaaagtcggcgttcgggccaaagatggtacgaatcttcttgtacaccacctgctcgtagaaagcgtgagcaatacgaccgggaagcggcagcttctcgcccttctgctcggccttggaccattcgcgcgcgttttcggcggcacgcatgaacatcttgcccgcaaaaccgctgccggcacgctgggaggcggcgttgtagaccttttcgtacacacgcggcacggcaagcagcagcgtggggccgaaggtctcgaagtccttgaccatggtcttcatattggagctcagggccagagaaatggtgccgccaaaactgaagaattccaggaatcgggcgaacacatggctcaggggcaggaacagcagcagacggcggttgggccatgcgccggcacgaggcatgtactgcaggccggagcgcaccaggaacgcgaagttgcggtgggtgagctccacgcctttcggggtgccggtggagccggacgtgtaaacgatggtggcgcggtcgtcgccgtgggaggcgctcttgtattcccagaattcggcatcggtgacgctttcgccataggtcttgatggcgttcaggccgcctgcttcgatgacgaacacgttgcgcagggtgggcacctcgctgcgcacggattcaatcttgtcgcgctgaccgtcatcctcggcgatggcgagcgtgaccttggaatcgttgaaaatccagctgacctggctggcggagttggtctcatataccggcacggtgagtgcgccgatggacatgatcgccatatccagagcggtccactcccaacgcgtgcgagacacgatggccacggagtcgcccttgttgacgcccagaccaatcaggcctttggccagatcgatgaccatgtcgcggaagacctgggcgctgtacggctgccaggtgccatcctcagttttatattcgatcatggcgccatcgggatcgcgcttggctcgctcatcgagcaaatcgaacaggttgatgtcgctgtcaatcggctccttgacgggattggtgaactgcttgacgatacgagtatcgtttatggccttatcagcgatgttttcagtcatactccccatgtaactccacggatgctacaaaacacgcgcgaaacaacggattgtccagaccaaatggccccggcaatccgttatttcgggcaaaccaggtaaatctgtcgcaccgtacattcagcagattactcggcggagtcattggcctttttcagctcgtcgcgaatctcctgcagcgtggcgagagtctgctcttcaacgctaggcccctgttcttcagcgtcagcctcatcctgggcagcagtgagatcacgaagcttattaatcggcaaaatcacacagaaatacaccgccacgccaacaagcaggaagctaatcagcgcgttaagaatcgcaccaaatgaaacagtcgagttgttgaacgtgatggtcagcagtccggaaagatccggtacgccgccaatcatgccgattaatggactgatgagattgtcgacgatggaattgaccacagcggtaacggcagagcccatcaccacacctaccgccatatcaatcatcgatccgcgcgacaggaatttcttaaagccattcaacggacctttatcggtcaaagcaacaactttgcgagcggttcctcccgtggccttggcaaagtcggtggcaatattcatgggattgtggttactcataacggcactccttacgaaattcagacacttcacttgtatccgactggttttcccacgactccattatgccgcttgttggaatatccc

SEQ ID NO: 3205 - DNA, 23869 bp, Unknown
  R53_2m  MAG No. k141_4123
cgacgtgccggaaggcgagctgttcgcgtggaacgacaagtccacctatgtgcgcaagcagaccttcttcgacggcatgaaggccacgccggacccggtcgccgatatccacggcgcccgtgtgctggccctcctgggcgactcggtcaccaccgaccacatctccccggcaggcgcgttcaaggcctccagcccggccggcaagtacctgaccgagcgcggcgtggagccgaagaacttcaactcttacggttctcgccgaggcaaccacgagatcatggtgcgcggcacgttcggcaacatccgtctgcgcaaccagctgctcgcctccgtgggcgaggaggtgacgcctggcggcttcacctacgacttcctcgccaagaagccgaccacgatcttcgaagcctcccgcgactacatcgacaacaaggtgccgctcgtggtgctcgccggcaaggaatacggcaccggctcctcgcgcgactgggccgccaagggcacggtgatgctcggcgtcaaggccgtgatcaccgaaagcttcgagcgcatccaccgctccaacctgatcggcatgggcgtgctgccgctgcagttcccggcaggcgaatcctatgagtccctgggcctcaacggcaccgagacctacgatatcgccggcgtcgagaagctcaacgagggcgtgacccccaagacggtccacgtcaccgccacccacgaggacggctccaagaccgagttcgacgcggtggtccgcatcgacacgcccggtgaggccgactactaccgtaatggcggcatcctccagtacgtgctgcgcaacctcatgaagtaaccaccttcttggctcccctctcttgaggggagctgtcagcgaagctgactgaggggagcaaggccggtatccgccaacggataccggccttttccacgcatgccaaaatgctatactgtatagcatcttcgaaatggaggttgccatgaccatggtccaaatgaacgttcgcattgatgcgaaactgaagaacgaggtcgaagaagtcctcaagggcaaaggcgtatcggtgagtgacgtaatccggtcgctgtggttatacatcgccgaccgcaaggaagtgccggcattggaaacgaccgccgaagagcaagcccgcgaggaggaaaagcagcgcaagctgaaactgattcgagaaggtgccggatacgtgcacaaggaactggtcaaggccggactgatctcagaagacaccgacctcatggaaggccttacctacaagcagttccgcgacaaaatgtacgacgagcaacttgatgcgtattacaacatgaagagggccgattgatgaccgacgtttccatgcagcgtattttgcttgataccaatgtactgttggactatttgctccatcgcgatgatcacgccaagatggcggaagcggttatggaacttggcgcgaagaacaacgttacgttgttgtgcgcgtcactgtcgctgaaggatatcgcatacctatcatcatcggcgattcgtagcgaattcaaaccgaatgaatcggaagtggagaatttcactcgcggctttctgtcgtcacgggtgccatggcgttgtatcgagcaggtgaaggagatgtgtgacatcgtcgctgtcgatgagtcgacatgtgatagggctttttccctgcaaaaacggcatcgggattttgaagatgatctgatcatcgttgccgcgcaacaatccggtgccaactgtgtggtcacatcggatgccgaattaatcagtcattttcccgaatattgcaaaacaccggctgaaatcgtggcggcgctggaataaatgagcgtgtggctcccctcacggaggggagccaccaatgatgtgccggctactgtagcctactgcgcctgtagacggaactgcttccagatgtcgctgagcttctgaccgttgcgcgtgcgcttccacacgtccagaccgccgccgcgacgtcctccggcggcggcacgggccgcggcggtcggagtcggatattcggagccgtcatccagacggagacgaccgttttcggtgaccgtggcgaaccagcgctcgcccttgcgcggccgctcccacaccagacgctcgcccggcaccagcagaccagcgtcaatcacctgccggatcgtgacgcgccgcgaactatgagacggccgtggagaggtcttcgacaactcatcgacattctgcttggtcagatcacgggcgtccttgtcataccggatgccccagtattccacgatgagtcggaccgactcttcctgccgcgcctccagcagggcaggtgtgcagtcagcgaaatccttcaactgattggtcagcgggaaacggcgcgaatccgcgcgcaacagcatgcggtcgcgacgtgccggatattcactcaacctgtccaactgatcctcagggccctgcaccagcgccatattgccgagtcggtacatccagaaatcatgctgatcctgcggccagtccgcaaacgatttcgaccgttcgatatccaacggcataatcggcagcgcactgaaccggcgtggtcgatccaactgcatgccggccttctgctcgttggcgcgaatcagcagcagacggaccaaatcgccgtcaccctgcatctcgccatgcaaacggaccaatgcgccttcacggtcgccgtccgagacatgcaacccgttcacgcgctggaccaaatagcccttgtcaagatcacggatggcggcgttcgcataaccgcgccgctccaacgctccagtgcgattcagcgtgcggatgccggtcacctgttccaatgcggtcagaatttccagcagccgacgctcgtcatgggcgcccaacgattccaacgtggccgtggttctggcgatacgtgaggcacgaaccacgaacggcgacaaatcggcgtcgcccagcccgcgatacgaattgaccaacgcccacatggccacgggcttccactcgtggctgcggtaatcgtccaatccctcaagccggctacgcacctcggcgggcagtacggtatcgctggggcgcgcgatgatccgccacgccatcgcgtagggtgccagcacctggttgatgaacgtgggcaccgtgcctttgtcgatgtacggttgcagcacgtcggccaggaaatcctcgatgagcttgtcggtggccggcttgtgcgtgagtacgagatgcagataggcgaagaattcctcacagtcatgcggatcgtcgccgattgggtcaatgatgtcatcccaacgggctgcgtacacgtcaagttcggcggtcgacaggctggccgtggcgcgcgccttgaacacgtcggacggggtgagcggcaggccgcgcatgttcatcacgtcgaagatgcgatgcgcaccgtcgagatcgtcggtggtcacgatgacgagcgtcacctcgttgaccagatactgcgcgaattgctggcgttcggatgccgaccaattggagatctcgtcgtacgtcttgcggatgttggcgacgatgttgcgttgcgcagcggtcgccagatcgtcgtcgttcatgtcgaacacggattcgaggttgtcctcctgcacgtgttcgcggaagaacgccgcgtcgcgctcgcgcaacgtgaggcgaggctcggtgacgatgccgcgcagcttgtcgccgggctccaccagcagcgcgtcgagttggcgcatgaggtccgggtctcgctccagatcgcgcagcacggcgatgatgatcgacagggataccagccgctgctgcccgtcgatcacgtcataacggttgtcgccctcgcgtaccagaatcagcgagccgaggaagtacggggtaccgggtgacttgcaggcgtcgtccaagtcgcttaccagttgcaggatgttctcggccttccatatgtaggcccgctggaatgaggggattgtgaaccggaaatccggggtgaacactttcccgagtggtagttccttcgcgctgattgccatgtcaatcccttcgtcgccggcctttggacggtatgccgacgtgccgactgtgctcaagcctaccagtgttcgcccggcggcgggcgcatcacgccggctcgggcaccgacccctcgtacaagtagaacgaagacgggttttctcccggcccggatgcgggcagtgactgctcgcacacctgcgtcaggccgcgatgtacatagaatccgacatcgcacgtggtatccgtgaataggaagtactgacgtatgccggttgcgtggaatgcgctcatcatcgtctcgaacatgcgccggcccagaccgtgaccgcgcgccgccggatcaagtacgaacagcaccacttcagccgaatactcatggccaatgttcgccgcctgcttacgcagttgcctatcgacatgaagagtcccgagaatctcgctcgcagctgccatgccgtcgtgggcaaacgccagttgcaatagcttgcgcaaagaatgacgccggtgcatgttcagcgggctgcgatggtcgagctcgtcgatacgccccacaatcaatgcgacgggtttatcttccagctccgcgacaaaggccgtggtcacacgtgccagacagttctcccaatcggcctcggctgccagcaagccggtccgctcatcatattcggcgtaccaagtgcggcgcaccaggtcgatcagcgccggataatcgtctttacgtaacgttcgaataatcgcttcactcatgttctccattatgactgatatggctcgataacccgacgtgttacagtcgcgccggcaaatcggcccgctccaccagcctcgccatctgtacgcggcccatattgagcttgtccgccgcggaggagagatgcgccttggccgtacgctccgagataaacatacgggaggcgatttcggcgttgggctatgtgctgcaagacgattcgccgattacggtgcatgccacgcgcatggtggaaacgcccgttacgctttgcgatgagcagaacgagccgatcgatcctattcatggaatgttcagctttgttcctctaagattggtactggaacaaacgctaaaggagcgattatgacattcggtcagcagccccagaacaacgggcaatataacccgcaatacaacacgcctgattacaacgccgcccaacagtctggatatggccagcaatacgcacagtccggttacggccagaactactatgcccagccgcagggcgcccccacctaccagtacgcgccgcaggatgcggccggtgccggcgcgggtgccgccaccatcaacacgacgatgacctacaactacgaggaggcccgccgcgtctccgtagccaaggtgtacggcgagatgaccatcggcatcctcgtcaccgccgtggtcgccgtgctcggccagatcaccggagcctactacagcttcctcatggccaccggcatggtgggcctcatcggcctgtgcgtggtgcagattgccctggccgtggtgctcggcatgcgcgtcaccaagatgaagtcggccactgcgcgcgtcatgttctatgtgtacgccgcattgatgggcttcaccttgagctcgatcttcatggtctacgacctcggctcgatcggcgtggcgctcggtgtcaccgccgcgttcttcttcgcgctgaccatgttcggcatgactaccaagttcgacatgctcaaggccggcccgatcctgatgatcggcctgatcgtgctcatcatctcgcagatcgtgctcgccttcgtgcaggtcgacggcatgaccaagatcgtctgcgccatcggcctgatcctgttcgccggcatggccatctacgacgcgcagtccacgcgcgcgctgctgaccgaatacgaggcccagggcccggaaatggtcaagaagatctccatcctgtgtgccctgaacctgtacctcgacttcgtgaacatgttcctgtacatcctgcagctgctcggcaacagggactagcctcgccagccgattggtgggcggcatgtagcctgctcgtcaaacgtcacagcccgaccacattgtggccgggctttttcatgtctgtcacattcgcacgttaggctgtctccccgtgaaaagacaagaactcgtaggcatgctgagcctgttgttgaccgcgctgatctggggttttgcgttcgtggcgcaggtccagggcatggatttgatgtcgccgatgttcttcaacgccacgcgcttcacgctgggagcactgtctttggtgccgattctgctgtggcagcgtggccgggggagcgcagataagggcgatacagccggggtcgatgtcgttgggaccgaggcccccagggccgtctccacagatgccgcatcgaacggtgcatccgacgtcgttaccatcaccggtgccaagctgaatgcgaacaagcccgattcggccgtggcgcgattgctcgccaacccggtggtcatttccgtgatctgcggcatcgtgctgttcaccgccagcaccctgcagcagtatggcattctgtacggcaaatcggccggccgcgcgggattcctgaccgccatgtacattgtgatggtgccgttgctggcctgcgtgttcctgcgccggcgcatcggcatgctggtgttcgtggccgtggtgctgtccatcgccggcttctatctgctgtgcatcaccgatggtttcggttcgatcggcctggcggatatcctgctcgtgttcacggccgtgctgttcgccgtgcatattctggtgatcgatactttggacggcaccgtggacgccatcaagctttcattcggccagttctgcaccaccgccgtgctgagctgggcgggttcgctgatcgaaggctcggtcgactgggccggcgctgctcattcctggattccgattctgtacgccggcatcggctcggtgggcatcgcgtacaccttgcaggtggtcggccagcaatgggtgccaccgacgcgagccagcctgctgatgagcctcgaatcgttcttctcggcggtaggcggtgcgttgcttctcggtgaagtgatgaccccgcgcggctacctcggctgcgccctcatcttcctcggcaccctgctggcccaagcgccggccaggctgccgaagtggctgcaacggtgaatgaatcggacgcaggccgattccatagcacctcagtccgtggtcttaggcgcttcacccacttgcggcgcgccgttgatgtcgcggtggatgttctgcatttgcacttcgatgttctgcagcgaacgggcgcagtcgagcagtgtctgtgaatgctcgctgagcttgttgtccggcaaatcggtcttgtagcgcagcgcatgctccagcgacgcccaataatccatggcgatggtacggaactgcacctccaccggcgtgtaatgcgcgcccgaggagagaaacacgggcaccgcgtagattacgtgcaatgaacgatacccgttctgtttcgggttcttgatgtaatccttgacgcgcagcacctgaatatcggactgcgacgacagatagttggacacggaatacacgtcgtcgcggtaattacagatcacgcggatgccggccacatcgaacagattgtccttaatcgaattgacactgattggcagattcttgcgctccagcttgccaatgatcgaactcaccgacttcagacggcgttccatatgatgtatcgggtcatggctgaaccgcacctggaactcgtcgtcgagaatctccagcttggtgctgatctcgtacatcgcgccttcatacacctgcatgaggtcaacgaatttaacgacctgttcgggagtgaaggtgcctcccggaagatccaacgctttgagacgggcctgcagatcggaggttttgagtcggctatgtcggtcaagtatcacgtccaccaatatactcggcggattccagacaatctggatgttcgcggggaatctttccaagaacccatatttaagatcgtgacaaccaatggcatacgtgaccggagcatgacgaaccccgccgatagaatcggtcgttatgaatgaagacatgatgaccgaggcggagcgtgcctcgattgcagccgatggaaccgatagcttgttgggggagcgcggcaagggcgtattccatatccacacgctcggctgccagatgaacgtgcacgattccgagcgcatcgccggcgtgctggaggccaatggctacgtccctgcaaccgaggaccagatcaatgacaatgacctcgatttgctggtgctcaatacctgtgcggtacgcgagaacgcagccgaacgcatgtatggcaccatcggccgattcaatcgcgtcaaactggttcggccgaacctgcagatcgccgttggcggctgcatggcacagcttgaccgcaagaagatcgcggatactgcgcaatgggtttccgcggtgttcggtaccaagaacatcgaagatctgcccaagctgttggatcagaatcgtgcgaccggcaaggcgcaggtccaggtcactgaacaattgcggcagttcccgagccagcttcccgccgcccgcgcctcccgcatcagctcgtgggtggcgatttccgtgggctgcaataacacctgcacgttctgcatcgtgcccaccacgcgaggcaaggaaaaggaccgccgccccggtgacattcttgatgagatccgccaatgcgtggccggcggtgccaaggaggttacgcttctcggccagaacgtgaactcgtttggttatggtattggcgatcgatacgctttcagcaagctgttgcgcgcctgcggaaccatcgacggtctcgaacgcttgcgcttcacttcgccgcacccggccgccttcaccgatgatgtgattgcagccatggccgaaacgccgaatatcatgcatcaactgcacttcccgctgcagtccggctccgatcggattctacgcgcgatgcgccgctcctacaggtccgccaagttcctcgatatcttgggccgcatccgcgaggccatgcccgacgcacagatttccaccgatatcatcgtcggattccccggtgaaaccgaggaggacttccagcagaccatggacgtggtgcgccaggcgcgcttctcctcggcgttcacgttcatctactcgccacgccccggcacgccggccgccgcaatggaacagattccgcgcgacgtggtgcaggaccggttcgaccgactggtggcgttgcaggagcagatcaccgaagagaacctcgccacattcgagggccgcgacgtcgaagtgatgatcaccggcaaactcggcaagaaggacaccgacacccaccgtgtcaccggccgcgagaaaaccggcgtgctggtgcacatcggcgtgcctgaaggcgaaccggtacctgaaatcggcgatttcgtcacggtcaccgtcacacacgctggccgccataatctgcttgccgaccccgatgtggccgctggacagacctattccgtgcggcactgagggggcgtatatgacgcaacgagtcgtctccatcgtcggtcccaccgcgtcaggcaagacggggttgggcatcgccatcgcccggcgtctggccgaagcgggggagcgggccgaaatcgtgaacgcggacgcctaccagatgtaccgtggcatggatatcggcaccgccaaacccaccgccgaagaacaggcggtcgtgtcgcaccatctcatcgacatcatcgaccccgaagacacgatgagcgtggcccgattccagcagcttgcgcgcgagaccatcgccgacctgcaatcacgtggcatccggccgattctcgtcggcggctccggcttgtacgccagagcggccatcgatgacatcaccttccccggcaccgatcccgacgtgcgcacacgtcttgaggaacgcgagaaaaccgagggtgccggtgctttgttcgacgagctgcgggccaaagaccccgaggccgccgcgcgcatggacccacgcaacccacgccgcaccatccgtgcgctggaagtcatcgagcttaccggtaaaccgtattcggccagcctgccgcgctaccggtacgtgattccgtccgtacagatcggactcgacctggaccgcccggatttggaccatcgcatcgacctgcgcaccaagcagatgtatgacgatgggttcatcgaagaagtcgaacggctgcgcccgcatctgggtgccaccgccgtacgcgcgctcggctatcagcagatcatcgacctgctggacggcatctgggatgtgaacgacgccttcgcggacatcgcacagaaaaccaagcgactcgcccgcaaacagatgggatggttcggccgtgacccgcgcatccactggctgcaggccctgaacccgaaactggtcgacaacgcgatggccattatcgcgcacgccgacgccggcgactacgacccgatcgacgcccgagccgacgaatacacccagcatcatctgggggatatcacggcgtaagaatcagccaaaggccgatgcaatcacccgcaatcagtgtgcaggcccctgattccagccggcgatcaagaacacgcgcgtcggattcgccgggcgtagtatcgcgtcgaacatcgtctccagtgcagacgtgtcgccccgatatgccgagtgcttggcggagcgatactcctcgcgcgccactgagccccagtcgagatcccagccggcgtcatgcgccaagcgtgaaccgaatatacgcagcaccatcgcattgccgccacggaacggatgcagataaccgagctcatcataaatagaagcaaacgcgtgaacgaacacgtcgcgatccaacgcatgcaggttgcgcttgtccgccaactccatcgcgatgttgtgcgcgccggtctcaatgagcccagccgggaagaacgcctcaggattcgcggcccgagcccggtcgttcgtcacctcgcgtgtggtgtttgaggtacgcaacttgcccgcatcctcaaacacgccttcgaacagccccttatgaatggcggtcaactcatccaagtcgccagacggattccaccgacgttccgccaacaatacggtacgtgcgaacaccgcatccgcgcgatccgtggcatgatcatccagactgccggcagccagacgatcctttccggcagggtcggcggcggcgcgcagacgcatggcggtctgctcgtccgccacgtcgatgagatgggtcacgggctccaagccacgttcgtaggcaaccgcggcgcgcatcgttgcctcgcccggcgtcatcgcttccagtgcgcagttcttgagtgcaaatgcgactgcgctcgcacgctctgcgggtgtcatgcaacccatgataaggcatattcgcgctccagcggggaatcgactcggacgaacctcgacgaaccgcggcgaatcggctgtcgggattcgtcaatcgaccatatcgtcacggtgtcgtcaccaaccatgcacccccgtactagtagaatcagacccgatatggcacgaacagcatcctccaacagcaccaaaccccgtaaatccaaagacaacgggtctacccatgatggcgaaaccaaggtccagcccgagcttgacctcgaacctgagccgttgtggaagaagatcctgctcgcgattccgcgcgcgttcggctccggcgtacgcgccgtcaccggcgtcggcgaatacgacccagcctaccgtcgtgacggtttgtgcttcctgctgctcgtgctcgccgtactgttctgcgcgtccgaatggttccgtgtcagcggtccattcggccagctgcttcacgccatcgcggccggtgtgcttggtctgatgagcgtcgtgctgccggtgttgctcgccgccgtggccttccgactcatgcgcaattccggtaaagggtccaataacccgcgtgtggtcaccggttgggtgctgctcatgtggtcgatctgttcgatcatcgacgtggcgatcgccgccgaccacaccggattcgacatcacgattctgcaatccgccggcggcctgttcggcttcttcctcggctcaccgctcgcctggggcctttccaacgtgttcgccatcatcattttcgtggtcgtcggcctgttctccttgctgatgattaccggcacccacgtcaccgatttgccggaggatgcgcgcaaaatcgcagctaaaatccaacgcaaaccgtatgtgccgatgggccaggaggccgacggaagcgccagccagttccccaacgaggtccgtgtgggagataccacactcgcctttgccgacggtgttccctcgcatgacggcaacgacgacggcaacgacaacgatcaggccggcgatgcacggcccagcctgttcgcacgactgttcggccgcaaatccaagaccgaagacgacaaaacccttgacaagtatgctgccgacgatccgttcgaccgtgccgccagccagcatggtgccaccgccgaaaccccggtggtcgatccgatgaccggcgagattaccggtgcgcgaaccattgcatcgtcttcgtacgacggtcgtccgcacctatccagccctgcgcctgctgccgatgcggatgatggcgacgcttcccgaacccgcgtcatcaccagtggccagcccgtcgccatgcccggtgggggagcggtagacgatccgtgggcacccagtgccgcccaggccggtactgtcgcgctcgcaggggcaaccggggcgatgggagcagtcggagccgccggtgccgcggccgcggcagccgcgaccggagcctacgcaggcgccgatgcggatggcagcggagtcggccagggcgtgcccaatacggacggacagccgaatgccgccgccggcaacggtacagacgacgacgccaataggccgtatcagttgcccgacctgaacctgctgaccaaaggtcagccccatgcgatgcgcaccccggccaacgatcgcgtgatccgggcactgacttccaccttcgaacagttcaacgtggacgccaaagtcgtcggcttcctgcgtggcccttcggtcacccaatatgaggtcgagcttggccccggcgtcaaggtggagaaagtcaccaacctgcagcgcaacatcgcctacgcggtggccagttcggatgtgcgcatcctttcaccgattcccggcaagtccgccatcggcatcgaaatcccgaacgaggatcgcgaaatcgtgcacttgggcgacgtattgcgctccgacaaggccgtgggcgacccgaacccgatgctctccggcatcggcaaggacgtcgaaggccacttcgtgaccgccgacctgaccaagatgccgcacctgctggtggcaggtgccaccggttccggtaagtcgagttttatcaactcgatgctcacttcgatcatcatgcgtgccacgcccgaacaggtgcgtctgatcatggtggatcccaagcgcgtggaactgtccgcctacgcaggcatcccgcacctgctgaccccgatcatcaccgatccgaagaaagccgcacaggccctcgaatgggtggtcaaggagatggatgcacgctactccgacctcgaattcttcggattccgccacgtcaaggacttcaacgaggccgtgcgcgccggcaaggtacatgcgcccgccggctcccagcgcaaggtggccccctatccgtacatcctcgtggtggtcgacgagatggccgaccttatgatggtggccaagaacgatgtggaaagctccatccagcgcatcacccagctggcacgagccgccggtgtgcatctggtgctcgccacccagcgtccgtcggtggacgtggtcaccggtctgatcaaggccaacattccatcccgactggcgttcgccacctcgtccgccaccgattcgcgagttattctcgacacggtcggtgccgagaccctgattggccagggcgatgcgttgttcctgccgatgggttccgccaagccgattcgtgtgcagggctcgtgggtgtccgaatccgagattcgcaaggccgtggagttcgtgcgcacccagcgcaagccgaagtatcgtgaggacatcgagcagatggccagggaagccgagaagaaggacggcatggagccggacgaggagatcggcgacgacatggacgtgctgctgcaggccgccgaactcgtggtcaccagccagttcggctccacttcgatgctgcagcgcaagctcagggtcggcttcgccaaggcgggccgattgatggatctgctcgaatcgcgtggcgtggtcgggccgtccgaaggctcgaaggcccgcgaagtgctcgtccagccgcaggacctgccgcaggtgctcgccttcatccggggtgagaccagttcgcttgaagccgccgccccgcaacagcccgaactcggcgagtaattcacccatcgactttcctctgatgagggaggtggccccgaaggggcggagggagagaagcgccgccacgcggccatcagcacgcaacctgattcccgaataatagcagtcaatatccagccaatacttactcaaggtagaagtgtgggggtaacgtgaacactatggatgagaacacaatggacaagcagtcatcgcccaaatcatcgctgttcgacggatggaacgcgccgccgaacctggtcacgtattcgcgcatagtgctggtggtgatcttcctggtgctcgacattctcgctggggcctggggcgccgacgacctcaccctgcgttggatcgccgcggtgctgttcatcgtcgccgcgtccaccgacaagatcgacggttggatggcccgcaaatacaatcaggtcaccgaaatgggcaagctcatggatccgatcgcggacaagctgctcacttgcggcgcaatgattgtatgctccgcgttcggcgagctcggctggtgggtgaccatcctgttcctgattcgcgaaatcggcatcaccgttatgcgcttcttcgtcatggagcgtccgggcggcaaggtcatcgccgccgcatggcccggcaagctcaagaccgtattccagtgcgtgggtctgtccatgctgctgctgccgttctggtctctgggtaacggacaagccacgccgttctggatgaccgcttactacttcctaacctacgccatcatctacgtggcattggtcctgtgcctctactcgggtgctgtatacctatataacacgttcgtcgccccgaaaaggaagtgacggatattccaatgcaggaattgtgcgacagtctcgcggccggcatcctcaagatctgcgaggcgaacaatacgaaaatcgcctgcgctgaatccctgaccggtggcctgcttgccgatgcgttcgtgcgtattcccggtgcctccaacgtgttgttgggctccgctgtcacctacgacatcaatgccaaggcctcgatcctgcacgtggacaaggccctattgggtcgagaaggcgccgtacacccagaagtcgcccggcagatggccatcggtaccgctcgcctatacagccagccggaatacggcgaccgaatcatcggcctttccaccaccggcgtggccggccccggtccggacggtgacaagccggccggactggtgtatgtgggcctgcgcatccccgcaagcctcaccgcggaccatgccgaagtgctcaaagccgtcgaactccatcttgatggcatgcgcgaagaggttcgtcgcctcgccgtattccacgttctgcaaaacttgagtctatttacagcaagttttaaggaataaaaccgcgggaccgtcgtgttgtacatagtggaaacactgaaccgaccttggaaggggcgatggcgatggaaacgatgacccgagtgaacgaacagatggatgtggccgccaagaagccgatggctgtgcagccgggtgtcgcccgtatgcgtgaactgactccggcccagcgccgtgcggtgatgttcgcccagcagcaggtgctcaaggcgcaggccgccaagaaggccaaggatcagcgtcaagccgttcgtgaacgtatgtgggatgaggattcgccgtcgtacaagccgactgccgctgccgagcccgtggtggttgaggaggagcctcgcgaggtttcgctgcgtggtgctatcggtcatgtgctgcgcgaactgcgcacacgcgatcgccgtacgttgcgtgaggtctccgagaaagcaggcgtttcgctgggctacctttccgaagtcgaacgtgggcagaaggaggccagctccgaactgctgagctccatcgccgatgcgctcggagtctccacttcgcgcatgctgcgcatggtggctgattatctcgactcggtcgagggctgatcggttggcggtgtgaagccgtgtcccgtaatctatgtctagctgtgaacccgtatcgcttgtggcgatgcgggtttttgctgtcctgcgggtggtggcacactggcgtgtatgcgtgaacgggaattctgggaattacttgaagaggtgttcggtcggacctacggtcgttcgctgtcgcgtgatcaacggatgcccaaactggcgaatatgactgtggtcgaggcgttggacgcgggggaggagccacgcgtggtctggaatgtgctctgcgaccagatggaggttccggactccaagcgttggggccgcgatcataacgcgccgcccatgcccgccgtctgacactgcgggattgcggagtcgctgaatcgtgaaattggcgatttcggcgtgttgcacgccaaattcgaacagatgttcgtgtgtgtggttatagttatccacagtgacaagaagccgcatacgtgtgcacagggtgcttgccatccgccttaagccttaccgcagtagggcttaaggaggtcaggcggccgagcttgggcaagctggaaccacaatggttggtttggattgcctcacatggcatgtccgtcatacggtggaggcatccgattcgcgcacgacttcgacaaggagaagatcatggcacttgagaccaagccggccaaggacccggcagccgaggacaagcacgagctcgatcccaagcgcaaggcggcgctggacaccgcgctggcgcaggtcgagaagagctttggcaaaggttccgcaatgcgactgggcgaccagcccgagcagaacgtcgaggtgattcccaccggttcgttggccctcgatatggcgctcggcatcggcggcctgcccaagggccgcatcgtggagatctacggccccgaatcatccggtaagaccacgctcgcattgcatgtggtggccaatgcccagaagaagggcggcgtggcggcctacatcgatgccgaacacgcgctcgacccggcctacgcccgcaagctcggcgtggacaccgactcactcatcgtctcccagccggataacggcgagcaggccctcgaaatcgccgacatgctgattcgctccggtgcacttgacgtcatcgtcatcgactcggtcgccgccctagtgccgaaggccgaaatcgaaggcgaaatgggagacagccatgttggtttgcaggcccgactcatgagccaggcgctgcgcaagatgaccggcgcgttggctcaggccggcaccaccgccatcttcatcaaccagctgcgtgaaaagatcggcgtgttcttcggcaatcccgaaaccaccaccggcggcaaggccctgaagttctatgcctccgtgcgtctcgacattcgtcgtattcaaaccctgaagaatggcgacgaagcggtgggcaaccgcacgcgcgtcaaggtggtcaagaacaagatggccccgcctttcaagtccgccgaattcgacatgctctacggtgaaggcatttcccgtgagggctcggtaatcgacatggctcagcaggttggcgtggtcaagaagtccggttcgtggttcacctatgagggtgatcagctcggtcagggacgcgagaaggttcgtcagttccttaaggacaacccggccatcaccgaggagattgagaataaggtcaaggccgagttcggtctgatcggttccgccgaccagttcgcggaagatggcgaagccgcagcagcggccgctgtcagcgaggccgccgctgccgacgtggccaaggacagcaaggccgcagcggcgcctgctgccaaaacgacccgtgccaaggccggcacagctaaggcctgaacatgattagtgccgaagcattcttgcggcgcaatcctgttgcgtcgcaagacatgcccattgccgagcagcgtgttcagtcgaaaccgccgggacgtttttctcgacgggggagagacgctgccgttgtcgaagatcccaatgatttggacgcttgccgcgaggctgcattgcgtttgctggacgcggccccgcgtgcatccggcgcgttgcgcgaacgattgctcagcaaaggctatggcgaggcgattgtggacgaggtcattgaacggctgattcgcgtgcaactgattgacgaccgcgcttatgccgaatcggccgtacgctattgtgccggtcgcatgatgggtcgtcgtggtgcggtcctggaacttgctcgcaaaggcgtggaccgcaaactggctgaacaggtgtgtggcgaagctgagcaaaatggcatctttgaagatgccgcatgggaattgggccgccaaatagcccgcaaaacccatggcctcgatcgtcaggtccgtcagcgtcggttttggtccgcaggcggccgcaaaggacacagccccgaaaccctccgccgagtcgccgccgaattgttggtgtagccaagaaaaaaatgagacctcttataccccgggttctgtcgtgccgtgcacgaacgcacggcacggatggccatccatctcgacctgacgttgccgccaggctctagcagcctacccgatgacacgggcgagcagcccttacagccatctgcttggccttgctcccgatgaggcttgccatgcgacctactgttaccagaggcccggtggtctcttacaccgccgtttcacccttacccgtcgaggacgggcggtctgttctctgttgcgctatctctcaggtcaccctgggcggacgttatccgccatcgtgctctatggagcccggaagttcctcagccgatcccaatgaagatcacggccgcggccatcaagaggtctcaagcctgcaattatacataaggtgcggaaaaggcggcatcccgccctgcggtgaggccatgacgttgcccagttatcctgttttctccatagttgggcgtagttgggcgattcgtgaacgacgcgccgaatatcggatggggcgtgtcgggcgtgttgtggcgtgtcgtatggagacgaatcaaatctgtaagagcttggtatgtgcgagaaagagcaagaaaacgttgcctatccattgcagtatttaccatgacgaacaaacgagccagcctgataaaccggtatcaaatcttcttataggagactgctgccaaaaccccagtatatacatcgtttcattgcagagaaaagcccggagataaacatatattctctgggcgagtttccggccgttcacccattgttcgtctacaatgaaacatacccggtcggtgatgatgccgttcggaacacatatagcgggttacaccgcttgagttagaggaggtcaacatggaaatcgtcgttaccggacgccacacgcaggtcaagcaaaggttccgtgatgtggtcgagaccaagatgaatcgtgtgaccgctatcgccccggatgctcagcgcgcgcagattgtgctgacccatgagggcaacccgcgtcaggccgataccgccaagcgcgtggaaatcaccgttatcgccggacgtaccgtggtgcgtgcggaggcttccagcaccgatgaattcagcgcgctggacatggcgctggataagttgacgctgcgtctgcgtcgtactcgtgaccgtcgcaaggatcaccgtcgtggttacgcgaacccggtcccggtggatctgggtgttatcgccccggagcccgagccggaggagtcggacgaagagccgaacaacagcccgcaggctgcggtcgcctccgatcttggccctggcgaatccgtggaggtccaggttggggatacgccgattgtcatccgtcgcaagctgcacatcgccgagcctatgagcatcgacgaggcgctgtacgagatggaactgatcggacacgacttcttcctgttcgtgaacaaggagaccggacgcccgtccgtcgtctaccaccgtcacggttggagctacggcgtgttcgaaatcgatactccggagaacgtcaagaaggcctgaagataaggcctgctgacacgatcagctgataccgcatggaccgcttccaatatggaggcggtccattttttcgtaagaaggtcgaaaaattcgactgctgacggtgcgaggcgctattctggtacgcggacaccaccacttatcagtcaagggagaacccagtggtcgatattgttgacaaagccctgcgaatgggtgaaggccaccagctcaagaagctggagaacgtggccaaggccgtgaacgctctggaggatgagatctccgccctctctgacgaggatctgaaggcccaaaccccgaagttcaagcaggaaatcgaaaacggcaagagcctggacgatatcatgcccgaggcgttcgccaccgtgcgcgaggtctccaagcgcacccttggccagcgtcacttcgacgtgcagctcatgggcggtgccgccctacactggggcaacatcgccgaaatgaagaccggtgaaggcaagaccttggtcgccaccctgcccacctatctgaacgccctcgaaggcaagggcgtgcacgtggtcaccgtcaacgactaccttgccagctaccagagcgagctgatgggccgtatctaccgtttcctcggcatgaacgtcggctgcatcatcaccgagcagaagccgccggagcgccgcaagcagtacaacgccgacatcacctatggcaccaacaacgagttcggcttcgactacctgcgtgacaacatggcctgggagaaggccgacctcgtgcagcgtggtcaccactacgccatcgtcgatgaggtcgattccatcctcatcgatgaggcccgtaccccgcttatcatctccggcccggccgaaggcgacgtgacccgctggtaccgtcagttcgccaagctggtgctgaagctcacccgcgacgaggactacgacgtcgacgagaagaagaaggtcgtcggcatcctggacccgggcatcaccaaggtcgaggacttcctcggcatcgacaacctgtatgagccggccaacaccgccctgatcggctacctcaacaacgccatcaaggccaaggaactgttcctgcgtgataaggactacgtcgtcacccaaggcgaggtgctcatcgtcgacgagcacaccggtcgtatcctgccgggccgccgctacaacgagggcctgcaccaggccatcgaagccaaggaaggcgtggaggtcaaggccgagaaccagaccttcgccaccatcaccttgcagaactacttccgtatgtacgacaagctcgcgggcatgaccggtacggccgaaaccgaggccgccgagttcatgaacacctacaagctgggcgtgctgccgatcaagaccaacaagccgatgatccgcaaggaccaggacgacctcatctaccgcaccaagaaggagaagctggccgccatcgtcaaggacgtggccaagcgacacgccgagggccagccggtgctgctcggcaccgcctccgtggaaagctccgaagtggtctccgccctgctcgacgtggcgaagatcccacaccaggtcctgaacgccaagcagcacgagaaggaagccgccgtggtcgccgtcgccggccgcaagggcgccgtcaccgtggccaccaacatggccggccgtggtaccgacatcatgctcggcggcaacgtcgagttccttgccgacgccaaactgaagtccgagggctactctccggaggacaccccggaggagtatgagaagcgttggccgggcaccctgaacgagatcaaggcccaggtcaaggacgagcatgaggaggtcaaggagctgggcggcctgtatgtgctcggcaccgaacgccacgagtcccgtcgaatcgacaaccagttgcgcggtcgttccggacgccagggcgacccgggtgaatcccgcttctacctgtcgctggaagatgacctgatgcgtctgttcaacacccagctggtggcccaggtcatggccaggggcatggaggaaggccagccgatcgaggccaagtccgtcaccaagggcgtgcgcaccgcgcagaaggccgtcgaatcccgtaactatgagattcgcaagaacgtgttgaagtatgacgacgtgatgaacaagcagcgcacggtcatctactccgagcgtcaggccgtgctcaagggcgaagacatccacaaggacatcctgcgtttcatttccgacaccgtcgagtcctacatcaagggtgccaacaagggatccgagaaaccgaaggactgggattgggagggcctgttcaaggcgctcaacaccgtgatccccaccaaggtcgacgaagacgaggtcaggaagatcgtcggcggcctcaagggtgcgaaggccgtcgaggccgtgcgcgacctgatcgtcgaggacgccaggcagcagtacggcgaaatggaggagaccatcggcgagaccggcttgcgcgatctcgaacgccgcgtggtgctcgccgtgctcgaccgcaagtggcgcgagcacctttacgagatggattacctcaaggacggcatcggcctgcgtggcatgggccagcgcgacccgctggtcgaataccagcgcgaaggctaccagatgtacaactccatgatcgaggccatcaaggaggagaccgtccagctgctgttccacatcgacatcaagcaggtcgccaccaccgacgaggccgttgacgaggtcgaggagaccgccgaaagcgccgacaccatcgccgtggcctccggccccgacgagaacggcgaatccgtggtcgaggctgccgagggcgaagtcgaggaagaggacgaggatacggacgccaagcaggcgatcgccgaatccgcagccgcctccggggccggcgagtccacgctgcctgttgccggaccggctccgatcagccacgccgaaggcaaggtcccggtttccaagcgtccgaagagcgaagagctcaagacgccgtgggccgacggccgcaccttccctggcactggcaagaacgccccgtgcccgtgcggttccggccgcaagtacaagatgtgccacggccagaacgagaagtgacgcatcgctagttagtaactagctcatggctccccacacggggagccattttctatgcggttcatcagcatgtattcgtgcggtgtcgtacgcgcgggacggcacgcgattttcgcggattttgacgtcgtatcccacactgttgcgggatggcacgagtgtcaatcgattgactagcgtggcgtcccgcagtacgaattacggaatcgttgaaattccgccattcttggtgttatggtgtcacggtccgcaaagggtgatgtgggacggcacggctcaaacggcgaaaatgagctgccgtcccgcagttttacgggatagcacaaaaaagaggcttctgctgttttcgtgggttgggttcttggttgtggtgggcgtatgtcgagtccgccgcggcggagcatgacgagggcgatgggattgttcgcgtggtggaagccgtaggccatgcggatggtgaccttgatcctgttgtcggacgcctcgagcctggcgtttga

SEQ ID NO: 3206 - DNA, 6700 bp, Unknown
  R53_2m  MAG No. k141_4186
ccggacccggtcaagttgtaggtgccgtagggggcgtggctgtcgagcaggtggaaaatcgcctcggccatgtccttggtgaaggtcaggcgaccgtactggtcgtccaccacggtgacctgttccagcttgtcggccgggtcggcgaccttgttggacagcatcatcatggtcttcacgaagttgtgcccctcgccgatcacccagctggaacgcaggatgtaatgctcgggtgcgtcggccacggcgatgtcgcccgcagccttggtctggccgtacacaccgagcggggcgaacgcctccgtctccgtgtgttccttggcggtgccgtcgaacacataatccgaactcacgtgcacgagggtgatgtggtggtccttggccaccttggccagcagagccggaccctgggcattcgccttccacgcgatcggacggccttcggcggtctcggccttgtcgacggccgtgtaggcaccggcgttgatgatcgtgccgtacaggctccaatcgtatgcctcgtatgccttcgggtcggagaagtcgaactcgtcgatgtccgtgtactcgaagccctccagaccatgcgcttccgcgtaggcgcgaatcgcgtggcccagctggccgttgcagcccgtcaccagggtgcgcttgggagccatgggcttggcgtccttgagcatcgggtggtgcagatcggcctcggagcgctcggactcctccagcggaatcggccactggatgttcagttccggatccgcaaggttcacgaacgtgtaggtcttcttctgctcgagcgaccagtgcgcgttcaccagatacgtgtacaccgtgccgtcctgcagtgcctggaagctgttgcccacgccgcgaggcacgtagattgccttggacggatccaaacgggtcgtgtacacctggccgaagctctcgcccgggcgcaggtcaacccacgcgccgaagatctcgccggccgcgatgctgatgtacttgtcccacggctccgcgtggatgccacgggtgacgcccttggtggcgttgtagctgatgttgttctgcaccgggccgaagtccggcagtcccagacccatcatcttggcgcgctgccagttctccttgaaccagccacggttgtcgccatgcaccggcaggtcgaacaccagaaggcccgggatgttcgtcttctcgaccttcagttccttctcgaattcaaatgccatgatcggatcactgtccctgttgcttgtacttggcttcggtggcggccttggccggctcccaccaggcgcggttgtccgtgtaccacttgatggtctgctccaggcccttctggaagtccgtgtgcgtcggcttccagccgagctcggtccgcagcttggtggagtcgatcgcgtagcggcggtcgtggccgggacggtccttcacccagtcgaatgcgtccgggtcctggcccatcacggtcaggatgtcgcgcagcacggtgatgttgttgcgttcgccgttcgcgccgatcaggtaggtctcgcccagacggcccttggtcaggatggtccacacgccggtggagtggtcgtccgtgtggatccagtcgcgcacgttctccccgttgccgtacagcttcggcttcagcccctcgaggacgttcgtgatctggcgcgggatgaacttctccacatgctggaaggggccgtagttgttcgagcagttgctgatcgtggcgcggatgccgaacgtgcggtgccacgcgcgcaccagcaggtccgagctcgccttcgtcgagctgtacgggctggacggatggtacggggtccgctccgtgaacttggccggatcatccaaagccaggtcgccgtacacctcgtccgtgctcacgtggtggtagcgcacgtcgtacttgcgggccgcctccaagaggcggaacgtgccctccacgttggtcttcaggaacggctccgggttcgcgatcgagttgtcgttgtgggattccgcggcgtagtgcacgatcgcgtcatggcccggaacgatcttgtcgagcagctcggcgtcgcagatgttgccgtgcacgaactccacacggtcgcccaggatgcccctgatgttctccaagttgcccgcatacgtcaacgcgtccaaaaccgtgacatgcacgtccggatggttgttgtacacgtaatggacgaaattcgaaccgatgaaaccacagccaccggtcacaatgatgttatggggagtaaacagttcttcagccataacctacagcatatcgtcaggcataccgagacggcgagaaaggacattgttactggtgttgaacaatccgatatggggttcgcccatcaatcgtttcgccaatgcgctcgaacgaatacccattgaactgcatcgcatccagtttctgcggagaaagcacattgctcacacctagcttgcgcaattgctccggcgtgacatgcacggtaaacgaatcaggcgcgactaatgtgaacacatcggccgactcctgttccacgacgttcacagaaacaaatgcataccgattgtagatttcttcccattgtccattgggatcaagcttcttccatgtggcaagatcaggagtgacttccaacgcattcaatgtgtgtattccatttgccactgcaagattcgccagctgagagccgaatgcgtcatctattgcccacattcctggattctcagattgcagtgactgcacttgttgtatcagcggctgcttagtcacgggcgcactcccatactgcacaggattcacagacaaacctgataccaacagcccaacggacacaattggcgccacaactgtgcgagcaattacgccgttattcagaacagcgaaactgagcaaacccgctatggcaaaacacaccacgaccagcagccgcccaatgtacgagagatacatcgcatgattagcccatgccaatatcgcggcaaacacaaaagtcaccagtaatgactgcttccaagaaagttcgccatcgataatggccgccgcacgcaccaacactgcgatatttgcaacgcccaaaaccaccacgcatcggccgctagtcacagaagtcagcatcattatcttagaaagccaaagcggcatacccacgcaggcaaatattgagaacaacgctatgactgtaataagccaggcactaagcacatccacttttttgcgctttatcatgccgaatacggcaagaattattccgagcgggaatagatctacgaaacgtgatgcctcaaccatatttgttgttacagagtcaacggcataatccttgaacgggaaaaagagagtgcccacggatgatatcagcgacagagggggcagccctcctccgatggattgccttgcgcccggatatgccgtgtgcagcatggattgaatcgtgccccacgaagtcaccactgcagagccaagaatcacacagaataaggcaatttcgcccacaaaaatcagggcgtctttccttgaaattcgaatatgtccccaatgccgtatgacaatacaaagaatcagcaccgcaagaagataacccagagagatttgccatgcgggatacaaggtcagtgcaaacatcccggcgcatatcagaatcactgcggcatatgcggccctatggccagactcggtatcgccaagatatcgatcaaagcacacgatggacacgaatattgcgataagcatctcaggcagtgcgttgactgcgaaccaccattgcaccaacggggcacatgcaatgaggattgcaccaacgaacgctacacccttgtgtttctcctgccggcgatcattgctgatgcagaggaagaactcatatgcggccaagaaaagtaccactaggcgcgcagaccaataaaaagcaagtcctcggctactgccgaagaggatatacccccaatggaacggcctgaacaactcggcaagagccagcacaggtgcatccttgacgatgaacatgtccgccggtttattgccaaacaaatcattaaagtagctatacccggagtatctttgcgaaaaagccagaggagtgcccaccacatattcgtcggttcgcattatgcgaggggttccccataccacgtccgtagacatgtcatgtcccagccagtaattccacatgcctatggatgagccgctaatattcaacagcacgcaagccgctatgacacttgctccgagtatgaagcgatggcggtgcatccacatacccaccggcttcacgccaaaagcaatcatggcgccaatcaccagcagaggcatcaatatcagcaggaaccggatgcacagcaccggaacagactccgttgaagcaacaggagccagccgaaacagacgttcgcgaatgcttggatacgccgacataaccatgcttgacgccactgctgcgcatatgaataccgctatcaggcggataagaaaacctcgggcagcaagaggtgatggtttagagtaacgcgtcccttgcagtcgctttgttgccaaaatacttccttaagtgtcgtacacgggtactggccaacaagtatagtaaccaccatgttcgagaataatcagccttccgtcgcggtgcttcttccttgttttaacgaggaggtcacaatcggcaaggtggtgcgcgacttcaaggccgcgctgccggatgctacggtctacgtgtacgacaacaactccaccgaccgcaccgccgagatcgccgcagccgagggcgccatcgttcgccgcgagccccgccagggcaagggcaacgtgatccgggccatgttcgaggacatcgacgcggacgtgtacgtcatggccgacggcgacgacacctacccggccgacgcggcacccgccatggtgtccaaggtgctcgacggctacgacatggtgattggagaccgcctctcatccacttatttccaagagaacaagcgtccgttccacaatttcggcaaccgtttggtgcgcggctccatcaacgggctgttcggcgcgcacgtcaccgatatcatgaccggataccgcgcgttcaacttcaccttcgtcaagacctatcccgtactctcgcgaggcttcgaggtcgagaccgagatgacaatccactcgctgaacaacaacctgcgactctacgagatgccaatccagtaccgtgaccgccccgaaggctcagtgtccaagctggacaccgtaggtgacggcatcaaggtcatgagcaccatcttccgcatgattcgcgaatacaagcccctccccttcttcggcggattgggcctaatcatcggcatcgttggcattgtgctctgcggcaccgtcaccttcgaattcgccaagaccggcgtggtcacccacttccccacgctgatcggcgcggtgatgctggtcatcacggggctgctgctcatcatcgccggcatcatcctcgacgtcatggccaagaacgaccgcaagactttcgtcattgacaccaacaaaatcgcatacaacaagaggcactgacagcgacgtactaaaagatgggggcgcaaccgtgagtcacacccccatcttttagtgtcagcccaaaccgcaaaatatgaaggtaggtaaatcatttacctggtatctgccatgctttcttgaacgtcaacaatgacacccccactcatcttcagctggttcgaccacacactcaatacgcgcaccaacctcaagcgcataatcggtatccgtccacatacgacaagccgattgaatcgatataccgttcttccttccctaccattaagcatcctttcggagtccctcattatccttttccagccacaggtaccacaaatctctcataccttggataagcaaatatgttattaccacctcagcgacccagtcctttgcactcccgctgatttctaccatcatgattaggagacctgagatcaatggataatgcgtcatcttccgaaacatttttcgacccgccgtacttttcctgacccagctgaggcactatcgcgcccagcatacatagtccaagcaggacgcaaatcatggccgcccatgccgcgttcgacttattgacctttgttccttcgaggaacaaccactctttgccaaaaaccaatccggtagctatgaacaataatccgaacgatatatcaatcctattcaccacatcatccatatctatcaaaacaactgacacgataaaatcagaagccaaatgaataatgagatagcatagaatgcatgcttctggcctatatcgatgagtcacatacgcagcgatgcgatgaggaacccaatcggcacggatatgacgtgtattatgtcggctgcctgcttgccacgtcagctcaagcagctgtcatcgataacggcttagacaacttactggagcaggtgcatcacaaattcggagtacctcgtgacgctgaatttcacggtcagtgcatgttccaatacaaggacgactggaagtgcatgaaaggcatgcacaggcagtcggcaggtatctaccgcgcagcaatgcgaattctggccgacagcggtgccagattggttatacgcggcgtgcatgtcgggcaactacaggaacgctatcgcgagcacgctcacaatcctcatcaggtgtctcttcaacattgtctggaacgtgtcaatatgattgccgaacaggaacgtgatgacgtgtcaatcatggcagataaagtggcagac

SEQ ID NO: 3207 - DNA, 73615 bp, Unknown
  R53_2m  MAG No. k141_4392
aacgcaggagccgcaggctgttcgccaggttcgtccccgacaagagcgcgctggccacggcgcgcgccgaatacgacctctacaaggacatccccgcgccggcgcgcatcgaccgcacctgggacaacggcaccgaatcctcctgccacatgctcgtggacgaggcgctgggcatgctcgcctatttcgcggacccgtactcctcctaccagcgagggtcgaacgagaaccgcaacgggcgcatccgccgccaccttcccaagaggaccggtttcgacgacctgacggacgcggacctgcaggccatcgtcgatgagatcaacgacacccccatgaaggtcctgggctgggaaacgcccaacgaggtttggtaccgcgagctcggcaagccaatgtcaaagacaagccacccgaagacgagcgttgcacttacaaattgaattcgggtcgactatcgcaatgtcgatccgcgtctgggaaccatggacgacttcgacgccatggttgcagccgcacacgaagctggcatcaaagtcatcgtcgatatcgtgccgaaccataccgccgataagcacgtcttcttccaggaggcgctggctgcaggacccggttcgcccgaacgcgaccgctacatcttccgagacggccgcggcgagcatggcgagctgccgccgaacgactggatttccctgttcggcggcccggcgtgggaacaggtgcccgacggtcagcggtacctgcatatcttcgccaagcagccgccggacgtcaattggaacaatccggacatccacgaagagttcaagaagaccctgcgcttctggtccgatcacggcaccgacggcttccgcatcgatgtggcgcatggcctggccaaggacctggaatccacgccgcttgatcagatggacccgctggccgtgcagcatggcctctgccacgacttcacgagcccgctctgggaccgccgcgaagtgcacgacatctaccgtgaatggcgcgaggtgttcaacgagtacaacccgccttgattcgccgtcggcgaggcatgggtcgtgccggagcgccagcatctgtatgcgagcaccgacgagctcggtcaggtgttcaacttcgagttcgccgaagcgaactgggatgtggacgcgatgcgtgcggcaatcttcgtcggtctgcgctccgccgagaaggcgcacgattcgacgacgacgtgggtgatgagcaaccatgacgtgccgcgtcacgtttcgcgttacggcctgccgcgagtgccggcctcgtcgcatcaccagctcgccaaggactggctgctgcgcgacggcaccagctacttcgaagatcgcgagctcggcaccaagcgtgcgcgcgcggcgattctgatggagctcagcctgcccggttcggtgtacatctaccaaggcgaggagctcggcttgcctgaagtggcggacatcctgtgggatcgtctcgaggatccgacccccgttcttcacccgcgaacggttcatcgaaaagggtcgcgacggttgccgcgtgcctctgccgtgggtcgccgccgacgtgcctgcacccgctgaatggaacgcgggattcggcaccggagcatcgttcggattctccccggcgacgaaggccgacggctcggccagtgcggacccgcatctgccgcagccactgcggtacaaggattatgccgccgatgccgaggctgctgatgacgcgtctatgctgaacctgtatcggaccacgctggagctgcgcgctttgctactcaccgcaaccgccgatacctcggactgcgcggccatcgatgccggacacgacgtgatcgcgtactcccgccccggcacggacggacgccgtttcgccagctacaccaatttcggtgtggcggcggtgacgctgcctgccggtgaggtcgtgctcgcctccggcgatctgaccgctgacggcgctctgccgcaggacaccacggtgtggatcctgctcgactaattcttccttctcctctttcccctccgcggcttcccgggtcttcccgggaagccgctatttgtatgtcttgttggacgtgtggatgtacagagaggggtgtagccgcgttgtagaggactgcgcgcgggcgggcatacgcggtggtgacgtgggcgtgaggggttgtataagccccaaatcagcccctcgtaagcgagatatgtggctcgtcagtcgaattgcggtttggcatgattctgcatgcctagagatgctagtggtctgccttataaataactgaaggaccagctttttctctccccccagtcagcttcgctgatagccccctcgtcagagggggcacataccgccgctgtctgcttcaaggcaacgtcccattagaagccgatgccggcttgcatggctccccttgtcagggggggcgtcccgcggaagcgagactgaggggtagtcatttaacgaacttccgacggaggacactagagagttagggtcgcgctccagtgcgcatacgaaggggggcttcccggaacaatccgggaagccccccttcggcttgtaatcgtcagcccttgacggcgccagccatcacacccttgatgatgtacttctggcacacgaggtagaagatgataatcgggatgatggccagcacgaggcagcccatcatggcacccatatccaccgagccataaccacccttgaggtactggatggcgattgacatggtcttgaaccggcgcatgtccaacgtcaggtacggcaggaggaaatcgttccagatccacatggcctgcaggatggcgaccgagatcacggacgggcgcatgatcggcagcgtgatttggaagaaaatgcgcggcacggaggcgccgtcgatcattgcagattcctcaagttcctgcgggatgcccttgatcacgcctgtgaatatgaacacggccagaccggcgccgaagcccagatacacgatccacaggccccacggagtgttcaggccgagcatatcggcgatcttggagagggtgaacatgaccatctggaacggcacgatcatgttgaacaggaacagcaggtacagggacttcgccgtgcggttgttcacacgcacgatccaccatgcgcacatggaagtgcacagcaggatgagcagcactgcgccgaccgtgaccacaacggtccagccgaaggactcgattagattggtgcgcttgatgccgcgtgtgtagttctgcaggccgacgaacgccttgccggtcgggatggagaacgcgttgcggctgatgtatgccttctgcttgaacgagttgatcaccacgaggacgatcggaaacacccaagccagcgagatgatggtgaacagcgtggcccacagtactggatgcttgactttctcgctcatgcggacacctccttgctagtggtgagacggttctggatgatggcgattagcgccacgatgatgaagaacacgacggccttcgcctggccgacgccctcgaagccggcgcggccgtagaacgtgcggtagatgttcagagccagcagctcggagctgttggacggggcgccgttggtaagggcgaggttctgatcgaacatcttgaagccaccggtgacggtcaggaacgagcacacggtgatggacggcatcatcaacgggatcgtgatctggaacagcgtctgggtgttggttgcgccatcaaccgcggcggcttcgagcacatcgcccggaagcgcctgcaggccggcgatgtagatgatcatcatgtagccgatctgctgccagcagtacagcatgaccatgccccagaagccgtacacacccgagtaggtgattgaacgaccccagtgggccagcacgccgttgagcaacagcagccagatgtagcccaggatgatgccgccgatcaggttcggcatgaagaacaccgaacggaagatattggtgcctgcgaaccgcttggtgagcatgtatgcgatcgcgaatgcggccacgttgatcacgatggtcgtcacgatcgtgaacagcaccgtgtacaccagtgcgttccagaactccttgtcctgcacggcattgacgtagttgtcaatgccgatgaactgggcgtccgtcaccgtgctgaacttgcagaagctcaggtacaggcccatgatgaagggcaccacgaaaccaatcatgaatgctgcgaacgtaggcagggcgaacagtgcccaccacctgcgaatcgctttgccagtcatagaaatcatgccagcctactttctcctccttgagcacacccgcactactgcgtgcgagtggtccgaatttgggattgttcagtctcctcagtgctgaatagcaccaaatcgaaccggtttaaggttaccataccacgcgtatgaccgatggtcaaacgttgtcacagaaagcgtgtccatcactccttcctcgctgcctaagcacagggcaaaatgctggaaatactgatttttggcatttccgatgcagaataacacatatgataacgttgtcttatcgactgctcaacacatggtcgacgccgtccgcgtttattgttgtgtcatagacgcatctcactgcaaaggagaccggcatgggaatcaacatcaaagatgtggccaacaaggccggtgtctccgtctccacggtctcccgcgcgttcacccgaccggagctcgtgtcgaaagcgacgcgggccaaggtgctggccatcgccgaggagctgaacttcttgatcctcccgctcggccatggtgctcaagtccggccgcgcgctgcgcgtggctttgctgatgagcgatcacattcgtctatggttcagcgcttcgatcatcgaagggctgaaccaggtgttccacgcgaacggctatgacctgtcgatcttccagatcttcagcattgaggagcgccgcgagttcttcgacatgctgccgatacggcgcaacgccgacgccgtgatcgtgccgtgacgctgcacttcagcgtgcagcagcgatacgaatcgttcgtacaggtctgcgaacaatccggtatcgacctgaccgccatcgtcatcgcggacggcgatgaccgcatcagccgggcgaccaccgaactgctttcgatggatcgcatgccgaccgccatcgcatgccaagaagacggtatcgcgattccgctcatgttccagctggcgcgcactggccttcgcgtaccgttcgacgtgtctatggtcggatacgacgacagcttctatgccaatgagatcggattgacgaccgtgcggcaggatccgatcgcgatggcgacatgcgcggcgcttaaagcccttgatctcatcgagacagggaagacggccaagccgtttgaggtctttcccgcgcagatgctggtgcggtccagcacgaccgaggcgaagggctgaggggctgacgaatcccgtcagccgctgaccagacctcgccgtaaaaacggggttccgatatggtatcgaaaccccgttcgctgacgttgcgtgatcatgggctaacagccgactggggcaacgctttcacgccggagtcggactcaggacgcgtgcgcggccgagtactccttggcccagccgtctacgaacgcggtcttgaccgcatcccagctctgggtgccctgtgcgtactcgaggagcgcgttgccgagatcattcttccactgctcggacggcatcatggtgaagttccagctgacctgcgtcttgccggacttctgatcggcgacggcggccgcaaccagcggattgtcggtcttgatgtcatcgaaggtcttgaacggggtggtgaagcccatctcggtgctcagcgcctccttgccggtgtcagaagtgatgccccacttgaggaactcggcggtggccttctggtcggcctcggaggccttggagttgatgcaccagtagttctcggagccggtggcgagtccttcgtcctgctcgtccgggtcgccgatgtagatcggcatcatgcccacctgctcggcggtcatgccggcgttctgcagattggtccatgcccaggtgccattctggtagaaggcggcctcgccgagtgcgaactcggagttcgcgtcatcgccggtcttggagctcagctgagacggctcggtggtggagtccgtgatgtacaggtcgaagatgttcttgtagttctccaggcaggtgcccttgatggtggccggctgctcgtgatgttgtcttccttgaactcgtagtagagcggcaggttggccaggtgggtcttgaagcgccagtcggagctggagtcgaagccggcggaggtgaacgcgcccttgatgccgagctcatccttgcgggcctgcatgtcgtcggcgacggccttgagcgtcttgaaggagtcgatatcgtcgatagacttggccttcgcgccggacaggccgaagtacttgttgaggatgtccttgttgtagatcaggccgtaggtctccatggcgtacggcacgccgacgaccttgtcgccgtccttgagtgcgacatccgggttctgcagctgcttgtagacctcggtgtcggacatgtccgccgtgtagtccttccagttggcgtagccgaccgggccgttgacctggaacagggtgggggcgttggacttggccatctccgacttgagctgctgctcgtaggtgttggatgccgcggtctccaccgtgacttctacgccggtttcgtcggtgtaggcctgtgccaggtccttccactgatcggcggctttcggcttgaagttcaggtagtagaccttgccgttgtctccgacctcggcgttggagttggtgtcgctgccgcacgcggccatgctgatggacatggctgccacggcgaatatcgctgctgcggatttgattgtacgattcatcttcgacccttaccctaaatgctaccggtcccatcttcgttgagtcggcgccaccggcaccgttgcttccggcgacagaatctattgtgcactgtttcccagaagaatgcaaacgagtgcaatccatctctcggcagaacggctaacctcggatagacaaagtaatcaaaaccgcacatttttaccactgttgtcgccgttttacagactgcaatcgattgcaataaacgtttgcaactgtgtcattcttcgcgcgcgattacgtcactccctgcgtgtcgcgggcattattccgctccgaggcagcccagtggtttgtttcgctaatgattgaggatttcggttttgtgtctctcccccagtcagctacgctgccagcccgtcccgcaagtatggacgcgctccgcgcggcagcctgctagctcgcttgtcggctcgcatgttgtctacagacagctcttcacggcaacgtcccatcagaggggggcaacgtaccgccactgtctgcttcacggcaacggtccgtcaaaggaggcaatgccgctcagacgaatacaagacagaccactagttcgcttcgtgaatcctctgcgctgcttcggcgtccttcgcaccaacgcaatgaggcgggcgaagagcatggaatctgctcctcgcccgcctcgtctcattgcgctcgtcaccgcggccagcggtacacacgatccggcagcgtggggaatgcggcatgcggctcacgctgataccagtacgcgatcgatgccacgtcgtcctgccgctcgaagaagccgcgatggcccacgccgatctgctgcacggtcacgcgcagatcggagcggaaacggatcggatcggggatgtgccagcgatagaagccgcgcatcggcgggcagtcgtcgttgtgataatcgttgtgcaccagttcatcgtgcgcggagtaatacggataccccatgtaaggcgtgcagtagttctgctccacggtcttcccgttcacctgcttggcgaagctccacgagccgccgaagtagtcctcggtaccggtgccgcagatcgtcgggtattcgcggttgccgtcgatatagaacttgaactcgccttcgccccaccagtaccgttcgagcgtggtcagcgccagataggtacccacatactgccccgagccgcgtacgccatcgagcaccacataatcattgcccagctcggtcagccgctggcgacgccactgcgcatggaagtaggcggtatcgggtggcagtggatcgtcgtacaggctgtagtcgatctgatagaagaacgcgccgattgtgttcacatgctgattctcgagcgttatccgcgcgtgcctagcgaacggcatcgggaagaacatgttgaacccgcggttgggcaccacggccaccggttcggagttgacgaggcatgcgcggccgaatccgcagcagaagaaatcgccgagcgggcactccacgctcggctcgctttcgtcatcccagtagaaccgcagcaccagatcacgcagcacgaaacagtcggcgtccgtggtcttttcgtcgacggtgatccagatatgacggatgcagccggggccgtcgatgtcggccaatgtgaccgtttcgccactgggaatgttgcgcaggcaggggctgcccttgcgcgacgggcccagttcgctggcggcgatgccgccgcggccgggctccccggtcggattctccgcgttgatcgcacggctggactcacgtcgtagggtcatcaatgaaccaaggtcggcaatcatcgtcaatctattccttccattacacgaaccattacgcgaacggttctggtgccgcacatgacgcacgacgccggaaccgtcctatgttgcggcagtcgccgcgatgccactgcttcgtctatggcaatgacaatggcggtcggcgcacctgctgcctaagtgctcgaatcatgcgcgcatcacttgtgcaccggcggcagcatgccgaagttggactcgtagtcgttccaggcgctggtccaatcgtcgagatacgccttcttgacgccgttccagtcgccagtgccctgcgcgtactcgagcagtgcgttggccacgccgtcggcccatgcctgaccgggaatgtaggcgccgtggatcggcgtcagaccgtcggattccagcttgagtgcggacttggtgagcgggttgtccggctggaagtcttcgctgtcgaacgtggtgaacggcacggcgaagcccatgtccttggcgaggatcttcttggcgtcgtcgttggtgaccatccacttgatgaagtcgagcgtcgccttcttgtccttctcggatgcgttcttgttcacggaccaggagatgtcgtagatggagttcgccgcatacttgctttcgttcgggaagcccatgtagtacggcagcatggcgaggtcctcgtcggccacgtcgttgtccttgatctgcgagtaggcccacacgccgttcgggtagaacgccacgcgaccggtggagaactcggcggtggaatcctcgtagttgaccgagccgagcatggtgttctcggtcgggttgtccttcatctcgagatcccacagggccttgtagttgtcgaggtaggtgcccttgagctccttctcgaagtccacgccctcatcgatgtactcgtaggcgaccgggacctgggtcatgtgcgacgcgtaacggtagtagttggaggcgtcgaggccgggggtggagaaagcgccgtcgaggccgaggtcgtccttgtgctgctggatgctgtcggcgaccttcttgagcgtggcgaaatccttgatgtcatcgaaggacttgatgaccgagtagctcttcttggcgtactcgttgatgatcttcttgttggcgatgatgccgaaccattcggcggcgtacggcaggccgtacacgtcgtcgccgtccttgtgggccatctgcttgccctgctcgttgagcagcttgtaggcttcggagtcctgcagcggctcgaggtaattcttgtacttggcgtactggtcgaagccgccgatgccgaacatggtcggggcgttgttcttggccagctcggacgacagcgtggattcgtagctgccggaagtggcggactggatgtcgacctgcacgccggtttccttggtgtacatgtcggcgagttcgttccactggtcgacgacttccggcttgttgttcaggaagtagacatggcctgcgtcgctgttcgtgcttgagccgcatgcggccagtcccagcgtcaacgctgcggcgctgatcaggacaattcctttggacagcttattcatggatttcctttcttcatctgcggccacggagccgcctcgcacttgttgttgtacggggtgccggactgcatacgtcgccgttggtgcagccggttttgctgtagcgcatttcgttatgcgttggagtggattattggtctggctcaggtgttgcctcgttgcgtaagcatacagtcgaaccggtttgatttataggatatcgaaccggttcgctatcgtcaatcgggcgtgttccagcgtgtcgctacgtagccgggggtgagtcacggaagggatggtgcggcggcagtggtggcgcgcggaatcagcgtggctctcaccgtggtgaccgtttcgctcaactgctcgcctcgcatgagggcgagcagttgttgcgcggccagtcgcgccatgtgctgcgggtcctgatgcaacgtggtcagtccggcgactacggcggtcggatggtcgtcgaatccgatgatcgacaggtcttcggggatgcgtatgccaagctgccgcagatgccgcatgatggcgaccgccgcttcgtcggtttcgacgcagatcgcggtcggccgatgctcgctgctggcgatccggccggctatggcagccatggcctcatcttcgctcatggcgtccatgtcgctggatgatgcgaacgcgaccggttcggcgtcgggaatgcattcgcgcatcgcgtcgaggaagaaatccttgcgcagatacgagctggcggggaacggtgccggtttcggatgtgcgacgtatccgatgcggcgatggccgagttggcgcaggaatcgtacggcgtcgttcatggcacgcttgttgtcgagcatcacggatgcgggcaggcgggaagcgctccgtgcgtcgagggcgaccgcggggatatgcatgctggaaagcaacgccgattcgctgtcgtccagcgagaatgacgggaggatgaacccatccatattgcgtccgttgctgggcaggtcggcgaagaatccatgcagttgctccaggtcgcagacccgtacgggcacaagatcgtagccgtggggttccagcgtttcgagtgcgccttcgatgcagctcgcgttgaaccatgacgcaatcgtgcagccgaacagcatgacgacgcgcatggttttgccggatgccagcgatgatgcgctgcgggacagcgtgaaatcgaggcgacgggcggcgtccagcacgagttgccgggtggacggccggacgctattcatgccgcgcaatgcgcgcgataccgtggcgtcggagactcctgtggctatggccacgtcgtggattgtcgccatgatgtctcctttcgctgtgtggtgggcggtgtcagatactgtagccgtgctggcgccgccgcaatcgctgcgacgtacgcccatgcacattaatagcatatatgtatgcgcttacattcttttgtaccacgatgtgcgcgttgttagcggtcacggtttgattgtgtttgcaatggtttaccaatgttctgtattgtgcgcatgtgatgtgacgcgcaatctgcaggcggcggttgacggtgtgcaatgtaagcgctatcattttgttgtgtcaatcaatgcatggttgatgcagccggcatccgatccggcagggcgaccgcaaggtcgtacacggatatgtgcatggaggcacgtatcacatgagcaaggagagccattacagggaggtaatgatgacaggaagaacgtggaacaccatcgccaaggcaatcggcttggtatcagtggctgcgctcagcttcggggcgctggctgcatgcgggaacacgaccgcggtcgacagcagcaaagggcgtgtgtactacctgaacaagaaggcggaagagcaggagaaatgggaggccctggcgcaggcgttccaggacgagaccggcatcgagacccagattcagctttcggccaccgactacgaccagacgctgcgttccgaaatggccaaggacgaggcgccgaccatgttccaggccgacggcccgagcttcatgtacagctggctcgattatgccgccgatatgagcgactccaagatctacggcgagctgactgacagctacaaggaccgcacgctcaagaacgccgacggcaagccggtcggcatcccgtacgcggtggaaagctacggcatcatctacaacaagtcgctgctcaagaagtatttcgatgcatcgtggtcatcggtcaagtccatcgacggtctcaacaacttcaaggcgctcaagaccgtcgccgatgagatccaggaacacaaggacgacatgggcgtcaagggcgcgttcacttcggccggcatggattcctcggcgttccgatacaacttccatctgccttctctcccgctgttctacgagtaccgtgatgacggcgtcgatatgaactccgtgccggaatccgtcaagggcacgtatgtcgactacatgcagaatatctacgatctgtacatcaccgatgcaacggtgccggccagttcgctttcaggcaagaccatggatgatgccacttcggagttcgcgctcggcgaggcggtgttcttccaggacggcgtatggatttactccgcattgcaggatcagggattcccggatgaggacctcggcgtgctgccgatctacatgggcgtcgacggcgaggagaagcagggcctcaaccaggtgatctccaactactggtgcgtcaattccaagtcttcccagaaggatcaggaagcgacccagcagttcctggagtggctcgtcacttctgatgccgcacgtgaatccatctcgcaggacatgggtctggtcacgccgttcaagaccttcgacgaggaggcatacaccgtcaagaacccgctggtcgaagccaaccgcgagtaccaggagaacggctactacgacgtcatcagcgtctccaccgtgtcccaccagtgggaaaaggatctcggctccgcggagctcaactacgcccaggggcagggggactgggatgcggtgaagaaggtcttcaccgatgactgggccaaggaatacaagctcgccttcgccaagtaagcgaagtaatcgacaggcgatccgaggggtcgcagcgtgaggggcgtccgttgccatagtgctggacgtccctcacgcgttgttgtgttgttgcgaactggctcagcgcggcccgctggacagcatgtggccttccgacttcgcacgcaacgtcccagcgaagccgaatgaccatacactggcctgcccgcgtcgcatgtgcggcaattacgttttccaaccatggaagacggtatttcatgcacttttccaaccgtgcacgtgcggagacggctgagacggttggcgcagagacagctgaggggagcctccatacggaagactcccctcatagagacgctactgcaagtcagcggtcatgcagccggtattggccggctgcgaggcgtcatgcaaggtggctacgcatgaaccactggaatttctcgagctgctggacgtgatcctggatgacgttggagctgatcacatccagctcgtccagctcggcgatggccttgcggtcgtcggcgatgaaggcgtcgtagtactcgatcagcgccttgagatacgcctcggtgccggcgcggccttcgacgtcgaacggcttccgcgtgcggttgcgcatgattgcgtcggtacggccgtccggcgtgccgcccagcgtggcgatacgctcggcggtctcatccgcctgagccagcacggattcggcctcaggatcgagcatcttgtgcacggcgatgaagttcggtccggtcacattccagtgtgtatgcttcaggaccagcgcggcctcctgctcctagctcagtcggttctgcagaatcgcgatggccttctcgctggtcgcctcatcgagtcccggcgcaactgattattgggaggtttgagcaccggatgttattccgattcggcactggggttattgtgggatggcaccggcgtgcttggtattgggcactgccggtgccgttcctgtttgcgagactggttggcggctaccggccgggtgcgtgttccctcatgttgtagtcgccggtttctatccaggtggtgttgtgcacgatccggtccatgatggcgtcggcgtgggtgccgcctccgagtcgttggtgccagtccttttgggggtattgggtggcgaacagggtgctgccggtgtcgtgtcggcgttccatgagctcgaacaggaagccgcggaagcgttcctcgggcgggtcgaacagccattcgaccgggcgcgaggaccgtgtacgcgctgtagcgtttgagcagtctggaccgtccttggggcttgtcggcggcctgacgccattcctcctcgaggtcggggacgcggatgtagcgggaacggtaccggttgcggcacgcctgacgcgccagggcgcagacgatccagctcttgccggacccgcagtagccctgggcgacgatgttgcggtgtcgcgtgacccatgagcagtctgagagcgaggcgatcagttcgcggctgatgccgcgttcgtcgagcaggtcgagggtgcgcaggtcggcctgcgggtagcgcagcctcgcccttctggccagtccgccgatgcgtttgtccgtgaacgcggcgtgcgcctcgtcgaccgcgagttttatacgttgttccgcgttcaggggcgcgcatgcgtcgtcgtcctgatgcaggagcgcgtcgagaagctcctggcatcccatgtcgcgcagctggtggcgggtttttgttcgtcgagcctcatcgcttcgtctccctcgcgttgtagtcggcgccgcgcacgtatcccgcgggcggttcgacgtcgagacccttgactttcgggtcctcgccttccatgacctcgtggtcctggccggtgtcgaggatcgtcttcaattgccggtggcggggcgtgttcacgaccctgcgggccacgtcgcacgcgttctccagtcgttgccgcccgtagcggcgcgacagcctcagcaccgccagagcggggtcgatggcctggtccggcctggcatatgattcgaagatgcgggatatgacgatgaccgcgttcgggccgacgcccgacgcccatgccctgacccggggctcgtcccattcccgccagttcgcctttttcggcaggtccacgtcgcgcgtggaggaacggttcgactgaacggcatcgaacagccgatgcacggcgacccgctggccatcgtgccagatctcgagcgtgcgggcggtctcgcgaagctcgacccgggtgccgatcagccggtggggtacggaataccggttccgcctgtaaacgatatggcagtcgttggcgactttcctcgtgccggcccaatcgccggtctcgtacggcacgacgggcagcgggatcatcatgggtcgctcctcggactcgaacaccgacaggcggctgccctcgcgtttctggaaaggcgcggcgttgtacgcgtcgagccagtcgcggatcgcccggttcagttcgtcgagcgaatggaattcccggtcgcgcatcgcgccgacgacggcccgttcggcgtgcaggacgaggttctcgccgctgggcttgtccttcggccgtttcaccctgcccggcagcaccgccgtggaatagtgttcggcgaggttgcggtaatggtcgtccggcacgatctcgccatcgcggggatggctcacgacaccggtcttgaggttgtcgcacacgatcctgaccggcaccgcgccgaaatagtcgaacatgcacacatggcagtccagccacgaggattcgcgcatgtcgccggtcgcgcgcacgaacgagtaacggctgaacggcaggcacccgacgaacaggtacgccttcgacgtctctccggtgaccgtgtcatggatcggcatggtcgccccggcccagtcgacctcgaccgtacgcccggccttgcgctccaccctcgaggtgacgcccagacgcagcacgtaatcggcgtacagcttgcagaaccggtcgtagcccatgaacggaaccccttcacccggcacgagtccgcgtactccgcgtgcagcagcttcaacgtgacgcccacgcgccccaattcgctgtgcacgcgcgcccagtcgggctgctcgtaggcgctctcgatcacacccctgccgggaaacagcagggcgtacacctcgtcatcggttttgtcctccacaccatcgtaggagacgttaagccggtcggcggcgtcgaacacgtcgatcacgctatgcttcgacataccgtagcccacggctatcgcgttgcgcgacaatccttgctcacgaagcctgagcacgagcttcgccttgattctgcgtaccatcgttggcactcctttcgccatgcgtccatcacatggtgaaaggagactaacccaaacggcgccgaaccacaataactttggtgctaaaccacaatgatcccgtgaaacggcaatggtgccgaactggaataaccaacgtgctcagcaagtcaaatattcagcaacaaatgcaagtgtcatgatgttccttcctttcatcttcaaggaacgtccctcccagtctacgcgcccttgtccgacggctgaccgcgctgtggaaggccgccaactggtcatcgggtctttgatcgggaagatggcgcgtttggcgtgtcgccaatgatgtcgcgccttattggcatttgtgctcggttgagagctgttgcgcaaactgcacccaccggtaaaggaaaggggattctgcagttcattcatgttctgtggaatcgttggaaaacgagattcacaggcagaatgacatgtacaggggcaggaagcggcgtatgccatcctgactcatctggcgggggtgcagcacgtattcttcgccggctcgttgtgtgaatttcgcgtggaacttgtctagggacaccgtggaatagcgtttgccggatttgacctctacagggctgactctgggtttcatggctgcgtccgggtaaggtcggatgatcaggaagtcaatctccatgcgctcctcgcggatgctcgaggattttgagtagaaatacaggtcgtgcccggatgcggtgagctgctgagcgacggcgttttccgcgagcatgccctcgttcacgccgtccgctcccagcaacacttgccggtacacttctggcaaggcggagcccgaggcggagaatgccatggtagacaacagtccggtgtcagccatgtagcatttcactgttgcgtcgtcggcgctgagcgccagaccaattgacgggtcctcggcgagggtgcataggttgaccgtcgccgcttcgcgcatccaagagaaggccgtcatgaaatcacgcgatctcgagccgttctcgacttgcgtgtacaccaagcgcttctcgtgcttcgacagctgaccgggaattgcgtcgaacactgctcggattcgtttagccgccgtgccgccgtatttctcgatatcctcgcggtagatcttgaggaccatgcgcttggccctgtcggcggccgccatgtccctattcggggcgtaggccgtgaccgactgtggcatgcctcccaccagcacgtattcgcgccataggcgcgacgccttgcggtgcagcgagtccggcaaggggctccccgatgcaaacgagttcgtgatcatctgagccagcgcctcttcgcccatggcccacagaaactcctcgaaatccagaggacccattttcatggactcttcctcggagggaatcagtatgcccttcacgttttcgttaagggagattagggatcccgtctcgatgaagtcgtaccggccgtcggcgaccaagtgcttgatgaactcgcgggctggcgggaacagctgcacttcgtcgaagatgactagggacttacgttcggtcagggtcacgcccaacatggcgcttaggtacaggaagaaggagtcaaggtccccccttgtgtcgagcagcgttcgacgaaactcgtctcccaccttggtgaagtccacgagagcgtacgaattgtattcgttgcgcgcgaactcctcggcaatggtggatttgcccacgcggcgggccccctcgatcaacatggcggtgtgacctccgcttgaccgcttccattcgactagcttgtcgtaagccttgcgccgaaacatggctcctcccttatgattgcacgtttctaagggttaagtatagtacaagattgcacgtttctaaggtttcgcacggtgggtgaattgcacgtttctaagggttaacgaaatttctgttgggaacacttcgctggccggccccttttgttggagagccgtaatcaacgaattaatgacgcgggatactgggaagaagcctaggcggcatcggaacccgtcacagtatccggctgcgaggatgcatcggtggcaccggctttgcggacttcgatggtttcgatgcggcggccatccaccttggtgatgaccatgttgtagccgtcgtcggaatgcagcacgtcgcccaccgcacccatcttgccggtcttggacaggaagtagccggcgaccgtctcgtacgggccgtcctccaattcgatgccggtcagatcggcgaagtcctcaatggtcatgctggcctcgatcgtggccacaccattgacgaacgcggtgcgggtggtgcgttcgccgcccttctcgctgggcagatcgtactcatcgcgaatatcgcccacaagctcctcggtcatatcctcaagcgtcacgatgccgtccgtgcctccgtactcgtcgatgaccacggccagatggatgccgcgcttacgcagcagttccaggctcggcagcagcttggaggtgccgggcagggagatgccttcgcgcaccacatcgcgcacgatcttggcgttcggatcgcgcacgtccagcagatcgcgcacatgcacgaagccgatcacgtcgtcgaaatccttgccggtcaccgggtaacgggagtacggctggtcgcgtacgaacgcggcggcctcggccaagggctggtcgccctcgatgaagaccacgtcggcacgcgggcgcatcacctcggcgacgatggtttcggacgcgtcgaacacatcgtccagaatcgtgcgttcgtccttggaaaggttggtgttggagctgaccagcacgcgcagctcgtcgtcggacacctcggactcggtctgctgcgggtcgaagccgagcaggcggacgatgccgttcgtgttcttgccgatgagccagatgatcgggcggcagacggcggcgaaggcgtcgatggcgggcaccacggcgcgcgcgatctgctcggtgcgctgcatggcgatgcgcttgggcaccatctcggagatcacgatggagcagtaggagatgatgagggtcaggatgatgttcaccaggccgccggcgatgccggggtgcacaccccagctttcgaccaccggaatcaggtagggggcgatggaagaggcgccgaacgaggcggacaggaagccggagagcgtcacgccgatctgcacggtggagaggaaggtgttcgggtcacgtgcgattttggcgactttggcgccgcgagcgtcctcctgctccatttgctcgatctgcgagccgcgcagagagaccaatgccaactcggtgccggagaacacggaaccgataacgagaaatacaaaaatcaggaggatgttcaaaccaagtgacatgcctttaactctaggggagtggcacgtcaaattggggtgtgctggctgggcagggtttgctagctgcgctggctatgtgaggcgtgatgtgtgttgacgtgtgtgatggtgtgaaagagtacgcaatgatacgcaatcgtgtcatatggtgtaatttcgtgtaatttggtacgcaatcgtgtaatatggtacgcaatcgtggcagatggtatgtgttgtggacaggagtgtggtcatggcagtcaatcccttcaaaccaaccgccggtaaaatgccgccgattcttattggccggcactccattatcgaagatttttccgaggcgctgaccaacggggtaggggctcctgggcgcatcatgctggtcaccgggcagcgcggcttcggaaagacggttatgctcaccgaatttcggcgcatcgccaaagcgcagcattgggaagtcattggagagacggcgtccgcaggactggtcacgagactcatagcggcattatcgccttcgggattgcgtctggatcaggccaatatcagtccttccattggaatttccggcattgccacggcgagtctcgggcaagcgcacttttccgcggaatccaatccgctgacgttgcgcaacgcgttgaacaagcggctgggcagtaagaaactcggcaaggggaagggcattctcatcaccatcgatgagacgcaagcggcctcacacgatgatttggttgccattgctacagccgtgcagcacgtcattacggatgccgatgaaagtgatacgcctgatgaggataagaagggcgttgccatcgtatttgccggcttgccgtatatggtcaacgatttgctggataacgaggtaaccacattcctgcgccgtgcgctacgccgcgaattggataacgtgccgcttccagacgtcaagaatgcgttcctggaaacagttgcggattccggcaagaccatcagtggggaagatgcgcttgaagccgctcgccagtctgaaggatacccgtacatggtgcagcttgttggctactacatgtggcaatctgcgcagcgtcgaggttcagatgtcattaccgcggacgacgtgtcgaccggtgtttccgatgcgctgctcgccttcgacgatgccgtatgcgctccagcgctggacggcattactagtgcagagaggctgtttctcgcggctatggccaaggattcgccaaatcccacgcaggtgggtgatattgcggatcgtacgcgcagaagtcgaagctgggtgagcaagtaccgggcggttcttatcaaggacaaactcatccgcccggcaggtcatgggcagctggaatttgcggtgccgcatttggggcagtatttgcagtcgttgtagcaccaaatatagggctgggttcattcatttggtaggttgcgcgttcatttggtgggttgtcggcatggtgaggcgttggaatggcggcatttcaatggtcagtgttggagtgcagtgaccaaatgaacgcataattgacctaatgaatgaagtaagccggttgcgggctagtttcgatccagttctatgagcgccgacgcatcttggccacggcattgctgacgcaaatacgcagcacaatggtgaagacgactaccataatccccagaatgccaatgttgaaccagaactgatccgtggtgtgctcccacagatcatcctttttgaacatcggcaccttggtggggccatacagcagatcgttgagcccgatatccgaggcggcggcggagaagccccaacgtccggggaagatcatgctgaccagctcgaggctgtcgcggccggtgaccggaatcatgccgccggagaacaccaactgggccatgaccagcaccaccagcaatggcatcgtctgttctcccgacttcaccaacgccgagccgacttcgcccaacaatgcggaagtccacgcagtcagccaaatcgccaacaccagttcggatatgccggaatcagtgaccacaccatggtccgggccgggcttgccgaggctgaccgcagtggtcagaatcgccgcctgcaacaaggtctgcaaacccatcacgatgagtttcgaggcggtgtatgacgtgggcgacaaacccaccgcgcgctcgcggctgtaaatcgctcgctcggagacgatgtctcgcacggacaaagccgatcccataaaacaggcacccagtatgacgagcacaagcagctggttcggctcggtggcggcgtctttgaaatcgggctcacccaagccatgagaaccgggcacaaccagcgacagcagtcctaggagcaatggcagcaacagcaggaagatcagcaatccggggtcggcgatgatcaaatgcagctgacgaatcaccagagtgatggtctgtttgatgcggaatggctttgccggtttctcatgctcggtgtgccgcgtgatggtggactcggcctgcatggtgcgctggcgtgaatcagtaatcgaatacacccgttccggagattcggcgacatcgttgaagatgtcggcccattccttgccgttgaacgcctggctcatctcctgcacggtgccgaagaatgccggatggccgccgggagcgagcatgagcacgttatcgcacaacttgttgatatacgacagtgaatgggtgaccacgataaccacgcggccggcatccgccagttggcgcaacatggtcatcaccgtaagatccagcgccgggtcgaggcccgaggtcggttcgtcgagaatcagcagttcgggttcggtgagtagctcgatagcggtggacacgcgcttgcgttggccgccggacagtctgtcaatgcgattcttacggcgagacgtgagttccagctcattgagcacgttgtcgatgatttcggcgcgctcggccttggttgagccgggcaggcgcagcttggcggcgtattcgagcgccgcgtccacagagagcttgcggtgcaccacgtcgtcctgcggcacgaatccgatacggctgcgcaacagttcgatgttctgatgcacgtcgtatccatcaaacagcacgcgcccgtccgtggggctgttgagcccggcgacgatggaggtgaatgttgatttgccggcgccggaaggtccgattacggcggtgagcgtgcccttggcgaatacggcgttgatgccgtcaagcagccgggtgcctttgcccacggtcagtccgatgttttcggtgataaccgcgtcgttgctgacaaacggcgtgcggtcgcacagcacgccttcatgcacgatcaggtcggtgttgccgacggtgacgacgtcgtcttcccgcagccagatcttcgcgacgcggcggccgttgacgtaagtgccgttggcggagttcaggtcagtgagcaggatgccgctgctggtggtttccagcgagcagtgtttgcgggagaccagataatcgttgatgcgaatcaggcaggcggtatcgcggccgatgacgcctgtggtgtcgtgctcggggctgaaggacccgtgcacgcggttggtggtgagttgggattcgagccttaccgcttgcgtgctgcctgccagaacggtgccggcggcattcgatggggaaggggatgcgcagggagacggagatggtgatgcgggtgataccggcactggcgatactgccgtcggtgccactgctgttgggcggggttgctgttgcaggtgcgcgagggccggggatacgcggtgcggggccagcggggctggcgttggttgcggttgtaccggttgtgccggttgcggtgctggtggtgtgggttgcactactgggcgtgcctgttgcggcgcgagttgcgtgggttgtgccggttgcgctgatggtgccggcggtagcgcaggctgggccacgtttgccgcagggcgtcgcgggggctgtgccggcgtggacggcccgctggttccgacgatgcagacgatggtggcaccttgtgccagcgtcactttggtgctgttcagcagcagtacggaagtggtgtgaatgccgttgatggacagtccgtttgcactacccgtgtcttccaagagccaaccatcgtcggtaaaggtgacgcgagcatgatggtgagatatgtacgggttgtgaatcaccagatcgcaatccggcgcacgcccgatggtcgtggcacgtgcaggattgggggtataggtggcggatccgtagtgaatagtaagggcaggtggcattggttcagacttccgtgttcttcgatctctctgcacacagatgtaccacgaccgcattacccccggtgaacggggtctgactgatggtcagaaactcagcacctcgaccttgccggtgtcgagctggtaacgggcgccgacgatcatcagctggtcggcagccaatgcctgctgaatgatgggggattgttccaccagcgtctcgatggtgtgggccacgtgtacgcgctcgatgtcttcatgcgcgtcgagctcggcttcgcgcgcctgccagacggacatgccggcctggcgcagaataatcgattcggcggcggcgatgtgctcgtcgaggtcgtccatcgcatccgcggcctccagtgagccgtcggcttcggaagtgatggtgtgcatcaggtcatccagctcctgctcggcggcctcgattgcgccgcagtgctcgtgaccgagcacacagatcaggctgacgtgcagtttcttgaccgcgtactccagcgaggcgataaccgcgctatcgatgagttgcccggcggtgcgcacggtgaacaggtcgcccaggccctgatcaaaaatgatttccggaggtacgcgcgagtccgagcaggagagcaccgcggcatccgggttctggccatcaagcagcgtctggcgggtctcctgatcctgccatggatggtcgggcttgccttcggcgaatcggcgattgccttggagcatacggctccacgttgcgttcgcggtcgattcctgttcaaagtctgactgagccatgaaacctccattatcagcggactgctggtacccatagtagcgattggaagtgcggattcgcgactgcgtgcataatctggctttgcccaaagcataatgagaacgctcacgatctcaatcctgtttaagggtgggccgtgatgatagtcagcacaagggctgtggctggtgtgataaggctcatatgttctgtccgcgcgagccgtggctcaccacattacgataggtggtggtaaacgcttgaagattaacaattcccgaaaggaccgatgatgactcttctgcagcatgaactgaccgatttcaaggtgaacgcattccagaacaacgagttccacgaagtgaccaaggacgatgtgctcggccactggtccctgttcttcttctacccggccgacttcaccttcgtgtgccccaccgagcttgaagacctggccaagaactacgccaagttcaaggaaatcggctgcgagatctactccgtctcctgcgacacccacttcgtgcacaaggcttggcacgacgccaacgagaagatcgccaagatcgagtacccgatgcttgccgacccgaccgccctgctggccaaggatctcgacacctacaacgaggccgatggcatggccgagcgcggcgacttcatcgtgagccccgagggcaaggtcgtggcctacgaggtcatatcctccaacgtgggccgcaacgccgaggagctgctgcgccgcgtgcaggcctcccagttcgtctacgagcacggcgaccaggtctgccccgccaactggacccctggcgaggaaaccatcgagcccagcctcgacctcgtcggccagctgtgatcgacactgaataggcggtaaccttggctcccctctctgaggggagctgtcgctgaaagcgactggggggagtgctcgcgagagctagcctgatccgatatgcttccctcagtctcactacgacagctcccctcagagaggggagccagtgtatgtaagggagttttcatgactcagaccaacaatctctatgacgtcgtcgtcattggtggcgggccggctggcctgacggccggcctgtacttggcccgcgctcgctaccgtgtgctgattcttgaaaaagatgatttcggcggccagatcaccatcaccaacgaagtcgtcaactatccgggcgtgggccgcaccacgggccgcgcgctcacccaaaccatgcgtcagcaggctcaggactttggtgccgaattcctctccgccgaagccaccggtctcgacgtggatggtgacatcaaaaccgtgcacacctcacgcggcgacctcaagacgttcggcatcctcatcgccaccggcgccagcccgcgcaagctgggcttcgagggcgaggccgaatacgccggccgtggcgtggcctactgcgccacctgcgacggcgagttcttcaccggcaaggaagtgctggtggtcggcggcggattcgccgcggccgaggaatccgtgttcctgaccaaatacgcctccaaagtcaccgtgctcgtgcgcgaaccggactttacatgcgacgccgcagtggccgccgaagccaagaacaacccgaagatcgacgtgcgttatcaggtcgagctgaagggcgtcaccgccggccaaggcggcctgcgagaagcctcgatcctgaaccttgccaccggccagaccgaaacgtggaagcccgccgacgtcggcaccttcggcgtcttcgtgttcgccggctatgtgcccgccaccgatctggtgcgcggcgtagtggagctcgatgatcacggttacgtggtcacgcacgattacctcgaaacctcggtgccgggcgtgtacgcggccggcgatctgcgcgtcaagaacctgcgccaggtggtcaccgccaccgccgacggcgcgattgccgccgtggaactggagcgttatgccaagcagatgagcgagaaaaccggcttggtgccgccgcgtcccactgcttccgcttatgaggagtccgaggccaaagccgcctccgccgcctcggccgctggcacgacgcccaccccggctcccgccaagcgcagtgccgatgccgcatccaacgccgccaagaagtccggcgaactgttctccgccgccatcaagcagcagcttggcgtggtcttcggccgcatgacccgcccggtcacccttgcccttgagctggacagcaccccgctttcggcggaattgcagggcttcatcggcgagatggtcgcgttgtcgaatggcaagctgaactcggtcgccgtcgatgccgcagggctgatcacggcggtggatggtgcttctgtgcctacttctttggtggtcggcgagccattggccgtcaccttgccggacggcaccgaactgcccacttatggttcgttggacgattccggccgcgccacattcgacgtcgccggcgtcctgccgctcgcccgcccaactgtgcgcatctgcgtgccggctgagggcgacggcaaggccggcaatggttcactggtcttcaccggtctggccttccacggcgtaccttccggccacgagttcaactcgttcgtgcttggcctgtacaacgcggccggtcccggccagccgctgggcgatgacctggtcgaacgcgcgaagtccatcacggacccgctgaacatcatgatcctcgtctcgctcacctgcacgatgtgcccggaaaccgtgcttgcttcccagcgcattgcctccctgagcccggccgtgcgcgccgaagcctacgacgtctcgcacttccccgaactcaaggaccagtacggcgcgatgagcgtgccctgcatcgtcatcacccacgccgacggcacccagcaagtcgaattcggcaaaaagagcatcccccaaatgctcgaactggtcggcgcgtaagccgcacgacctcaggtactcaacagcaacaacaacgattctgccaaaatcgtgacgtacatcgactgatgcgatcgatgcgcccgactccggcagaatcgttgttttgcggcagctcagcctcggtcttcgacggccttcgtgacgtttctgtcgccgaggtacttgaccaggctgatgctgatcagggccacgacgaacaggccggtgattaccggaatcagcgcggcgtagcggtgggcctgatcaggcgcgtgggcaactacgaacgaggccaactggttgccggacagaccggcgaacgcccaggcgctcagcgtcagaccgtgcgtggtggagacggttttggtgccgaagtgctgatcaagcagcacgggcagcgtcgagaaaccgccaccatagcccgcgttgacgaggaacagcatggccagcacggcccacagcagagcgttgtcgatgctgttggtgaagatctgcagcaagcacacggcaatcgacatgatgaagattacctgatagacggtctcgcggcgcttcaggtggtcggagagtgtggagaagcccacgcggccagccgtgttgaacacggagtccacggcaagcaccagtccgatgatgccggagatggcggcggcaaacttggcggggctcaggttggcatactgcgggaaggccctgagcacatcgtgcaggatgtccttctcttggctgatgagggccaggccgcaggtgatgttgatatagaaggctatccagatgccccagaacacgggcttcttgaggattgtcttgcggctgacgtgtgaggtcgcgggatcgtacacccagccggccggacgcttgatgagcaggaagccgacgaacatcatcaccgcgtagaccgcggcgaggatgaagaacatgctgaccaggccaaccgtgccgatgagatattccatcagtgggctggcaatggccttggccaggccgaagccggcgacggcgatgccggtggcgaggcccttgttgtcggcgaaccaaagcatcaggttcttgaccggagtcagataaccgacgcccaggccgatgcccatgatcgcgccataacagatgaacacgcccggcaggaagttcagggcgatgctcacgcccgtgccggcgaagccgaccacgaagcagaccatggagacgagtgtggatttcttgatgtttttctccaccattggcccggcaaacgcggcggacatgccgaggaagaagatggcgagtgagaagccccattccacggaggcggggctggcgtggagacggtcagcgataagctgcttgaacacgctccagcaatagacggtaccgattgggatatgaatcagcagtgcgggaataatcgcgctggtccaacgattctcggtaaaccttgccatatatggacggatcctttcgtaactggtgtacgatgacctgccgacccgaacgagagtcgcatcgcccatatccacgcacatcacgacggcatgcccccgtgaaccatccgggctgcacgaatcgaatcaaatcgaatcgtgcgaactgcgaacaattcgctaaacatccttggtgtgcatttcatcggcgctgctggctcttgtcgacgccgacaaacagaactataacgctgttacggggttgccatggctggtttctgtggtcggaagctatgagctttctcacatcgaaaacagttatatgacggtatcggcgtgattgatacgtgacgtctgcccgtggacgcggcatatccctctcggaaaacaatgactccgtcatgtccatttcttggtttgacatgttttcgtttgcagcgtcggtgctcaccacggtgaccgcggcgttcgagtcgccgggcagggcctcgaccgagggtctcatcctcggctgagatgtgggcggtactatggattcttatcgataaggttcgtgatatgcggagatggtaacgatggtgaccttaaaggatgtcggcgaactggccggagtgaccgccaccaccgcctccgcggccctgcgaggcaaggattacgtcaagcccgaaaccacgcaacgcgtgtgtgacgccgcccgcaaactcggctacaaaatcaacctgtctggccggtccctgcgttctgggcggtccgataccatcaccttccttacctcgggcctcgagggcgactatttctcccatctggccatgtgtgtggctgaggaagtgcacaagcgcgactcgcacatgctcatcgaactgtcccggtatcttaccgacgacaacgatctgtcgtacacgttttcggacggcatcatcgccatcaatgcgccacgtgcggtcgatatcctgaagcggcacccggccgtcatgctggaaaactacgacaccagcctgcccatcgacaccgtgaacgcgccgagcgacgccggctcacgggcggcaatcgaacaccttatcgcgcgtggctgtgcgcgcatcggcatcgtcggcgacaatcacgatcccaacaatcccaacatcattcccggctcgcgtgatattcgtatgcgggccgccaaggagacgattctcgcggccggactgccgtttgacgagcgccgtgatttcatcaaatcctcgtggtcgattgacggcggtatcgaggccgggcgcggcttggccaagaaaggcaagtgcaagtacgacggtctgtactgcctgaacgacggtattgcgctcggtattctgcgtggtctggcggacgatggcgtaagtgtgccgggcgatgtgcgcgttatcggcttcgacggcctgagccagagcatgtacagcgtgccgactttgaccaccgtggccaccgatttcaagggcatggcggataccgcgctgaccttgcttatgcggcgtatcgagaacctggacgacgagttcttcccgcagaccgtgaatgtgggctataagctcatcgagcgcgaatccactgcggcgtagagtctttggccgtgttgagcttcaattgggtgattggactggcaccagcggctgatatcagatatgccgaaagcagcgatgatcggatttaagttgctggagatgacaggatggattgctctttacccctttcaccatcttgcaataattcttacatgtaagaactctctgttaacatgtaagaattattgcaagatggtgaaaggggatgctcatgttgccggccaaagaaagtttgacggttgagttcaagagcgagcagaagcgccctcaatcgcatgatgaaattgttgacaccgtagtggctctagccaataccgaaggcggcacactgtatctcggtattgaagacgatggcactgtgaccggcgtatgtgacgagcatcgcaatatcaatggacttgcggtactaattttcaataagactgttccgcagcttcccgctcgcgtggcgctcttgtatgagaacgaggtgccgatagtcagtattgaggtggataacagtcagcaaatcgtgtctaccagtcaggggaagacattgcagcgccggctgaaagcagacggctcgcctgaggtcgttccgctgtttgtttcccaattcattagccgtttatctcagcaacggttctacgatttcagcgcgcaacctgcaccagaggctcggttggacgatttgaatccagactcacggaacaagttgagaagccgtattcgcagtgccaatgcgcaaaactcgttgttgtcttttactgatgaggatttcgatcgggcacttgagctggttgttgatggcccgtatggattgcagccatctgttgctggtctgctcaccattggttcggttgatgctattcatcgatcggttccagccgcatcggctgtttttcaagtgatgaaaggcatgtctccaaaggtcaatatggatccgttcgtgttgcccttggtggatatgtttgatcgtgtaggcgagctgatggagccgtggaatcccagccacgaagtcatgagcggcttgattcgtgtcgatctgccagacttcgatcgaggggcattccgtgaggcaatgattaacgctttctgccatcgcgattatgcacgaatgggttcggtgagattcctgattgatgatgatgggttgaccatagccaaccccggaggattcatagagggtgtttccgaagataacctgcttactgcacaaccgcgttcccgcaatccgcagcttgccctgattctgaaagctgccggatatgttgaacgcaccggacgaggcgtggataccatctatgccgggtcgattgcggcgggtggttctttcccggattattcacagtccagtgctgaggaagttatcttgttcttgcgccgtgtggtacctgacgaggcattcgtaaccatgattggcgacgaggaacgtcgacgtggggctccattgccggtctggtcactgattgtgctctcgctgctgcgtgagcatcgtaggcttaccgtggtccaattgtgtgatttttctcatttggagcatcgacgcatcgtgtccgctgttgagaatctggtggaagctggtttggtagagggggtcggtagcgggagctctcgttcgtatatgctgagtgcccgagtgtacaaacgttcagaggggctggcgtcttacgtgcgccagcgtgacatcgatgccacccggcgcagtggccttgttctggagttcgccgaaaaaaatgatggtgtcgtcactacggcggatgtcatggatttgtttggcctgagctatatcagtgcataccggttgttgaagaagctagaggatgcgggcaagttgcgccgcgaggggaatgggccgtcatcccgatacgtgttgggatgattggcgcgcgtgaaagtaagttctttcatcacctttcaataattctttcatgtaagaactctctgtttacatgtaagaattattgcaagatgatgaaagatgcacacaaaacggggaagctctgctcgatgtgagcggggcttccccatatgcgctggtgtgtagatcagcctgtgttctgcaggccggcagcaataccggagacggtgcacaggatgaggtagatgaatcctgcctgctggctctgcgtgttttgcttcaatttttcttaagcagagtgagacccatcgtatcgttcgattctacgacgaacgttttgcatcaagcgcagataatgtggtgagtgcatattcaacaatggcggacggtcttgatgcacttggtttgacaaatattggaatgagcgaaagcatcctaaaaaaggctgccggtacagacaagcttcctgataagcaggaagctgaagtgagtgctcgggcgttcgctgcattcattgatcagccaagacggtagctcgcataatgcattatgtgtgggcagatgtgtcgtctgcccacacattcgctgttgtgctttcgatttggaattcctctgccagatacggggaaacttctaaaaggccgctatgccgaggaagagtcctgtaataccggtggccatcaatacgatgatggtgatgattccggcgaagatgcgtacaggaagggtttcttttccatggtttgatgggctgtccgcaactaatctcattacttcagctgtaacccagcaaactgcgcccaggactagtgccaggaattctcggcaccattccgtttcaagtgcgggaatgccgacgattgatgacgggtcgcttgccagtcttggcggaatagcgcataggatacgctccaatatcaggtaaggggtatcaaaatggatcagagtcaaagcgaatgggagctgtagcgccagtcctatccaccacagcgtgcgtcggatggtcgcgagtttgtcgcccggcctagtgtctggcttgccgccttcgccctccgtcccggcaccgtccgcgggcgtgtggtccccctcgtgcgcgtccgtcgtcccgtccgtgtccctttccgcgtccatatgtccccctccgatcatccgagtctgtcgctcggcccgcgcgcccgttccgtgcgcgccgtcgccggccagtctagggccgtgcgacgcgaacggggaggcccgcgccgtcaatcggcacggaacctccccgttcgtcaagcggtcggacagccgcggatcagcccgtgttctgcaggccggcggcgacacccgagcaggagtgtcacaaagcccctgccgctctgggtacccaggtggcggtttatgaggacagcatcggtcaactcatcctgcagtggcttcgcaaacctgagtactggtcggaaggaagttccggcacgcaggcactatggcacgcgtacacacctgagccggttactcccagcgaattggccttgtcgcgtcaggcatgcggtgtcgcatgtgatgcgcaacctgtcatcaaaggcacgctgcccaatcgggacatcgcccatatggccgccacgtccctgggatacttgacatggggcgttacgaacgatccaatggactatggtctcggtgatctgggcggatgggccctggatttgctgcagatttggggaagctacctggcgaatgccccggaagaggacctggcgtcatggctgcacgctcatctcggcgagcaagacgcccgtatgggattcagttacagcgatgttctcgcggactgtgatgcatggttgctggcgcggtccatgcagagcaattcctccgaaaggtctttgtccaccgctatgcgggacgctttcgcgcactacttaagatttgggcaggcctgttcgtttatatatgcattgtaagtatgcctaaaaaaagaagaggcaaagatacgcagagcatgaaaaatgacacaattccgattacgacatgtgaagccatcgacgtatccaagtcgggcacattgggatataagcttcgaatgacggatttcacacaagaaacaaccggtatcatcacccaacagagaaaacctaagcccagcactgctgtaagtctggagccatacgtattcaaatcactgcagggtgggggagaaagtgtcaacacgctgcaaacgaggctgtaattatcgcgttcagcccatgtcattactgctggtgaaagcagcagtaatcccagccaccatagcacgcgtctggccttgcccaaagccacatagcatctactcgccttagggaatttggtagctgctgctttcggtgccaaagcacatttctcgccggaaaaatcttctgacatatcttctgtgccgtgtttcttcccaatgccatcgatcataaccggattcgctttgcaagcgtggtgttcgttcccggcgtcgtcctccgccttgatgccgtccgtggacccggtgttcccgcgcccgtccgccggcttgtccatgtcccctccgatctgtcgaggtgcccgttccgcgcgtccgttctctgcgcgcccgcccggcgtgcgccgtcgccggccagtctagggccggatgacgcgagcggggaggcccgcgccgtttatcggcacggaacctccccgctcgcttttgtcggtcggtcggccgggaatcagcccgtgttctgcaggccggcagcaacacctgaaacggtgcagaggatcagatagatgaatcctgcctgctggctttgcgagagctcttccttgtccaccttcttgcgcagcgacttgagcgccagcacctgagtgacggacagtgcgtccacgtatggggagcggatgcggatggcctggccgagcacgtggcggtgctgcagcggccacttgtcgcccacgatggccagaacccacttgcgggtgagctccatctcgttgagcaccttctcattgaggtcctcgcggtcgccgagggcaaggtacatcctggcgatgcgctcgtccgtcttggcgatggacatctcgatgttgtcgatgaacgtggagaacagcggccattcctcgtaagcctgacgcatggtctccagatcgccgaacttctcgcatgcggtgccgaggccgtaccaagcggccaggttgatgcgggcctgggcccaggagaagatccacggaatcgtacgcaggtcgtcgagcgacttggcgccgaggccacgcttggccgggcgggagccgatcggcagcaggccgatttcggtcagcggcgtaacgatcgagaaccacggggcaaagccgtcggtgttcaacaggtcgaggaagcggttgtgcgcggcctcgtcgagctgagcggccatgtcggcatacttctcggtcatctcggtgttgcgcttctccacgctcggcgcggactgcagcaaggtcgccgcagccacggattcgacgtggcggatggccagcaccgggttgccgtaacgggcgaagatgacctcgccctgctcggtgagcttgaagcggcacttgacggaaccgaccggctgggcgagcaccgcgcggttggcggggccgccaccacgaccgacggcaccgccgcggccatggaacagggtcagatcgatgtcgtgcgactcagcccacttggcaatgcgctcctgagcggagtgcagggccagcgtggcggaggtcgggccggcgtccttcgaggagtcggagtaaccgagcatgacctcgagcttgttgccggtggccttcagacgagcctgaacctcggggatcttgatcatttcctcgagcacgtccaccgagttctgcagatcctcaagctgctcgaacagcgggatcacgtcgatggtgggcacgtcctccgggtgggagaaggccaagcggttgagctcgtagacatccttgatgttctgggcgctcttggtgaaggagatgatgtagcggcgggcggccttgaggccgttgcgcttctggatggcaccgagggcgcggaaggtgtcgagcacctcgtgcgtcatcggctgcagttcgccgcgctcgccgtgcaggccgtgctcgcggatatccgcaagggcgcgggcgtgcaccacggagtgctgacggaactccatctccaccatgtggaagccgaaggtctcggtctgccagatcagatcctgcagcgggccgtaagcggaacgcttggcgccggcggcggccagcgaacgctggaccaccttgaggtcggcgaggaagtcgtcgcaggagtggtacatgaggtcggcatcgcgctcgatggtgtagtgcagacgatcggccatcaccagcatgaccgcgcggtgcatctccttggtggagatcagggcggccttgtcggtcagacgctcgctcatttccttctggtggctccagaggctcttgagctcggcgctcggcggcgtggtctcggcttccatcgtgaggttgcggcccacggtgcgggtggcttcctcaagggcggcgatcacgtgatcggagaacttgcgggccacggcgcggctcaccttggcggtgacgttcgggttaccgtcgcggtcggagccgatccagctgcccgggtggaagaacgcggggcaagcgggctcgacgagaccggccttatcgcccaggacccagtcgtcgaagcgacggtagaccttggggatggtgttgaacagcgtgttgtcgaagatgtcgagaatcgtgtccgcttcctcaaccggggtcggcttcttcagcgcgatcggagaagtgcggaacagggcgtcgatctcgttgtagagacggcgcaggcattccttcttatccgagccgccgaggcgcttgtactcctcaagcaattcggaaacgcggcgaatcttgccttccacggccttacgacgggcctcagtggggtgcgccgtgaagacggggtggaattcgagctggttgagcagttccttggccttggccgggccagtctcattgatgagctggtggtaggcgacggtgagctcgttgatcgggtcgaccgcctggtcaacggacacgttgttctcgcgctcgtggagcacggaaacacggtagttctcctcggacaggtttgccagatggaaatacgtggcgaatgcgcgggccagcagctgggcgtcgtgcaacgtcatgttgtcgatgacgttcacggcctccttcaggccatcctggtcggggttcggatccttcagctcggcgaaatgctcggcgctggcctccaccgcgtaatgacgcacggtgtcgaacgtagacagcagttcggggttgtattcgcccagtacgttacgcaggatctcaagacacagatccatgtcgtacttcaggctttcgggaagatcatgctcctccgggccctttcggccggtcccggtagtgacgatggcggcgtcagcgggagtgatctgttcttcaggtgttgccatataacctcctttgccgaataacaggttgctcggtctaccggtcgtctgcggctcctccgcagttgttgaggccagtcgttgcgagcccacagcccatattcaacgtggttgttgtgtgggcaatagtgtatccccgcgaaatcgctatttgcgttacggagtccatatagtgctccaagttgtccacctatagagaccgaatatcggacagcatatgagacactgtccgattcgcggaagatttgagcaccttacgattgctggcgggggaggcagggagtagtaatgagggatgtgagcgaacagaagaaaaaaagtgcgcccgaagcgaaaggcgcaacggctgtacgtaaattccacacccactccattccgctggacatggaagatattgcgcgcgattgggaaaaaccggtggtggacgccggtatcgccgccaaagccagcgtgattgtacgggtcggcatgctggacctgggagccggcaccggctccttccgcgtgcgtgaaatgatgcaccgcatcgcctacccgctgggcgtgcacgtacgcgccgacgtgaacctgacggatatcgaggccacctgcacggatggtcgtaaccgcatcaccgaagtcgtggatttgccgaccaccggcgtgaacaccgaacgtatctggctgctggaacatttcgccgactggttctccgtgaatctcggcaaggggtcgatgtatcacgtcgattcgcaactgtccgatggcgtggtcaagcatttggacgaacgtgacgcttcgcagtattcggccgatctggccaagcgcctgcgcgaacgtgccaaggccgaggctgaggcggccaacggcagcgtggacgagacgctggatcttgcgttgaaaaccaaggtactcgtgacctccgtggccaagtccttggatgatgacaatggagaagcccaccgacttttggcggacagcgcggaaatcactccggtcgaagacaaagcggccgaagagaaggcctacgacgatgccgaagtgtttaccggtgactccaatgagtcggttgaatcggcgaacgcggcgaacggcgcaaccgccgaaagccctgctgcaagcagtacgaagtgcaagaatcgcgtgcccaaggaatacgccgaacacttcaacgagcgctccgacgaagagaaggccaagggcggtatcaccgtgcggcaggcgcacgagcggctcgatctgattgagcgccgcaagccgctgtacaagccgtggttctccggtctggcctccgccctggcctgcgcggccttcgtgttcctgctcggcggcggcccatacgacatgatcggtgcgttcgtgggcgcgggccttggccagtggatgcgtcgccggctgtttgcataccatctgaaccagttcttcgtcacctttgtgtgcgtggccgcggcggcgctcgcctgcaccggcaccctgcgactcatcggcattttcgacccagtcgcgctctcgcacgatacggcctacattggcgccatgctgttcgtgatccccggtttcccgctcatcaccggcggactcgacatggcgaaaatcgacttcccctcgggcatccagcgcgtggcgtacgtgctgtgcatcatcctgatggccacgctggcaggctgggccgtggccgtgatggtgcacctgcacccggaaggctttgaaccgctggggcttgacccgtgggtcaacggattgctgcggttcgtggcggcgttcgtcggcgtgtggggcttctccgtgctgttcaattcgccgcagcgcatgtgcctggccgccgccctgatcggtgcgatcacggacacgctgcgtctggaattgcaggacttcaacgtggcacccgagatggctaccttcatcggcgcgttcctggcgggcattctggcatcggcgtggcgttcatccgtgcgacgtggctggctaccgccgcacctcggctacccgcgcatctgcctgaccgtgccgtcgatcgtgatcatggtgcccggtctgtatatgtaccgtgccatgtggtacctcggcagcttccagaccatgaatgcgctggactgggcgttccgtgcgttcatggtgattatctgtctgccgatcggcttggcgatggcccgcgtggtgaccgacaagtcctggcgctacgacatctgaccgtcatcttggctcccctcaggtggggagctcggataaaacagcgtctcagtatggaaacggtggaaggtgcttgagcccttgtatccactaccatcaggcgaagtgcgttgcggccgtattcacggctgtgacggtctgtatgacgccgctccggcgtcaatcgcatatcagcacgcatatcagcacatagttctgccatggcggtagccgcttggcgtcatgattggggaggtgtcgcagttgaccaacgatttctggattctgctggccatggtcatctattttgcggccatgctgtccatcggattcatctactccaaacgctccaactcctcttccaaggaatactttgcgggcgggcgcggcgtggggccgtggctcacggccctgagcgccgaagcctccgacatgagcggctggctgctgatgggcctgccgggcctggcctacttcaccggcgcggccgacccgatgtggaccgccatcggcctggcgctcggcacctatctcaactggaagcttgtggcccggcgactgcgccgctactcggtagtggccggcgatgccatcaccattcctgacttcttcgccaagcgtttccatgacaagaagggcgtggtctccaccatcgcggccgtgatcatcctggtgttcttcagcgtgtacgtgggcagctgcttcgtgaccgtgggcaagctgttcgccacgttgttcggtttcgactaccacgtcatgatgatcatcggcgcggtggtcgtgttcgtctacaccgtggtgggcggctacttgtccgtggtgatgaccgacttcattcaaggcatgctcatgttcttcgcgctcgcggtggtgttcatcggcactgtggccagcgcgggcggcatcgacaacaccgtggaattcctgcgtgccatccccggctacctgtccggcacgcaggtggccgcgcccaagctggacccggccaccggccagcagctcgtcgaggcgggcaaggccgtgttcggcgcgccctccgactacggcatcatcaccatcatctccatgctggcgtggggcctgggttacttcggtatgccgcaggtgctggtgcgcttcctgtccatccgcagcgtggaagaagtgcgcaagtcccgaatcatcgccacctcctggtgcgtgatttcgctgggttgcgcggtgtgcatcggcttggtggggcgcgcgatgatgcccaccgaactgctgacctccaccgatgcggaaaccattttcatcgtgctggcgcagaccctgctgccgagcttcatgtgcggcgtggtggtctccggcattttcgcggcctcgatgagctccagctcctcgtatctgatcatcggcgcttcggccatgggcgagaacatcttccgcgggctgctgcaccgcaaggccaccgacaagcaggtcatgatcgtggccagggtcacgctggtggtcatgttcctgttcggcattctggtggcatacgaccagaactcgtcgatcttccaggtggtgtcttacgcgtgggccgggcttggcgcctcattcggcccgttgatgctgtgctcgctatactggcgtcgcgccaacaaggccggcgccgtggccggcatgctgtccggcacggcggccgtgctgatctggcacaacctcgtcaagcccttgggcggcgtattcgccatctatgagctgctgccggcgttcatcatttcgctgctgttcatcgtggtggtttcgttgctgaccgccaagccgaacgagcgtatgctctacgaattcgaccactacatggacgatccgctgcccggcaccctgccgtccggcaccgtgctcgtcgacgagcccatggaagccatggagtccgaggtccgcagcggcaaatgacacgtgcctgctgtgcggtcgcctcgtatggcagaggagtggattttttgtggttcggcaggaaccattgagaccaaaacggacttcgaggggctgatttgacgttctggagaggtctacttccgtttcaaggggctgatgcctgagtagacgcggctccaaaacggcggaatggcgttggcgtaagggcattgatacacgtggtctagcggatgatcagccccttgaaacggaagtagacctccggcggaggccaaatcagccccttgaaatgggttttgaataccgtagcgcggtgcggacggtgcggactgactctaccgggcttattattcctgcgtcgtcggaataattggcagcagaggctcgaatttcagccgtttgtacagcggaatacggcgtagctttcggacatcgctaatttgctgggtggtttgccgcatcgtgagctggaccgttttgcccgtaacctcctgtatcctttcggcaactcttcgggcaagggcctcttctcccgcttcgttgccaatatctaatttggtgacttgaatgtacttccagccagcgtcttcgatcatctggcggcgtctcgcgtcattcagccattgcccggcatgatgagagccttcgtattcgatgcataccttgaattcagggtatgcaagatcgagatatatgggtctggtgttgtttcctacgaatattggataattcacctgcgggcaatccagaccgtatttcaagagaaccaaacgagttcgtgtttccatggaggaatctgtgcccgcgcgcgccaagagcagggcgcgacggcatttgttatacccgcggaacaaatacgaattggtgccattctctttgtcggctcgcacctgggcctcggcctcatcgagatacagagaaagggcgtcgatggttgttctgcagagccttcgatctcgtcgcatcatggaatcagcgagaacgatgagttcttcaagttcgagatacgcggagaacatggcccatgtgcaagctggtgaagtgcatgtgaattgtccctcgattatgaccgtgtctagtgggaaaggccatacaaccactttgacccccacaatgtgccgtttgtcattggcgtgtggaaccgcaacaatggttgtagttgcaaggcctctgtgtttgcttgatatgcggggtacttcaattgacaaaagctccaatgctgttgtcagggcatagggtgggtgccatgcgcttcgtcgttgaacatctgcgcacgtctgcattcgttgatacttctgcattgtcagctcggtcaatgccgttgagctacccatgatgatcactccttcgtgatgttcgctttgtcctcgcagtgtagggtccggctaccggccctgtctaccgccccaatttttcggtggataaatgtggataagtcggtggataaactatgggcgttcatcgcagttgcaggcatcccgcaattacatggaacgtaggggtttgcaggcagccagcgggaatcgccgccgacggcgcgattcagcttgaacgaatctccatggcgttcatgcaaaggtggcatgatggcgggtatgagtagcttggtgcgtattgtcaatgccggtgttccggggtctcagggccacgtggatgtggtgcttcgcgatggggttgttgcgtctgtcggccctgctggaacggtctcggcttcggacggcacgatgcagactaaggcgcatacgacatcgttggcatacgcgacgaatgccattgcttctggcagcgtctcaatcccaacgtcggcctccgcacctgctgacgaaaccaccatcgacgccgacggcctgtgggttattcccggcctgtgggactgccacacgcacttcacgcaatgggctaagacgctgggccgactggacctcatcaatgcccgttccgccgccgaagcgatggacatgttgcgccgtcatctggatgagcgccgcgccgccggcacgcttgacccagatgccttcgtggtgggcatgcgattccgtcactcgctgtgggccgacgacgagcagcccacactggctgcaattgacgccgtgaccggcgaacagccggtggccctctccagcgcggacatgcactgcggatgggtgaactccgccgcggcccgcaggcttggcgtacatgtggacgaatccggtctggtcggtgaactcgaatggttcaacgcctacaccgccttcgacaaggtgccgggcgctgctgaagagactgaccgtctgctgcgcgaggccgaacaggacgccgcaagcaagggcgtggtgggcatccgcgattatgaaatggccgaaaacatcgatacatggaccaatcgtttcgcggccggcattaacggtttgcgcgtggacgctggtgtataccccgagcggttgcaagccgccattgacgcgggttggcataccggcaacccactgccgggcagcgccgggctcggccatgtgggcgccatgaagctcatctcggacggatcgctcaacacccgctccgcctactgctccacgccgtattcgggcatcgagccgccgacgtatggcacgctgagctacacgccgcagcaaatcgaagactatatgcgcctagccaccgagcatggcttcgacatcgcctgccacgctattggcgacgaagcgaacaccattgcgctcaacgcagtcgccgccacgcacgcacatggatcgatcgagcacgcacagatgctcaaacccgtcgatatcccgcgtttcgccgagctggggctcacggccagcatccagccgcagcacgccatggatgaccgcgacgtcatcacccgtttctgggccaacccggccggtatcccttatccgttcagggccctccacgacgccggtaccacgctgcgcatgggctcggatgcgcccgtggccccgctggacccgtggctggccatttccgccgccgtgttcggctccgaaagctctgaccgcgagccgttccagcccgagcagtgcctcgatgtgcgcacctcgctggcagcctcgaccgccactggccgtgaccgccttgcatccggcgacccggccgatatggtgttgttggacgccgacccatacgccgccgatactccggaagccatgcgcgctatgccgcaacacgtcgtaatgacattgctgtgcggggagcgtacgtattgatgcaagccatcggcatgaagtgaccagaggtccgtcttgatagccgcgttgcacggaaaacatgttgtgttttttgaattgagagttactaacgcttgattctccgtttcaaggggcggatttgagcctttccggaggtctatctccgtttcaaggggctggtcatgcgctcaatctcagataaaatcccattcacgccaacgtcattccgccgtttttgtgcctcgcctacttgagcaacagcccctcgaagcggagatagacctccggaaaacaagaaatccgcccctcgaagtgaagataggacacagcagacgccgcaatacaaaaaacgccgtgtcagttgcccagttggggctgacacggcgtcttgctacgagcggcgggaaaatcagtacttcatgcccatggcctcgcgcacctggtcgagggtctcctcggcgatggcgttggcgcgcttgttgccgtcgtgcaggatgtcacgaatggaatccatgtccttggccagctcggcgcggcgctcgcggtgcggggccaggaactcgttgactgattcgatgacgtatgccttgagtgcgccggcgccggaatcaccgatctcctcggcgatgtccttcgggtcgcggccggtcaccaggccggcggtggtcagcagggcggagacctgcgggcgggcaaccgggtcgaaggtgatgcggcgctcggaatcggtcgggctcttcttgatgagcttggcggtttcctcggcggtggcgcccagcatgatggagttgccgtacgacttgctcatcttgcggccgtcgagacctggaatctccggtgcctcagacagaatggcggccggctccgggaacactgggttcttcttggcgtaacgctcgttgaaacggcgggcgatggtgcgcgtgatttccacgtgcggcaggttgtccttgccgatcggcacgacattggccttgcagaagaggatgtcgcacgcctgatgcaccgggtaggtgagcagcaggccggtcaacgcgtggccggacgcctccatctcggacttcacggtcgggttgcggtgcagctcagcctcggtgaccagggacaggaacggcagcagcagctggttctcggccggcacggcggagtgggtgaacatcatggtcttgttcggatcgatgccggcggccatgtagtcgagcaccaggttcagcacgttgtcttggatgtgctcggtggtgtcgcggtcggtgatcacctggtagtcggcgatgatgatgttcgtgttgacgccgcgctcctgcatggcgacacgctcacggatcgagccgaagtagtggccgaggtgcagccggccggtcgggcggtcgccggtcaacatggtgaaggacgacggcttggcctccagcttggcgagcgtttcgtccgaacgctttttggccgcgaggaagctcgcgcttatctcattgcctgccgctgtcagttgctgctcgtcggtcatgcgaaaatcctttaaatagggctcagataaacgctttttatggtaaaagtgtgagccgacaacgaacaagccactattagtggtactctctattgttgatgaatcgaacagcacagtaatcgcagggggtcagatgggccgcggacgtcaaaaagcaaaacagcagaaaattgcccgaaagctcaagtacctgaccaccgataccgattacgatgagctggcaaaagagctgagcgagcaggagccgggaacgggctctcctgacccgttcgccgatattgatgatcagtatgcggacaaggatgtggattctgctgctgacgccgacgccgccaaggtctcgcccgccgcgcaggaggacgacctcgacgagtacgccaagtgggcagccgaagccgccgcaaaggcgaccagcggcgagttcccggcctccgcgccggccgcgcccaagccgaagccggccccacgcaagccgattccgatgcccatgccctcagcgctcaagccgaagaagagctaagcgcacataggcatatgccggatatcagcgggcaggatgggccaaggcccaccatgctcatcatggacaacgaccgcatggccctgatggcattacagtcgattttgtcgaaggccctgccagacttcgaattgttgccgccggtgagcgaaggcagcaaagccattcagctgtgcacggccaccaaacacccgcctgctgtgctattggccgatatcgcgatgaacgacatcaatggtccggatgtggtgcgtgcaatccgcagggaaaacgcgaccacggcgatactggccattaccgcctcgattgtgggccgacatgcccaggagatggcccgggccggcgcacagggcatcatgagcaagaacgatgatgtgcgattgcaggccgtggctatccgccaggtgcagaccggcaaaatatggggcgatggtggcgacgtgcggttcgagaccgcggccgttgcgtccgcgcgcatcaaggccgagaaggacaaccgtctgagcgcgcgtgagatggaggttgcggaactgtggtcccgcggccggaccatgccgcagatcgccgccgaactgtccatcaccgaaaccaccgtgcgcacgcatctgatgcgtgcggccgacaagctcggcgctggcaatctcaaggaacttatcggcgcatggattcgcatgaacctgcactgatgaaggcgccgatgggtgtgtggggacacggtagaagaagcgcaaggcgcataaggggagcggcccggtgaaacgtccgattatcatttcgcggcattcgtcgtattcgtatggtcacgccgacggcaagaagcatcatcagattgatatcgatatagaactcaagcatccgctggcgatgttcggcccgatcggtgtgcttgcggtggcggccatcgtctatgcggtgaccgggtcgtggctggtcacggcgtcggcggcgttgacggcaagcgtgctgctggtattactgggcattgcgttgcgctggcgcaagcgcgtggtgaatcaggagaacgaaaacgagcagatggaatcggcgctggccgatctgcgccacggcaaccagctcgcgatcgaactgcacgacacgctgtccaacgatctgacgtatatctcgaccatcgcccggaataatctggccgcgccagccggcatcgatggtggcgactggcagcgcgtgctggatcgcagccaacgtgcctttgcggaagtgcatggcatcatcgattttctgaccgagcagagcggaatggacgccggcttccgggacgagtccttgccggtcggtggcaccgggacatctgaggtggcgactgcagaatcagggcaggttgattcgccgacgaaagaatccgccctggctcgtgacccggtaggcgccgggagctgtccagcgattgcgaatgaggtggttgacaatgccgtgcccgagaacgccggtggcgatgaccgtacgcaatccacagcgggcatgccgcaatccttcgtcacgcgtgtgaaggcgcagatcaccgataccgaggagtttctggaggcgcagggctatcgggggacggccgcggtcaacggcatcgccatggtcgtggaccccgaggcggcggccgaggcgctgtcgctgatgacggagatcggcacgaatatccgccgccatgcaccggcgggagatgattcctatctgctgttcgtcaccctgtctcccgaatggattgagattcgcgagaccaacgatatccgtgacgatgccgacgcgcagagtggcctgtccgcgcaggagcggtcggggcgtgggctggccatgcatcgcacccgtgtgcaggagttgggcggtgaattgaccacccgttcggatgatggcgtatggatgatttacgtgcacattccatgcgtgcggggctgatggggcagaagctgcgatgtccggcgtccggcgctgattgtgccctgtcctcacaaatgaggacgacgaccgcagccatgtccccataaccgaggattgcgggtgttcggctcggcggcggctccctatggtggcgtccataaggaccaatcccagggaggacaacgatggcaagtgatacggaattatggcggggaactgattacggatggtggctggctgcggacacgtccggcgcggtcggtgccagcctgatcgcgttcgcggtgccgctgatcatgctcgccacgacaggatcctctgccgccgccaccacgacggaaagcatctgcgtggtggtgcagacggtgctgggccttgccggcggcgtgattcaggaccggtatgatcgccgtacgctcatgctgatctggggtgcgtccggtgtggtgctctcggcggtggcggcggcagcggtgatgctgttcggcaatgcgccgaagacgagcggccatggggttaacggggcaaacgctccggcattcggcggaccctatgcccacgtgcttccgatcgcgctgctgtgtatcgtcgtgctgttttcggtgcgcgatggcctgttggagaatacatcgaatgccatgctgcgtggcgtggtgccggatgagcagctgcctcacgcgatggcgttgaacgacgccagggattcgacggtcacgctggcaggcgggccgttgggcggtctgctgatgaccgtgggacatgcggtgccgttcctgaccagcgcggtgctgagcgtgctgggcatggtgtccgcatggcgtatccgccgctattggaaacgtgcgactgtgagcgatagcggccgtccgggcaatgttgataccggttcggaggtcggggccgtctcggacgccgatgatgccgatgactccgccccacgctggcgcgacgcactggacggcatgatctggctgctgcgcgaccggttccaacgccatctcatcatcgcagcggccatggtgaccggtgccagcaatgccttcctactgctgaccgcgctggacatctcccaaggtggcagccagctgatatccgccggatccatcaacgccgcctccgccgttggcatgttgctgggcgcactggtggcctcgcaactggtcaaccgtgtgcccggcggcgtactggtgggtgtgatgttcgtcttgctggctgtaggattcaccggtgccgcgttggtgccctccatagttggcaaggccatatttgtggcctgctcggtactggcattgcccgcgggcaacgcggtgcttggaggcctcagcaataccttggtgggcaaggacaagctcggccgcgttggagcgggcagcatggtgttgcagtacggtgcctatggcgtggccgtggcactcgccggctggggtatgcagaccatcggctacggtccgacctgcctgattctggccaccgtactggtagctgccgccgcttacgcgctgacgatgcgcagcctcatcaccctacccacgccggaccgctgggccgagcacatccagcgttggagcatcgcacagttctgataaagggcatccgataccgggcatccgacgatttacagcggcagcaggtcgctcagatcgtcgcgctctccgaccgcgctgatgtggccggcgtccttttcctctgcccacgtggtgatgccgcaggccagccgtagccagacctcgggctccagttcgatgacgtccggtggagtgaggttgtgcgggtccgattccgggccgtccaggattttgaccgcaccccacggcgcaacgcgcacctccacgccagggccgggcgcgcgccgctccagcaggaacagcgagtagcgcacagccatcgcccacaccgggcgcggcagaacgggggaggtggtcaggcgatgtggtgtgttgtcggccagttccagggctgcggcacgccattgcaccagtgcgtcgtgccctcgtttcaagtctttttcgagaattactgccatatgctccatcatggcaccggcacgcgaaaccgcaaggtatgcaaacgatggcatactgtaggatgcggaaccgtgagatatgtgatacgctctcaatgagaacgtatgcaagaacgctccgccatcgtcgttacggagagttcatgcttacgtctatgcgacgatacctatcgcgcggcataataaacacgggcacttatcccggaaggaaagtcagaatgaccgaaatcaccgcaccgaagtctcctgtcacggcggaacaattcgccgacgagattcgtgaacaactgaaatacactcaaaacgtcaccgccgagcaggccacccctgctgacgtgtatgtcgccgcgtccaaagccgtgcgcaaccacctcgccgactcctggttcaagacccaggccgacaccgtcaacggcaacaccaaggccgtcggctacctgtccgccgagttcttgatgggtaagcagctggagaacgcactgctgaacgctggcctgaccgaccagttcgacaaggctgtggaagcccttggcttcaagccgaaggacatcgtggacgccgaatacgagccgggcctcggcaacggtggcctcggccgtctggccgcctgcttcatcgactccctcgcctccctcggcgtgccggccttcggctacggcatccagtacaagtacggcatcttcaagcagaagttcgacgagaacggcaagcaggtcgaaaccccggactactggctggccaacgaagagccgtggggccacaccgactacaaccgtgatcagaaggtctccttcggtggcaaggtcgtcgaaaacgccgacggcaccaagacctgggaaccggcctggtccgtgcgcgccgtgccggtggactacatggttcccggctacaagtcccagcgtgtgaacaccctgcgcctgtggaccgccaagagctacgacgagttcgatctgctcgccttcaaccgttccgagtacatggacgccgtggccccgcaggtcaaggccgagaacatctccaagattctctacccggaagactccaccaaggtcggtaaggaactgcgcctcgagcagcagtacttcttcgtctccgcatccctgcacgacgccatccgcgtcttctacccggggcaggacaagccggacctgacgaccttcccgaacaagatcgtcttccagctcaacgacacccacccggtgatcggcatccccgagctcatgcgcatcctcatcgatgagtacggctacgactgggataccgcgtggtccatcaccaccaagaccttcaactacacctgccacaccctgctgccggaggcccttgaggtctggccggccagcctgatcggcgagctgctgccgcgtcaccttgagatcatcgagaagatcaacgcgcagttcgaggccgagctcaaggccaagggcgttgccgccgacaccatcaaggacatggccatctacaccggcgacgccgtgcgcatggcctacctggccacctacggcggctcccacgtcaacggcgttgccgagctgcactcccagctgctcaaggacgtcaccctcaagaacttctccgacgtctacccggacaagttcaccaacgtgaccaacggcgtgaccccgcgtcgcttcgtcaagctcgccaacccgcgcctgtccgacctcatcaccgagggcctgggcaccgacaagtgggtcgccgatctggaactgctcaagggcctcgagccgctggccaaggacgatgagttcgtcaagaagttcgccgccgtcaagaaggccaacaagcacgcattcgtgggcttcgccaaggaccactacggcatcgatatcgacgagaacaccctgttcaacaccatggtcaagcgtctgcacgagtacaagcgccagtctctgaagattctcgccgtgatctccaactacgccgacatcaagtccggcaaggtcaaggccgaggacatcactccgcgcaccgtgttcttcggtgccaaggccgctccgggctactacctggccaagatgaccatcgagctgatcaacaacgtttcccgcgtgatcagcagcgatccggccgtcaagggcaagctcgccgtccacatgctgccgaactacaacgtcgagatggctcagaacctcatcccggccaccgagcttgacgagcagatctcccaggccggcaaggaagcttccggtaccggcaacatgaagttcgctctgaacggcgccctgaccgtgggtacgctggacggcgcgaacgtcgagatccgtgagcgcgtcggcgccgagaacttcttcctgttcggcatgaccgtcgacgaggtcgagaagaagtacgccgagggctacaatcccgcctcctactacgaggccgatccgcgcctgaagcaggccatcgatctggtggccgacggcaccttctccaacggcgaccgcaacgcctactccccgctcgtggccgactggctgaccaaggactggttcatgaccctggccgacttctccgcctacatggacatccagtccgagatcgaagccctctacgccgacgagctcgaatggaaccgcaaggccctgctcaacgtggccaactccggctacttcagctccgaccgctccatggaagactatttggaacgtatctggcacactgctcctctggcctgacggccgccggagcagcgcgccggctacgtgctggtttctgcctcgcggctgtcgccgctcggcgtcgcctacgggaagcccgccgggcttcccgcttaacggctccgcacatctggcgcactgctcctctggctgactgagtcggtggggcggctcccctcggagaggggaaccagaacataagaagccccgcaaccgacatccatcggttgcggggcttcttgcgttgaaagaccgccctatcaggcttcggccggggcggcttccgcctcgccatcggcctcatcctcggccttgttcagacccaggtcgaccggcgaggagctgttctcccacggctcctcccacggatcgtaatctgggttctgctgcttgtagatgtacaagccaacaagcgcggcgagcaatccgccgaacagcagcgcgaagaacttccaaccgttagaagacttgttctccatgacggctcctttccctagggatcgtctggtcggtatgcccattcagaccgactctgctccctattctaggccgctgtttgtgacgattgggtggaatgacattcgtgggcgattcatccacgcccgcatgccctcggccggctcagcatcttcgcggcgcgtgaaacgcatccgagaccttcgatacagtggattgcatgcatattcctacacaacgggagattcgataccagtgggagcgcggtggtccggtgatgacctgggcgctgattggtgcgtgcgtggcagtgtggctactggaggtattgctgggatttattgccccgggcctgagggcttggttgatgtacctcggcatggcggctccggtcagactggtggctgagccgtggacgctcatcacctcgatgttcctgcatgcgccgaactcgctattgcatatcctgttcaacatgatcgccctgtattccgtgggcccagtgctggaacgaatgatcggccactggcggttcttgggactgtatgtgatttccggccttggcggctctctgggacttatggtgtgggctgcggtggctccgggaggcatcggctggcagatggcagcctatggggcttctggagccttatttggcctgtttgcatcattgctggtggtatatcgccgtatcggcgccgatatccgctccatgttgatctggatggcggtgaacttcgccttgccgttcgtggtcgggggcgtggcgtggcaggcgcatgtcggcggctttgtagtgggtggaatactcacatggctgctggtgggtggtgtgccggcgtggcgaggtaaaagcctgaaatggcgtatgcaggtttacggctgggccatggtggtgctggtcgttgtgttgattctgttgtgcaatatggccaatccttacgggtggatgagtttcggctccctgcactgatatggcttgatatggctgtaaaaaacgattgatgccgggtattgcggaacatgcagtgcccggcatcagtgtatgtacggaaagcggcgatgtggatattagcgatgtggatatcgtcattcggtgagtgggcatgcgctgtatgaaggtatccacagtaatgaagatatccacagtaatgagatgcgcgcaatgacgagttatccacgataacgagttatccacaatggtgacttgtgcacaagtgtgtagaaaagtgcataagactgtggataacttatgtggataagttaggaatgccgcggtattactgggtttgttgcagtggataactcgggtgtataactgttccctcgctgtggcgatgtatgccaagccaaagttatgcacgagatatacaccgagaaacgccgcttatccaccacttatccacatggttttccacattcggtggaaaactacatgggtgtgattcatccacaggctgtggataacgtagtggataagtcgtggataagtggtggatagctgtggatgaacaggtgaaggcacgaaaaaggccggcctccgcatacgggaggtcggcctttcgcataagaactaagaacaacctaacgatagaaaaaacgatctaccgatagataagcgcaacgagtcggaactcagcgccatcccatcgtcatcaggaatccgatcatgatcagggcgaagccgatgcccaggttccacgcgccgatgttcggaatcggccaggagccagacggggagaggtagtacaccacacaccaaatcaggccgatgatcataaacgcgcagaacagcggcacgaaccaacgcgggttcgacttggtgcccttaatggtttcttcaacacgcttggtgttctccgcctgacggttcatcatgcgctgcatctgcggggtcagcgtggccttatcggcagtggcgttgagcacggcctgcacctgctccatattcacgccgtaagccgcgtcttcctcggcagaagcgttctctgcgttctgctcggtgtctttgttggcggtctcgtcagcagcggtgctggatgaggtctcgctctgccagtccttctggttgttcgagtcggtctcgtgcagctcttcgtcagccatcagcatagtctccattcaataggctaaaagtcataatagtggctacactcgaaagcggcgaccagagtcggcaagaagacaggaaattcatggccagacatgtaggtaagcacggcgcacggcactccctatggggtggtgtcgcggtattcgtcgtcattgccttgaccggttttctgctgagcaccaacgtgagggtcaatcgtacggttgccgccaccaacgatacggccgatctggtggagcaaggcgtgggcgaggccaaccagctgcagcaggacgtcagcgatctgaccaaacaggtcgccaatcttacggacgcgctcaaggccgatggcaccgacggtactgacagcacgcagaaccaaggcaaggactccagcaatgtggattccagcctgatgctgcccgcgctcagcggcagcggcgtaacggtaacgctggatgattctccgttatgggagaacgccgtcaacaacaatggcacgaccgccaatatcaacgattacgtgattcatcagcaggacgtcgaatcggtggtgaatgccttgtgggccggcggtgccgatgcgctgatgattatggatcagcgggtgctgttcaattcggcggtcatctgttccggcaacgtgctgtcgttgcacggtaagaaatactcgccgccattcaccatttccgcgattggtgacccgcaaagacttcgcgcagcgttgaacgactccgaagccattaccattcttaagcaatatgtgaccgcgtttggcattggctacaaggtggagaatgccgagggccttcagttccccggtaccgccgccttgctgcagcagttgaaatatgccacggtcgatacgtcaaagaccacagatgaggagcagactcagcaatgagacacggcaggcacaacagcggcgcaccggcgcccattgatctcgcgtccgtgtcggacgtacagcccttccccgaggacgacgccgcacgaatggcggcagacccggccaatgccagcagggcaaggtcccgtcgtgccgcagtacgcggcgcgtcttcgccccagcggagcctgatctggcaggcactcggcatctgcgccgaactgctgattaccgctgccgtgatttgcgccctgtacatcgtctggcagatgtggtggaccggtgtcgaggcggagcgagcccagaacgaaaccacccagtccgtcgactggagcgaccccagcaacaacgggggaacggtcaccatcgccaaagcccaggagggcgatgctccagtacagccgaaagacgcgaaatatggcgacttgattgcgcagatctacattccgcgcttcggctcccaatggcaccgcaacatcgtggaaggcaccacgctcgagcagctcaatcgccacggtctgggccattacgacaccacccagatgccggggcaggtcggcaacttcgccgtcgccggccaccgcaacggctacgggcagccgttgggcgatgtggacaagttgcaggaaggcgatcccatcatcgttcgtaccaaggattactggtacgtctaccactacacccggtacgagattgtgctgcccacggacgtgtatgtgatcgcgcccaatccggaagactccactgccaatcccaccaaacgcatgatcacactgactacctgtgagccgaaatactccacccccacccatcgatggatcagctatggtgagttggcgtactggaccaaagtgtctgatggcgtgcccaaagagctggctactactgattcgtccggtgcagtgaagttctccaccaccgaaaccccctcgatcgcttcccgcattggctcgctggacaaggtggtattcggcgcgctggtagtgtggctggttctgttcatcgccgctgcggtggcatggcgctggccggtgctgcgcgagattcgcgcgggtgagcgtcgccgtccggatgccagcatctatggcggactgttgcgtctgcagcccggcgtggcaccgattcgatggctgctgctggctctgctgctgttcgcagccgccgcggcgctgttccagtggggattcccttgggccgccgccaatatcccattcctacagcagatgtcgaacttcgtggcagtgagctgacggcagcctagtactatagcttgcagtacacgtccctcaaggagagccctatgaccgattccgcgcatattttggtggtggataactacgattccttcgtctacacgatcgtaggctatctgcaaacccttggcgccactgttgatgtggtgcgtaacgacgctatcgacccagccgcgccgggtgtactggacggttacgatggcgtgctgatttctcccggccctggcgctccggccgaatccggtgccagtgaggatatgattcgcctgtgcgcggccagcggcgtgccgatgtttggtgtgtgcctgggcttgcaggcgctcgccgaggtgtatggctgcactgtgggccatgcgcccaccatcatgcatggcaagaccagcttggtggaacatatcgatgacgagattttcgagggcgtggccaaccccatgaccgccacccgctaccattcgttggccgtcgagcccgattcggtgccggatacgctggtggttaccgcgtggacgcagggcgaccacattattcagggcatcaaggtcaagggcaagccgatgtacgccgtgcaattccatcccgaatccgtgatgacccaggacggctaccgtctgctggccaactggcttaaggtctgcggccaagacaacgccgtggccaagtccgccggccttcagcccaaggttacgaagtagcttttccgcgcgcggcgacgctttcccgggaatgttgcgctgggatagctctttatacagcaaaggggaggggtgcagaagcccctcccctttgcgttgtgtgattgcgttgtgtgattgcgttgtgtgattgcgttgcgtgtttacgttgcgcatgtgttgcgctatgtgcgttgcgtatgcgcaacacacacgcccggcgctcactcactcacgggttccgccccccgttgccgttgttggcaccgttgccgttgccaccgtctccggtaccggtgtcgcctccggtgctgccggccttcgtggtaatggtgacggtcgatcccgcatctacttggctgccagcgccaggattgatgctgactaccacagcggtgctgtcggttgggccactggcctgagccttgaggcccacggccttgagcatgagttcggcggtggcgtagtcagtgccagcggtgatattcggtacagcgaccttttccttgcccgtggacacccagatggtgatggacccgccctgcgcgatggaagagcccgaatcggggcttacgcgggtaatcagaccggcctccaccgtatcggagctttcctgctccacggtgaagctgaacttgccctcatactgctgtagcacgctgtccttcgactgaccgaccaaattgctcggtacggtggtcatgccggaagaaacatatatggtgatggtggtgcccttgggaaccgactgaccggcggcaggatcggttctcgtcaccatatccttggcgatgtcggcgctgtcttcggttttgacggtggcgttcaccttgaacccggcgctttccagaatgctgcgcgcctcttcctggctgcgctccttgacatccggaacctgagtggactgcgggcctgcggagaaccacaccttcacggcagatcccctggccaccttggagccggcgtccgggctcatcttggtgcaggtgccttccggctcggtggagtcggtgtcttgcttttcggtcatcttcaagcccaatctctcaagcttgagcttgatgttgtccttggacgtggaagcgttgcacacttcagggatggtgacggtgtcttcagaggacttgttgccggagccgttcatggcgaacatgatgcccacaatgacgagcaccgcgacaatcgccgcgatcgccgaaccgatgatgatcttcttgcgcttcttggccttggccgccgccgcacgctgctgcgcacgggactgcaacgccgctgagttggcaccattggccggtggaatctgctcgaactgaccggtcaccgggttgaatgcctgggtgggctgctgctgcggttccaccggcgtggtgggcaaatcacgttcggcttccttgcgggccttcatattcgacaggtccgtcaatgggttgaacgcggctgccaccggcacgccgccgttcatgtaggtcaggatgtcggtcttgaattcggaggccgtggcgtagcggttctggcggtccttggccatggccttggcgcagattgaatcccacatcttcggcagccccggcaccacggcggatggcggcgtggcgacttcggagacatgctggtaggcgatggccacagcggaatcgccggtaaacggcgggcgcccggtaagcatctcgtagagcacgcagccggcggaatacaggtcggaacgcatgtcgacggtctcgccgcgcgcctgctcgggagaaaggtactgtgcggtgcccaccacgccctgcgactgggtcatggtggttgcggaatcgtccagagcgcgggcgatgccgaagtccatgaccttgaccgcgccctgctcggaaatcatgatgttgccgggcttgatatcgcggtggataatgcccatgcgatgcgaatagtcgagcgcgttaagcacgcccaacatcacctgttcgcagtcgcgctggctgagtgcgccgttgaccttgatgatgtcgcgcagggtctggcccttgacgtattccatgacgatgtacggcaaacgctcggtatcgccgctttcggaagaagccagttcttcgcccgaatcgtagatgttcacgatgttcgggttgttcatctgggccacggcgtgtgcttcgcggcggaaacgggccaggaagatgtcgtcgttggccagatcggcgcgcatgattttcacggccacggtacggcccagacgggtgtcaagagccacgtggacctcggccatgccgccacgaccgatgagctggccaagctggtagcgtccgccggccaatgcggtgggcatactggtgctcattgcttattccctcccaatcttgaggccggggcctccaaaacaatgcgtggcgtgctggtcactcggcgcggcagtcgattgccggacgtggccatggcggtgtcggccatttcggtctgctgatccagcagacggcgttcgatgcgtgccagcgtacgggacaccaccagcgcgtctttcgggcgatccaacgggtccttggccagcatcgacatgacaaattcgcgtaactggacgtccaccgagttcggcagcggaggcacgggattgttcacgtgcgctgcggcgatatcgaccggagtggtgccggtgaacggacgatgcccggcaaggccctcgtacgccactacgcccagtgaatagatgtccgattgcggcgtggcctgctggccctgcgcctgctcgggggagatgtattgtgcggtgcccaccaccatgccgtcctgggtgatctggccttggccggtggagtagctcacgccgaaatcggtgatcttcacttcgccggtgtcggaaaccatgatgttggccggcttgacgtcacgatgaatcacgccgtgcgagtgggccacgaataggcctcgcgcggtctgaatcagaatgggcagcagttcgatgggatccatcgcgcccttgctatggaacagatccgccaacgatttcgaggggacgtattccataatcagaaagccgatgccgtcatgctcgtagtattcgaacaacgcagcgatgttcgggtgcgccagattggcggaattatgggcttcggcacgcaggcggcgcagcttggcctcggcgttggtcacgtccgagcgcagcgccttgatggccacttcacgtccgagctgaatatcgtagcctttccagacctcgcccataccgccttgcgcaagacgcgaatcaagacgatatcggcggtgaataagctgtccttcgataagtttcactgctgcaaagcctcctgcatcatcgcgcgcatgatcgggccagcggcgagcgaaccgtgtacatctgtgttatgcaccaacaccgcgacggcgatctgcggattgtccgccggcgcgaaaccgatcacccagccgtcgatggcagagttgtcgataccgatttgtgcggtaccggttttggtcgccaccttgatgccgtcgatggccagctgcggattggcctcggtcatcacgctctccatcatcgtggtgagcttgtctgcggaatccttgctgaacgcgttggccatggtttgcggtttggtctgcgaaagtacggtgagatcggcggcgcgcacacgatcgaccagcgtgggctgcatcagtttgccattgttggcgattgcctgcgcgaccatcgccatctgcaacggcgtggccgtggtgtcgccttggccgatggatgccagcgcaagcttgtcgtcggtcggatcagaggggaatgtggacgcggtggccgtcatcggggtgcccgtggattcggtgccgtcaatggtgatggtgctgccgaacccgagcttggcggccatgtccgaaaccttgctcgcgccgagtttcacgccaagctgggcgaaagcggtgttggacgaccatgcgacggcctcttgcagggagatctgtccgttgacgccatcgccctgtgcctcgtcgttcggcagctgtgtggcggttcccggcaaggtatagctggagcctgcaggaatcttcgtgtccgtctgataatcgccggtttccagcgcagccgaggcgacgatggtcttgaacgtggaccctggcgggtacagctgcgaggtggcgcggttgattagcgggctattttggcccgcagagagttcgttgtaggcctgagacgcggctttggcgtcatgggtcgccagtttgttcggatcgtagctgggcgtgctcaccatggcgaggatacggccggtgttgacttcgatggccaccgccgcaccatcgcgcgtaccgagctgatcgtaggcaacctgctgcagcttggggtcgatggaggtttcgatggacgcgccctgattcgtagtgccggtgagcatggccttggcccgctgccagatcaatgaatcggcctcaccgttgagcagcatgctgcgggaggcttccaggccgcgatcggcggtctggttgatggagaagaagccggtgaccggagcatacagcggaccgttggaataggtgcgcaggtatttgaacgcgtcgttgaccggttcggatttggccatgaccgtgccgtccgaggccagaatggcaccgcggtaggcaccgagctggtggtacagcgaacgggcgttgcgcggatcgttgttcagcgcgttggcccgtaccgccatgatgatggtggacgacaggccaagaatcacgaacagcgcgaccacggcggtgaaaagctgacgaagatatttgttcatacgcgagtgcctccgttaacgggaggaagcgggggaatcgtaccggtaggcgtgtacggttcatcggcgccggcatacgccggagtggtggcatccacaataggctcggcgatgggggccgcagcagagcccgcagaggtcacaattgcgggcacttcgggtgcctcaagtgtgtctggcgcgtgcttggtgatgtccacaatggggtcgtcaaacgattccgcctcggactgcgacgccgtagccgacgcgctgcgaggctgaacgatcggctcagtggcgcgggctcgggcctcaagttccttgttgcgcagcacggccaaagcctcgtactggaacgtatccgaggtcagttccggctcgggcgcattggccgagttcgagatgatgatgagcagggtcgcgagaatatagttggcgatcagactggagccgccggccgccatatagggcagggtcagaccggtcagaggaatcaccagcgtgatgccgccgaccacggtgaacacttggaaggccatggtgaacaccagtccggaagcgagcagcttgccgaagccatccttgattttcatggcggtgataaagccggaggcaatgatgagcaggtagagcatcaaaatggccaggacgcccatcagaccgagttcctcgcccagagaggcgtagatgaaatcggagttcgcaaacgtaacgagcgaaggatggccttggccgagaccggtgccgagcatgccgcctgatgccaggccgaaaatgccggtgaccagctgccaggagccgccgggggtcttgttgtattgctcgttgctgaacgggtgcagccaggcatcgactcgctgacccacgtggctgaacatgcctgcggccagcacggcacccgcggcgaacgcgatcagaccgatgatgatccagcttttacggccggtggccgtgtacagcatggccacgaacatggcgaagaacataagcgaggtgcccagatcatgctgcatgatgagcacgcccatcgaggcgatccacaccacgatgatcgggccgagatccttgatacgcggcagctgcagaccgagcatcttcttaccgcccacggccagctggtcgcgatggtcgaacaggtaggcggcgaagaagaacgcaaggaacagcttggcgaactcgcccggctggaactggcccagtcccggaatcctgatccaaatgcgcgcgccgttcacttcctgaccgacaaacggcagcatcggggcgagcagcagcaccaagcccaccaccatcgacacgtaggagaagcgccgcagcacgcggtagtccttcaggaagatgatgagcagcgcggaaagcacgatggcgatgcacagccagatcagctgacgttgggcaaccgcccaaccttcgctctggtcaatgcgagcgatcatggtcacgccggtggcggtcagcagtagcacgcaaggcagaatcgactggctggcgtacggctggaagcgcacaatcagcccccacagcaccagaaacagcactacggccaatgccagcatgccggcgtattgcatagggaattcgccggcggtgcgctggaacatctggatgaacgccaacgcactgattgccatggcaatcagcaacaaagaaatctgacgtagacgggtaacgatcattgagaatctcccgtggccgcgttgtcggccgctccgataccggatttatccgaggaatcggatgagcttgacgaaccggacttgtctgacgaggagccggactggctggacgaatcctcggtgctgtccttggaatcgctctgggagctgtctttggaactgtccggggaattggacgcctcggccttcttggcggcgtcggcttcctgctgcttggccagtttgcgcatttcggtgcggataatacccacatgcgactgcgcttcgtccaacgaaccgactgtgatgccttggctcagctggtcacgccatgtctgaggcaggtccgcggtggcgatattggtggtctgcacttcgtgcgaaagctcaagtccaaagagattggtcggcacgccacgataaatggccacggtgccgttgctatctcccacgtagtagtgcgtctggctccacgtgtacgcgccccagccagcgccggccaatgccagcacggcaagaatgcaggtaataatcaccgcaagcttattgcggcgcttcttggtacgcgtggccttcttctgctcgacctgctcatcgcggatggctttggccacatccgggtcgttggggtcggcggacaggcgcccatccggcttttgcaccaccggaatctcaccggtatcgggattggctcgttcaccggtctcctcgcggacggtggacggctgcaccacgcgtgtggacgacggtttggccgtggtttgcgcggtctccgcctcgtgcgcgctggcgggctgaatcaatgctgcggcgcgctgggcgggggaatcatcctcccgcagtgcgggcgcggtagccaccggctcgttgacgatgtcggcaatcggctcaagattacggctggcggcaccgccgaccaacggcgtttggtgcggcagatcgaacgcatcggcatccaacgccaacgtggcatccgcaataacggccgtgacattatcggtgctgcccgcccgcagtgccatctgcaccagacgctgcgcgcattcgccctgatcggacagcgtggtcatcgtctcttcgatggtggaatcttccagcacaccgcacagaccgtccgagcacagcagccaacggtcggcggggtgggctcggcgaatcgaaatatccgggcgcgggtcaatgtcaaagtcgccaagcacgcgcatcacgacgttgcgctgcgggtggttcttggcttcggacggggtgatacgaccggtgttgatgaggtgctgcacgtagctgtggtcgcacgtgatgcggctcaggtgtccgtcgcgcagcaggtaggcgcgcgaatcgccgatatgggcgatgacccagtagccggccaccaatgccactgcggtaacggtggtgcccatgccggcaagcttgcgttcgcgcttggccttgccgacgatggcgtcatgcgcggccataacggaggtctccatcatgcgggagatcgtctcgacgttgccaccggtgtcgtcctgctcgatgtgggccagtgaccggatggcgatggaggatgccgtatcgccgccggcgtgaccgcccatgccgtcgcacatggcgatgagatgctcgccggcgaaggaggaatcctgattgttcgcgcgcacggtgcccacatcggacaccgtggtggaatacaggaacagcggttgtgaagcggcggattttggcatgcggctacctcagttcgaaggtggtggcgccgatgcgcacaggaatacgagcgggcagaatggtggggcggttgatgcgctgctggttgaccacggtgccattggtggagttcaggtcttcaatggcccactgcccggagcgcgtgtcacggtagacacgggcatggtgggaagacacgaattcgtcatcgagcaccacggtgttcgaggcggcgcggccaagcgtgatgtcggcttcggccagcggcacggagctgccggcaagcggaccatcgatgatgaccaacagggtaggctgcgccgaggcggcggacgacgcggaagcgctgggctggcgatgcgggcgcggcgcagctgcctgcggcgtttcggccttggccttatgcacttcacgctcacggcgacgacgcgcgcgcgaaggtcgcggactgaacgtctcgatgtccttgcgcagcgaacgtacggccagccagatgaatatccacagcaggatcaggaatccatacttgagcagggcgaatgtcagttcggtcataagtggacgactttcgggcgtgtgctcgactactcctgggcttgggcggaggcccagtacaggatgcgggtacggccgatggtgatggtgttgccgtcgagcagcgtggcggcgggcacttggtggccctccacgtacgtgccgttggtcgaacccaggtcgcgggcgatcacgccgttatccgtgatgtcgatttccaggtgcttgcgggagatgcccggatcgtcgatgacgatatcgcaaccggaaccgcggccgattaccgtcttgtctttggtgagcaggtactggttgccgttcacctcgagcaccgggctatcctcggtctgcgcatcggtggtgaccggcacggcattgccctgcacggattcggaggtgaggttgaagttgcccttggacaggtcaaggtcttcctcgaagatcacgatcaccgggcccacgaaggcgtaatgctggctcttcgcgtactcggtgaggttatcggccagttcgttggccagggtctcgctaccccatgcctcgatacggtcgaagtcaggagtactgagcttgaaacggtattcattcggggccaccgtgcggtcacggcccacgggcatggcctcggcgtcaatctcgcgctccaaggcgctggaaagatcgacaggctgcaggtctttggagccaaacttggcgaatactccgttgactgcaccctccacgcttttttcaaaacggtcgagaacgctcatagtcctccctttctaatcttcacccatcctacgcggtgatgggaatatgagacaaaaaaccggtctttcacgtgacgatgagtgcaaaatatccaaaaattcagggcggaaatgggtgcggcgcaccacccgaggtgctttaccggtggagcacctcgggtgggatgcgcgtgttatcgatttgtcaggccagcgcgtcgcgcaggaaatcgcgctggagggtgagcaggttttcggccacggtctcgtcattggtcatatgggtgatgcccgtcaacgacaggaaggtgtgcgggcgacccgccgccatcagggcttgcgagaggcgcaggctgtgggcgatggtgacgttgtcgtcggcgaaaccgtggatcagcataagcgggcgctcgagtttcggtgcgtcctgcacgatgccgtttcggtagtagacatccgggtcgaggcccagatagcgctcggtgtagtgcgtgtcgtacagcgtccagtcggtgggcggggcgccggcgcatgcggccttgaacacgttcggcgcgtccagcacggccagtgcggacaggaagccgccgtacgaccagccgatcatacacaccttgtcgaggtccggcatgggaatcgcctcccgctggcgggaggtggcgcgaagcgccggtgggtggttctcggcgtctgcctgatcgcccgcagccggctgtgccgcacgtgattccacatcggcgttgagccgggcgacggcctcgggcagggcgttgacggcctcgacctgatcggccagtgttacgtccttcatatcctcgaagatctcgcggtcccatgccgggccgcggccggtggtgccacggccgtctgccgtgaccaccaggaagccttggtcggcccaccactggccctcccagtagaaggactgcgaggcgatgacctgctggaagccgggcccgccgtacggcttcatcagcaccggcagcttctcggcgtgcgcgtacgggctttccgggctcggcgcgatgatcgccgtgtacagctggtgctcgcccagtcgcgtaaacgtgacgttcggtgtaaagccgggttcggccgccgtggacgcgatagtggcgctctgttctcccagaatatgccgcatctgggcgcgggcggaacgcatatcgcggccggagaccacgatgccgcgctcgccgcgcgaggcggtccactggccgggatcggtcgtgaccggcgtgatcgtgccgttgtaatcgatactcaccacgtcgaaactgcgggcgtcgtggtcgccgaatacggactcggtggcggccgcatcggcccaagcgtccggcacctcaggcgcgatttcgggcgcgcgctgcaccacggccagcacatcctcgtcggtcacggcgagcaccgtgcgcacgttccagccagccggcgtgaacgggcggccgtccattgtcagacggttggtgtccgtggccatatcgttgagcgagcacaccagacgaccatccggcgtgtaggcgggcgtgccgtgaaccaggtcgatccactgctcgttcgcgtgctcctcaagcacacgcgtggcacccagcgcggccccatccgccgcgactgccacctcaagcacctgatcgcgggtctggcggcggttctgcaccagcaccagcggatcgtggccgcgacgccagttcacggcggccacatactcgtacgcctcgcgatcccaatccacatcggcgttgccggtgatgcccgcgtaccggtcgttctcatcgaacgccagcgtgatcacggtcaggtacacgtcggcgttgcgggtcagcgcgcgcgggtagcggcggccggcgtccggcttctcggggtcggccggatcgctgatgtaccaggtcggctcgtcggcggtgtcgaaagactcgaacagcacatgctgcgaatccggggcccaccagaaaccgtcgtaccggtccatttcttcgccggccacgaactcggccagaccgattttccacgtgttttcggccggattgccgtcctcatcctccacgctcacgccgtagacggcggtgatgcggtcacctagttcgccgccgatatcgaccagcatcaggtagctgcccgtggtgtacagcacatgttcgccatccggggcgatgcgcgggttcagcaccggcgtgtacatcgccgggtcctcatcgagccattcgccggccagttcacgggtgtgcggctcgggtgcgccggtctcgtcattccaatcgatgtcggtcaggaacaggcggccgttgatggtgaacacgatgcgattgccgtcgtcatctgcggagtatccgacgatgccggtgccgccttcgcgcgcacgctcgcggcgggccttctcctcggccggcacgtcctcgctgtcggcggttgcgcccagcagttcgcgcgggtcggccagcttggtctcatggtgttcgccggactcgtcgaaccagctcagccacagtgcggtcaccagatcctcggggccgtcggagcgcaggaacagggcccgcgagccgtcgcccacggtctgtgcggagcgcggtgcgccgcagccgaagcgcagcgtgcgcgcccggaggcgtgggaaatgcttgattgcgtcattgacatcattggtttcgctcatacctcacaacctacgcgcctgtgcggtcagtggcgcgcaggcttgcgacgcattcccgggaatgtgtcgtggtgtgggtgcgaggtgtgggcgtgaggcttgtcctaagatgggagccatgcaggtgacgatgatcgacgaaaacaagtacgccgaaacgatgaccgacgtggtgctgcccgcgctcgaacaatgctgcgaggagggctggttcgatccgtccgccgccgaacgttcggccgggatcgagccgctgtccggcattatggacaccggcggccgctcgggccagctgcactacctgtgctacgactccgccaaattcgacgcgattcgcgagcaaggcgccaccgccaccttccgcggggccatcgtcatcagccacggcttcaccgagttcgccgaaaagtacgacgagctcgtctggtacttcctgcttgccggctactcggtgtgtgtactcgagcatcgcggccacggcaagtccgcgcgcgacgtggacaaccgctgcatggtgtggattgatgactggcagcgctacgtggccgatctggccggcttcgccgaaaccatcggccagcagtacgcggccggcatgccgctgaacctgttctgccattcgatgggcggcggcatcggcgcggccgtgttggagcgataccccaccctgttcgacaaagcggtgctctccgccccgatggtcgcccccgccaccggcatgccgctgggcgtggcccgtgtgctggtcggcgcgctgtgcggactcggcttcggcaagaagcgtgtgttcgggcagtcggacttcacgccggagttctcgatggaaggcaacgagggcgcttccgaggcgcgtgaacgctggtacttcaagctgcgttgcgagaatagcgaataccagacctactgcgcggcgttcgaatgggtgcgccaggcgttgaagctcaaccgggccatactgaatccgtccgcctgcgccgaagtggagacgccggtgctgctcttccagtccggacgcgacatctgggtactcaataagccgcagaatcacttcgtccaactggtcaaggacggcggcggcgaggcgaacatcgtgcgcttccccgaatcgcgccacgaaatcttctccatgcccaacagcacttacaagccctacctcgaaaagatcctcggcttctacgacgaccccatgattgcctgcgccgcgtactgatgtagctcttcacccattgttcaccgtgcggtcaccttgtggcccggcccgctttagatggcgggagagccatggaattatgggcataatgtcttctctccgccgccgcgccgccgcggttgcggccgcggcatgtgccggcgtgctcgcgttgaccggttgcacggcgttcaataattccgatgacggcacagcggacggcaacggcacgtccgccaccacgcagaccttccagccgtccggcggcaaaccgaccgccaccctgagcattgcctccggctccgagaacaaggaagtcgccactgccatccagaaagcggccgaccaatccaacgtagccgtgacgatgcactacatgggttcgctggagattatgaacgcgctcaaggccggcggccaggatcacgacgccgtctggcctgcctcctcgatgtggatttcgatgggagacaccaagcacatcgtcaaagacgcggccagcacctccaccacgccgatcgtgttcggcatcgccaaatccaaggccgtcaaactcggctgggctgacgactccggcgccaccaagcccgtctccaccgcggacatcctcgccgcggtcagcgacggcaaactcacgttctccatgacctccgccacggtgatcgacagcgcgctcaacgtctaccagaccgcgctcaggaagcccagctggaccatttgggtggtcgattactccggttcgatgtctggagagggcaagaacggcgtggtcaaaggcctgaacgcggcgctcgacccggaccaggccaagaagtcgtacatcgagcccgccagcggcgacgtgaacattctcatcccgtttgaaaccgaggcccaccgcccggtcaaggccactggcacaagcaccagcgacctgctgcatgaggccgatgccaccgatgccagcggcggcaccgatatctatgaaggcctgctgagcgcgctcgacgagctgcccagcgagtcggaagcctcgcaatacaccaccgccatcgtgctcatgaccgacggccgctccaactccgatcatcaggacgaattcgaaagcgcctataagtcgcgcggccgtgatctgccgatcttctccatcatgttcggcgggttaagggtcaaaatgtgtgtctggctcggcgtgtcgcgggggttagatttggcctttttgaatgccgattgagtgggtgtagtcggtgtcgatagcgttgtcgtagagggctgggcgtcctgtttcgtggtcggcttg

SEQ ID NO: 3208 - DNA, 28659 bp, Unknown
  R53_2m  MAG No. k141_4475
acttcaacccggagcgccgcgatgcccagaacccggacaagaccgtggtgtgggaggagtacagccgtttcgccgagcgcggcgacgaaccgtactacccggtgaacacggacgcggacaaggccctgtacgcgcggtacgaggccaaggccgcggccgagccgaacaccgtgttcggcggccgcttgggcacctacaagtactatgacatgcaccaggtgatcgacaccgccctgaccgcctacgaggaacaagtcgcgccgctgctggccaagtaacagccgattgcgcgattacgcaacgaatccaaccccaagtccgaagccgttatgattatgccaacgataatcatgacggcttcggacttgttgattctttggggtgactacaaaccgctgacggcgatgtgcgctttgaggtagtcgtctatggcgaatacgcctgaggtgtctccggcacgaatctgggcggagatggagtcatattcaacggtgcctccggtttgcagatcggtaacgtcttcagcatcgtccgccgaaatggaggccgggtcggaggcggcgacaaatgcccatcgtgtggcccacatctgcacgggggtgttgccagcctgatatttctggatgaggctggtacctatgtctccggcgttgctggaatccgagacttggaacgtgcatagcgcatatttcgggtgttctcggtcggtgacggtgatggtgctgccgtccaccgaggtggtgattttgttgtgccacgagtagggcaaggtgacgcgatacgaatcagattccatggtgagcgactttttgactgcgtcgctgtattgccagacgatattaatgacgttgccgctgtgcttctgataacggtcataatctcccagcgacgtcacagtccacgagtcgctgagatctgcggtgtccgcaatatccagttcatcggccatgcaggagcgctgtgacgagccatccataccgccctcggtggcgtgcatccacactttgctgtgatctgtagacctcttctaggagaatgcctcgggatcgggcgcattgtgcggtgcgcaatccagccatgcttcgtcaagctccccgtccagatcactggggccggagtaggcgtctgtccagtcgccctgggttgggtcatcaacaacagtcttctgctgattggaatccgtgttgctgttgctcttgggagtctgcgaggattgctgcttttttggttcagtggtcggcgcagattggggcgtcccgcaagaagcgagtagcgcaatcagcggtacgagaagaaccatggcaaaacgacgatgtctcatatcacaagtctaactgtgtaggagtttgattacaggggctgtagaaaggggatgtcgtattctcgtgcatctttcgttacgattgtcactgggaatagaatgaaagtcatgcctcatcgcgaggcgtgcgcaagctgaaggagcagaggctatgactgattccaacaccaatccttatgccggttcggggcagtcgctgtggcagcccgagcaggttccggcgccttcatctgaatccgattcgggtgctgcaaatccatccggcgaggctggatcccagcagcccaataatacttatcctggtggcggttccgtgcctccgcagacaccgtacaatccgtacgctcaaggcggaacgccgtatgggcagcagtgcaatccgaactacagccagccctatgcccagcagtatggctacatgcccccagcggccaatcagcagtacaacgggtttgccattgcgggctttgtctgctcgttctttacctcaatcatcggtttgattttcagcatcatcggcttgaaccagatcaaacggtcgggcggcaaaggcaaaggcttggccactgcgggcatcatcatcagcgtggcaaagctgggcatctatctgctgctgattgtgatgattatcgtcggtctcttttcgggtatggtcgatgccgtgacgaatgatttgcggtcggattattcatacagcagatacgacgacatggacgatcagtatgattcgtactattatgacgaccagtacgactacgacgattctggcgatatcgatatcgatgatttggatcgtgcgcttgagcggctgaatggcgtgtcggaatggtcccctgcttttaccgtctactctccagcggtttccatcagcgaatgaataggtgatgagattcctgcggcgtggcattgaccggccgtgagaggaatagtcgttgccgggcgcgggctgggcgtagtcttggattcatgagactcgcacgtttttctttgaatgattcgccgcgctacgccttcgtgcagaaggacgaaacggacggcaaggactacctcatcgaacttgacggtcatccgctggccggcgaccaggtcaagcccaccggcactcgttacccggtcgacggcgacggcatccgcctgctctccccggtcatcccctccaaggtctacggcctggccaagaactacgaggcccacgcccagttcatgcacgaggccggccactccgaaatcgcccacgcgccggaagacatggtgatcttcaccaagccgtccacctcggtgattggccccgacgatccgatcgtgtacccggcctgctccaaggacatgaacttcgagccggaagtggccgtggtgatgggccgtatcgccaagaacgtgtccgttgaaaacgcgatggattacgtgctcggcttcacctgcgtgaacgacgtgacgttgcgcgacctgcagggcatcgaccccacgtggacgcgcgccaagggcttcgatacctcctgcccgcttggcccgtggattgtgatgcgtgacgacctcgactggaaggacgccaagatttccttcacgctgaacggcgaggatgtgccgatggcgtctggcaccaccgcgaacctgattcacggcatccccgagcagattgccgcgatttcgtcgttctccacgctgctgcctggtgacgtcatcatgaccggcaccccgaacgcctccggccacctcgacccaggcgacgagaccatcgtgcacgtcgagggcatcggcgatctgcgcaacgtaatcgttcgggcgtgactcgttctggatcccctctctgaggggagccgtccaggcggagaagctgactgaggggaaccaagaacgcgccttacgctcccggcaataccgcgtgcagggcggtcatcaccaccaagctgatgatggccgtcactgtcagcgagaagccggcgagcttggcgttgccggttagcgaatcggtgaacttggttgagaagatcgtgataggggcgaacgagcccaacacgatgatctcgcgaatcctcatgtcgaatggcagtaggaaccaggcggccacggcgataatcgcgccgaataccatgcgccagacaatcaccttgcccaactccaccttgtccttgcgattgttcggaatctccatcatcagtccgatcatggccatcgcgcagaaggcgttcgcattggcgaacggggtgatgagcgtaacgatgggctgtgggatcgtgatgtgcaggaacatgaacaccagcatcagcatgtagatgtcgaaggaaatcgagcttaggaagtccctggcaatattgcgcagacgcaggatgagcggtagcgacttgaaattgttatccatatgcagcagcgtgcgtgtgatggtcagtgacccggccgtggccacggtggcgttgccgatatcgagcatgatgatcggcagaccggcggacgggcccatgaacgtctgaaccacaggcaggcagaacgcgcccaggttcaggcccgaggcgttgagcatctggaaggcgcggtagttcttctcgtcgccgcgagaaccgaaatacacgatgaacagcggaatcgcgcaggcgaagaagccgaacaacacgatccacagcatgcgcatgtcgtgcttgttcgtggcgaacgacaggataatcgcacaaggaagcgtcagattgaataccagaccctgcacgattttgtaatcacgctcgccgaaaatgtggacatgtttgagtatgtagacaccgatgataacgagcagcagcgaaccggcctgaaaaatcatgttcttctcttatcccacaagcacccgccgcagcaccggcggcggtcaggcgcataacaaaccagccgtgagtataggagcgttcgcgcggcgctggcgcggggcggtgcatattgtggacagtcccgtaacgttgatatgccatgctggcgagatgaatatatccaataccaagtggagctcagcacgatagagaggtaggaaaacatggcagagcagacggtcaccgtaagcgttggggcattgagcatcgaggacgttatcgccgtagcgcgcggcggtgccaaagtggcgatttcggacgaatcgaagcatgagatggcgctaagtcgcgcggttatcgatcatttggccgacgacaccgtgccgcattacggtatctccaccggattcggcgcgctcgcctccacttccatccccaaggaacagcgcgcgcagctgcagaaaagtctgatccgctcgcatgccgccggtgccggaccggaagtggagcgtgaggtggtgcgcggcctgctggtgctgcgcctgagcaccctgtgcaccggacgcaccggtgtgcgcccggaaaccgcgcaggtctacgccgatatgctgaacgccggcatcaccccggtggtctacgaatacggttcgctcggatgctccggtgatttggcgccgctcgccgcctgcgctttggtggcgatgggcgaaggcgaggcccgcaacgctgacggccgcaagatcggcggcggcgaagcgctgcgtgcggccggcatcacgcccgtcgatttgaaagagaaggaaggcttggcgctggtcaacggcaccgacggcatgctcggcatgttgtgtatggccatcaccgatctgcgcctgctactcaagacggcggacatcgccgccgcgatgagcgtggaaggcatgctcggcaacgaccgcgtgttcgccgccgacttgcaggcgctgcgtccgcatcgcggccaaggcgattccgccgcgaacatcgtccgcatgctcaagggctccagtctgatcgaggccggccgcccgggctccaccgtgcgtgtgcaggacgcctactcgctgcgctgcaccccgcaggtgcacggcgccgcccgcgacaccgtggaatacgcggcctccgtggcgggcgtggaactcgcctccgccatcgacaacccgtgcgtcacgctggacggccgtgtggagtccaacggcaacttccatggcgcgccgctggcctatgtgctcgatttcctggcgattccgactgccgacgtagcctctatctccgagcgtcgtaccgaccgcttccttgacgtggcgcgcaaccgcggcctgccggcgttcctggctggtgacccgggcgtggactccggtttcatgatcgcccagtacaccgccgccggcatcgtctccgaaatgaagcgcaacgccgtgcccgcctcggtcgattcgattccgagctccgccatgcaggaagatcacgtgtcgatgggctgggccgccgcccgcaagctgcgccggtcgattccggcctttgcgcgcgtgctggccgtggaactgctgtgctcctgccgctccttcgacttccgcaagccgtaccgtccgggtgcggcgggcgccgccgtataccgcgtggtgcgccagtacgccaacgaaatcggccccgacgtacgcgatacctggaccaccccgcaaatcgaaggcgtagccaacgccatcctctccggcgaaatcctatccgccgccgaagctgccgtcggcctcctgaaatagatgtgagctccctcatcagagggggctactgttcaccctccccaccaaaatccaaaacttgagtcacctgcactcaagttttgggaatagaatgggttccaggtcggttgaccatatcagacaacgacaagttgcggtctgcggtggcgcttgcggggctttcgaagcccgcgagccgctccgcgcgggccgcatgatatggaggaatacgatatggaacagaagttcaccaccatggcccaggaggccgtcggcgacgcgattcagagtgcgtccgccgcaggaaacgcgcaggttgagaccctgcacgtcatggatgcgttgctgcgtcaggaaaacggcgtggtgcgctccctcatcgaggccgcgggcggagacccacaggccatcggcgccgccgtgcgtaacgctttggtcgcactgccgagcgcatccggctccagcacttcgcagccgcaagccagccgccagctgaccgccgccatcgcccaggctgagaaggaaatgcagcagatgggcgacgaatacgtctccaccgagcacctgcttatcggcatcgcggccagcaagccgaaccagtcggccgaaatcctggagaagaacggcgtcaccgcagcctccctgcgcaaggccgtacccggcgtgcgtggcggcgcgaaggtcaccagcccggacgcggaaggctcgtacaaggccctggagaagtactccaccgacctgacggccgccgccaaggaaggcaagctcgatccggtgatcggccgtgatcaggaaatacgccgcgtgattcagatcctctcccgtcgtaccaagaacaacccggtgctgatcggcgagcccggcgtcggcaagaccgccgtcgtggaaggcctggcccagcgtatcgtggcgggcgacgtgcccaccaccctgcaaggcaagaagctcatctcccttgacctaggctccatggtggccggctcgaagtaccgtggcgagttcgaggagcgcctgaagagcgtcctcaacgaaatcaagaacgcggacggccagatcatcaccttcatcgacgagattcacaccatcgtcggcgcgggtgcggccgaaggctcgatggacgccggcaatatgctgaagcctatgctggcccgtggcgagctgcgcctgatcggcgcgaccacgctggacgagtaccgcgagaacatcgaaaaggatccggcattggaacgccgtttccaacaggtgttcgtgggcgagccgagcgtggaagacaccatcgccatcctgcgtggcctgaagcagcgttacgaggcgcaccacaaggtgacaatcggcgatgacgcgctggttgccgccgcgaccctctcgaaccgttatattccgggccgtcagctgccggacaaggccatcgacctggtcgatgaggcggctgcccacctgcgtatggagctcgactcctcgcctgaggagatcgatgaactgcagcgtaaggtgacccgtcttgaaatggaggaaatgcagctcaagaaggctgaggatcctgcatccaaggagcgtctgggcaagctgcaagccgaactcgcggacacccgtgagaagctcagcggcctcaaggcgcgttgggatgcggagcaggccggccacaacaaggtcggtgacctgcgtgccaagctcgatgacctgcgtgtgcaggcggacaagttcacccgtgaggggaatctggctgaggcctcgaagattctgtacggagagattccggctattcagaaggaactcgccgccgcggaaagcgcggatgccgaatctgccgatgccggcgcggccaacccggccgatgagccgatggtcccggaccgtgtggacgccgactcggtggccgagatcgtctccgactggaccggcattcccgttggccgcctgatgcagggcgagaacgagaagctgctgcatatggaggactacctgggcaagcgtgtgatcggccagaaggaagccatcgccgccgtgtccgacgcggtgcgccgttcgcgtgccggcatctccgacccgaaccgtccgaccggatcgttcctgttcctcggtcccaccggtgtgggcaagaccgaactggccaaggcgctcgccgacttcctgttcgacgacgagaaggccatggtccgcatcgacatgtccgaatacatggagaaggcttcagtctcgcgcctgatcggtgcggctccgggctacgtgggctacgagcagggcggccagctgaccgaggccgtgcgccgccgcccgtattccgtggtgctgttcgacgaggtcgagaaggccaatccggagatcttcgacgtgctgctgcaggtgctcgacgatggccgcctgaccgatggccagggcaggaccgtggacttcaagaacacgatcctgatcatgacctccaacctcggctcgcagttcctcgtgaacgaggacatggacgccgacgccaagaagaaggccgtgatggacgccgtccacatgaacttcaagccggagttcctgaaccgtctggatgacatcgtcatgttccacccgctcacgcgtgaggagcttggcggcatcgtggatatccaggtggctggcgtggcccagcgtctgaccgatcgccgcatcacgctggacgtcaccgactcggctcgcgaatggctggccaacaccggttacgacccggcttatggcgctcgtccgctgcgcaggctggtgcagaccgaagtgggcgaccagctggcccgcatgctgctggccggcaaggtccacgacggcgacaccgtgctcgtcgaccagaccggcggcgaacatctggagctctccgcctgggcgagcgaccaaatcgtctccgacgatccggatgtgagcgtggacaacgtcaccgaagataagtgacaatcactggctcccctctctgaggggagctgtcagcgaagctgactgaggggagttcgggcggtttcgcaacagtgatttttctctgcaaaatctcttaaacaggtgggtatggtagcagtcatacccactttttcgtctttgtgggtctatctcgatttcgaggggctgatttgccccctttcggaggtctacttccgtttcgaggggctgctcttctgccgaaccgcgagcatcagcggctttatggcaacgccattccgccattgttgcgccgtgtctacttggctaccagccccttgaaatggaagtagacctcctgcaacatcgaaatcagccccttgaaacggaagtatctgtccgatccgtctcaattgtgttccccaagagtggaagaaccgtggcatcaaggtgttcactgtcgcatatggtaggaaagtgagtgttaacggacgaagggagagccagtgaccggacgattggcgccgacgccgtcggggcgcatgcatatcggcaacgtgtacgccatgttgggtgcatggctttcggcccgttcgcgtggcgaccgcatgctgatgcgtatcgaagacgtggacaagccgcgcgtggttgccggtgcggaccagctcatgatggacgacctgcattggctcggcctcgactgggatggcgaaccgatgttccaatcccagcgcactgagcgctacgaatacgctctcgaatgcctgcgctcgcaaggtgtgctatacccctgtttctgctcgcgtgccgacattcgcgccgcctcggcccccaacgagggcgacggcttcatggtgtaccccggcacgtgccgccgcctgctgcacgaccatcccgacgaggtccgtgcccgtctgtctcgcggcgaccagcattccatccgtatcgccatgccgaaaccggcagcgggagaaaagcaacgtacagtgcctgacgattccgctgcgctgtcgggagccgtgccgccggaacagcagggcgatgccggaatcgttgatggtgtcgcatgctttaacgaccgtgtctatagtccacagcactacgatttggcccgcgaggtaggcgattccgtgattcgccgagccgatggactgttcggctatcaactggtcgtggtcgtggatgacctcgatatggatgttgatgatatcgtgcgcggccgtgatctgctgcgctccaccgcgctgcaaatgtggattcgccagtgtctgttggctggcggctttgagccggaatgcggcaacacggaaaagcctctcgccgagcaccctgagtatgcgcacctgccgctcatcgacaatgcggccggtcggcgtttagccaagcgcgaacgttcgctggatatgggagccttgcgcgcccgcaacgtaacccccgagcaaatcatcggatactgcgcctggctgctgcgtctgcaacccactccaatcccttgcaaacccgccgatctgctgacagatttcagctgggagccactgcgcgccagccacctggaccgcgcgctgaaaccggatgatccaaccactccacaatggctggcagaagcgttaggctagaggcagcccaacaggaaggattccaatgtcgtcgaagctctggagaaacgtggcgctggccggcgtggccgctgccggtgctgccgtgtgggccgtggccccgcgcacgttcaatgacaagcgtcgtaatttcgtgccctccattccgaaggtatggtatgcccatcgtggcttgcatgatgcgggttctggtttggtcggctataccgatatcgctgattatggtggggataattcggtcagcgcccaagccgataccactgagcgatccgtcgccgaaaacgatgattatgtgtcacttgcccgtcgcatggctgtcaaggccggctacggcagtgcggatatgaccggtccgatcgctcctgaaaactctctggccgcattcgccgccgcctgcgaggctggctatggcatcgaactcgacgtgcagcttacgctcgacggtcaagtggtcgtggtccatgacgccgatttgctgcgcgtggccggcgatccgcgccgcgtcgaagacctgacatatgacgagctcacccgcatcccgctgttccccggcagcaagcccggcgatctgaaggccaagccgctgcccggtgccgacgcgaatccgccgctggtggtcacgccttccaccgcccccgctggctactaccagcatgtgccgctgttctccgacgtgctcaaagtggtggctggccgtgcgccgctgattgtggaatacaagttcagcgacaatagcgcttgggatgctcgtaccgaggagctgatggagaagggccacgccctgcttgaggattatgacggtccatacgtcatcgaatccttccacccgggcgccgtgaactggtacaaagaacatcatcctgaggtgtgccgcggccagttgagctggccagccaaactggccaaggatggtctgttggaatggggtgccggtctgctggcattcgattggctgtctcgtcctgatttcgtggcctatgactggaccggtggcgctacgccgcaagtcaagctcgctcgttcgatgggtgcgatgccggtttcatggaccgtgcgcagcagcgacgagctcgcccagtgcgcgccctacttcgaccgccacatcttcgaagcgttcgtccccgacgcagtgtgaggttgagggcgttattgatgtgctcatggggcggttacaggctcatcgggcggtaacttgcccatggggcggtttgaagaatatgtgaaaccgcggaattaagccattttggcataccgccccatgagggttttaccgccccatggggcaattaccgccccatgggggatttcccgccccatgaggtatggcgttttacttgtgatatggctcgccagcgttgatcttataagcgcgatagatctgctccagcagaatcacgcgcatgagctgatgcgggaacgtcatcttcgagaaactcagcagaaaatcagcacgacgcagaatcgcgtcgtcaaggccgattgagccgccgatgaccagctgaatatggctggtgccacgcaatccaaggtcgttgattttggcggccaattcttcgctggacagctgcttgccattgatggcaagggcaataacaaacgcgccgtccttcagatgcttggcgatgcgttcgccttctttggccttgatctgtcggtcaacgccttcggaggcgtggtcaggcgttttctcatctgccacttcaatgatgttgagcctgcagtagcgcgaaagtcgcttggaatactcgtcgatggcgtcgcgaagatattgttccttcacgcgtcccggcgcaataatgtcgatttgcataaaaagcccatcacattggctcccctctctgaggggagccaggaaaatcagtcaattacgccatagagacggtcgccggcatcgcccaaccccggcacgatgtagcacttgtcgttgagcttctcgtcgaccgcgcacaccacgaccttgaagtcgatggacggatcgatgtgctcttccacgaacttgatgccttcaggcgccgcgatgatgttgatcgcggtcacgtccttggcaccgcgctcggccagatagtgcgtggcagcaaccagcgtgccaccggtggcgagcatcgggtcgatcaggaagcactgacgaccggacaggtcctccggtagacggttcgcataggtgacctgctgagtggggtgttcctcgtcgcgcttcataccaaggaagccgacttcggcggtcggcataagacgggtcatgccatcgagcatacccagacctgcacgcagcaccggcacaatgatcggacgcggtttggccagcttcttaccggtcatcggagcgaccggtgtttcgattggtgcggcaactacggacaggttgcgggtggcctcataggcctcgagcatcacaagctccgagacgagctcgcggaaagtggaggaaggagtgttcttgtcgcgcagcacggtgagcttgtgctcgaccagcggatgattcaaaacgtgaagttccatactctccagcctacccgtagttcgcggggaagtcacttgggcggcagtcgcgcgcgtatcgcacaccaatgtaaacagcgttcgacggcgggccgcgtaacaccgttgattttgtaacgtgagcgttatgtatgagacgcatatgaaatattcaggcaacggaaattcacgcaggcactgccatcgtatagtgcagtcggccggaagccagccgtcgatatacggcaagtggttcagcacgatatcaggcatcagggcacggtacggcaatcagcgtagacattccgcgggcgggcaacgttcgcggaatgtagtcgtatgtggggaggaagagccatatgactcgattgcaaagactgaagatgggtgctgcggtgtgcattgttgccgcagtgcttgccaccagcggttgtggctggggtcgcaccgtggccgagaaagaggcccaagagaacaacgcgactgcggcaagcgacacctcatcatgtgtggacacctcaggcaacaccatcaaaatcggtttcgtgaattcgctgtctggcacgatggccatttccgaacagacggtgagtgattcgctgcacatggccgttgatgagattaacgcaaagggcggcgtgctgggcaagcagctcaaggtagtgcagcaggacggcaagtccgagccggctgtgttcgccgaaaaagccaagaccctcatcgaaaaggaatgcgtggccgcggtgttcggcggctggacgtcctcttcgcgtaaggccatgctgcctgtgttcgaggcggataacgcgctgctgttctacccgctgcaatacgagggcatggaagccagcccgaacatcttctactcgggtgctgcaccgaaccagcagattgtgcctgcgcttgattaccttaaggagcaaggctacaagaagctgttcttggttggctccgattatgtgttcccgcagaccgcaaatcgcgtggtcaaggcgtacgccgagggcaatggcatggaagtggtcggcgaggaatataccccaatgggctccaccgacttcaccaccatcgtcaacaagctcaagttctccggcgcggatgcggtggtgaacacgctgaacggtgattccaacgtcgcattcttcaaggaatacaaggcttccggcctgaaagccgccaccacgccggtgatttccatgtctatcgccgaggaagaggtttccgctatcggcgttgacaacgtcaaggaccagctcactgcttggaactactaccagacgctgaacaatgcgcaaaacaagacgttcgtgaagaacttcaaggcgcgctacggagccaatcgccccacctccgacccgatggaatcggcgtacacatctgtgtacctgtggaagggcatggtcgagaaggccaagtcgttcgatgtggacaaggtcaaggctgcagcagacggtgtcaccttcaatgcaccggaaggcaaggtcaaggtggacggcgaaaaccaccacatctacaagacctcatacatcggcaagatcggctcagacaagctcatccacaccgtctggaagtcggacggtcccatcaagccggacccgtacctgaagacctacagctgggccaagagcctgagcgccagcgtcgagagcaactgagagaagaggacacaacaacatgggtatgttatttccacaaattgtggcaggtctgtccaacggatcgattctgctgctcgcagccctcgggttgtcgttgaccttcggccagatgggcgttatcaacaacgcccacggcgaattcatgatggccggcgcatacaccgcatacgtcatgagcatggtcatcggcaataaaacagtgtccctggccgtggcgctggtggtcggtttcgtagtagccggtttgcttggtttactgctggacgtgttgctgctggagcgtatgcgcaatcgtccgcttgatacgctgctggttaccttcggtgtatcgctggtattgcagcagctcgcacgcgatattttcggtgccactccggtctacgcttcggctcctgaagcgctgaccaatccggtgaccatctttggctacagcttctctgcaggccgactgttcatctttattctgtcgattatctgcgtggctgcgctgtacgcgatcctgaagctcacgccgctgggtcgccagattcgcgccacttccgagaaccgcgacctcgctgaggtttccggcatctccaccaagatggtcgaccatgtgacgttcttcctgggctccggcatcgccggtatcgctggcgtggcgctgagcctgctgaactcgattagcttcaacttcggtacgaccttcatcgtgcaggccttcctggttgttgtggccggcggcgttggccagctcaagggcgcggttatcgcctcgttcgtgctgggcttgtgccagtcgtccatcgaactgccgacctctgcctcgattggtcaggttgccgtgttcctgattgtggtggtgttcctgcagttcaggccgcagggcttggtctccatccgctccaggaacctcgcgtgagtgcttcagaagggtaaggaaacgacaatgaagatgactttgagcgaatacgccacgaaatataaggctttgatcggtgtggtcattgccgtggcgctgatcttcctttctccgactgtgctgagcgtgtacaacctcggcctgctgtccaaatacctgtgctacgcgatggtcgcggtcggcatcggcctggcttggggccaaggcggtatgctgacgctgggccaaggcctgttctttggtctcggcgcgtacgtgatggctatccacatgaagcttgaggacattggcgtgggccaagtgccggacttcatgtcccagtacggcatcaccaaggttcctggattctgggaactcttccgcaatccggtcatcgccgtgattggcgtggctgcggtaccgggcattatcgccgcaatcctcggtctggctgtgttcggccgtggcgtgcgtggcgcctacttcgcaattctttcgcaggcgctggttgccgcgttcgccgtgctgcttatcggccagtcgaaaaccaccggtggcaccaacggtctcaacgatttcaagggattctttggttacgacttgactgataacgccaacaagcagatgatcttctacatctgcgcgttcctgacgctggccatggtgcttatcgtctactggattcgcaaatcgtttatgggcgacctgattatcggcgtgcgcgaccaagagaaccgcatgaagttcttgggctataaccccgcctccatcaaggtgttcgccttctcggtggctgcaatgttcgccggcattggtggcgcaatgttcgtgccagtggtcggcatcatttcgccgtccgatatcggcgtgacgccgtccatcctgatgctcgccggcgtggtgatcggcggacgtgccactttgctcggcccggtggtcggcacgctgctggtgcgctttgcggaaacgcagctgtctgaggcgtatccgtccgcgtggacgtacatcgaaggcctgatcttcattctggtgattgcctttgtgccgaagggcttgggacagttcaagggcgtatggccttggattaaggagaagatcgggctcggaaagagttcggttggagcttcggctggtgctggtgctggtgctggtgctggtgctggtgccgttgccggtaccggtactgctactgcaaaggcggtgaacgcatgagtgaggagaagaacatgagctcgaatccatcggctcccgcacctgcatcgcaggccgatttggagcagttgcgcgccgaaatgattgagatgcgcgacgaagccaagcgtatgcgcgacgaagcggcccagatgaaggccgaaatcgttgaagagcgtacgaagctgcacgatcagcttgcggtgctggatgatcgcggcggccagtggagcgattatctggaagttcgtggactgcacgttgagttcgatggattcgtggccgtcaagaatcttgatttgactgtgcagcacggcgatttgcgattcctgatcggcccgaacggtgctggtaaaacgaccatcatcgacgcgattaccggactggtgccggccactggttccgcggaattccgtggcgagcagctgttgggccgcaagccgaacgacatcgtcaagctgggcgtcgggcgtaccttccagaccgcatcggtggttgaagagctgtccgtgttggagaatctgcagctggccgagggcttccgcaagaagggtcgtgagctgttccagccgatgggcggcgtttcgcagaacatcgaatacatgatggacgtgtgcaatctgactgtggatgcaaacaagcccgcaggcatcctgccgcacggcaagaaacagtggctggaaatcggtatgctgctcgtgcaggacgcgcacctgctgctgctcgacgagccggtggccggcatgactccggccgagcgtgtgcagaccggtgagctgctcaagcgatgcagcaagaaccgcacggtcatcatcgtggaacacgacatggatttcatgcgtcagttcgccgattcggtcacggtgctcaaccagggcgaaatccttgccgagggttcggtcgaagacatccaaaacaacgaagaagtagtccgcatctacctgggcggcggagaaaactaactccctgtctcccctccctgaggccgaggcgttaagcaaacagcccagtgggctgtttgtagccgaaggcgagacgatagtcgaaccagcaggttgcaggcaaggcccgtccttaattgcggacgagctgtcaccgaaggtgactgaggggagtaggtaagaggaagaagcgcaatatggaccgcactgacaacaaccatcgcatcccggaatgcgctttttcagtgcatattgagggtgatacaacgcgcctcaacatcaatatgcacgacgccgtagaaagtgaataatcatggcaatgcttgaagtaaaggatttgaacaccggttacggcaaagtgaccgtcgtcaacgacatcagtttcgacgtggccgccggcgaatgggtgagcatcgtcggcaacaacggtgccggtaagaccacgctgttgaaggcgattctgggcttgctgcccgtttcgtccggttcgattagtttcgagggcaaggacattaccaaggctgcaccgaaccaacgcatccgcaagggcatggcgttcgtgccgcagggccagcagtcctttggcaccatgaccgtggacgaaaacctgcacgtggtcgccgaccgctacggttcagaggccaaggcccgttacgacgaagccgtggaaatgttcccggtcttgaaggaatttgctggccgacgtgccggtctgctgtccggtggccagcgtcagcagctttcgattgcccgcgcgctgatcacccgtcccaagctcatgattctcgatgagccgaccgaaggcatccagcccaatatcgtcgccgaaatccagaaggccattcgcatgatggccgaagacaagggtatcggtgtggtcttggttgagcagaaggtccaattcgccgtcgagcgcgccgaccgctactacgtcctggcctccggccgtttcatcgccaccggcgaaggcggccccgaccaagtagaagccgccaaggaatccatgagagtgtgattgattcgacccccgtttatggccatagagcgttatgagaaacgtcccgttcttataacgctcttattattgggcgatgttagggctcacattggtgtgcctgaaaaactccagtcaacaacagaggatgttatgagacttacaccacgagagactgacaagttgatgctgtacttggcggggcagcttgccaaagaccgcaaagccagaggcgtgaagctcaactatgtggaggcgattgcgttgatttccgccgaatgcgttgagcgggcgcgtgagggaagcactgtggcggagctcatggcatacggtcgcacgctgctcaagcctgaagatgtgatggatggcgtggccgagatgctggaagtggtggaggttgaggccacgttcccggacggcaccaagctcgtctctattcataaccccatcgaatccaccgagaagttggtgccgggggaatatctgctggctgacgatgatttggaactcaatgaaggttccgaagacatcgagctggacgtggtgaacactgcggatcgaccgattcagattggttcgcacttccacttctttgaagttaataagtacctgaagttcgaccgtaaggcggcgtatggcaagcggttggatatcgcggctggtacggctgtgaggttcgagccgggtgaaacgcatcgagtgcggttgattgatattggtggcacgcgtgagattcacggcttcagcgcactggttgaggggaagttggatgaccctgaggtgcgggaggccgcgtttaagaaggcgcatgagcttggattctcgggaatctgagctaagggccaccctcagtcagcttcgctgacagctcccgccagcggggagcggactacctctcagtctcgcttcgcgagccagctcccctgacaaggggagctgaaaaacagcaaggacttttgacatgaagattattactcgcaaggattatgcgggaatgttcggaccgaccacgggagaccgcgtgcgactcggtgacacgaacctcatcatcgaggtggaaaaggactacacgcactacggtgatgaactgaagttcggtggaggcaaatcattccgcgacggcatgggccaaagctccgtgcagctcgacgttgaatcgccggataccatcatcaccaacgccctcatcgtggactacaccggcatctacaaggcggacatcggcatcaaagacggcaaaatcagcgccatcggcaaggccggcagcccgcagaccatgagcggtatcacccccggtctcgaagcgggctccggcactgaagctctcgccggcgaaggcctcatcgtcaccgcaggcggactcgacacccacatccacttcatctccccgcagcagattcgcactgccctcgccggtggcgtgaccacgatggtcggcggcggcaccggtccggccgacggcaccaacgccaccacctgcaacccgggagccttccacctgacccgcatgatcgaggccgccgaagcgctgcccatcaacatcgcctaccttggcaagggcaacgactccagccccgaaccgttgcgtgagcagattcgcgccggtgccgcaggcctgaagatccacgaggactggggtgccaccccggccgtcatcgacactgcactcggcgtggccgacgaaaccgacacgcaggtggctatccacaccgatactctgaacgaaggcggttgtgtggaagacaccatcgccgcgttcaagggccgcaccatccacacctaccacaccgaaggcgctggaggcggccacgctccggacatcattcgtgccgctggcttcccaaacgtgctgccgagttccacgaacccgaccatgccgttcacgcgcaacaccatcgacgagcatctcgacatgatgatggtctgccaccacctcgaccgcaatgtgcccgaagacatctctttcgccgactcgcgcatccgccccgagaccatcggtgccgaagacgtgctacacgacatgggcatcatctccatgatgagctccgactcgcaggccatgggccgcgtgggcgaggtcatcacccgcaccatccagaccgccgacaaaatgaagaagcagcgcggtccgctccccgaagacgaacacgacaacaaccgcaacgacaacttccgtgtcaagcgctacgtctccaagttcaccatcaacccggccatcacccacggcatttccgaatacgtgggctccatcgaagtcggtaagatggcggatctcgtgctttggcagccgtccatgttcggcgcgaagccggaaatggtcatcaagggtggctccatcgcctactctcgtatgggtgacgcgaatgcttctatcccgaccccggaacctgtctactaccgcgatatgttcggcgcgctcggccgtgcgcttggcaagtcctgcgccacgtttgtttcgcaggccgccgtggatgacgatatcaagggcaagctggagctgcagcgccaggtgttaccagtgcatggctgccgcacggtaggcaagaaggatctgaagttcaacgacgtgctcgccgacattcaggtcaatcccgaaaccttccaagtgacggtggacggcgaaccggtccactctgacccggcgtacgagttgccgcttacccagcggtacttcctgttctgagagaactggtggctctcctcaaaggggagagccacttggttttagccttcggccacgaaatcggtcacgaaatcggccacatctcgaatgaggtcgaaggcgtcgtcgcctcgggtggtcagtacacgcaagcagatgccattgattacgcggctcacgccgagctcgccggtgaagccgatggcgtctgcgtgttcatggatgcgagtgatgagcgcgtcttcggcggcgatgcgggcagtctcgatgcgctcgcggatggcggcggaggatgcttctttagttgcggcatcttgtacagcgtcgctagggtcgagttcgggcaggtgagcgtagagaacgccgcagtgggtgaattcgcgccacatgccgagttcggtgtagtcaaaagcatcaggttccaacagcatgcggtcagcaaaggccagatgttcgcgcggttgggcagcggcggcttccgccttggaaggccggcctcggcgatgtgcgtgctgttgcgccaattcggctgcggcggccttggtcacggcttcgggttcggccacatatacgcgcatacgattcgtaaaacgtttcatggcccaacgctcatccatcccaacgcggccacatgtcgccacatccgcatacacgaatgctgactcggcggaaatatgcgcggtggtcaggttcatgaatgagctgttcttgaacggaatcactgggaacggcaggaacacggctttggcattgccacgcgccctgagttcgatggtgcgttcggccgagccgtccgcggtgtcgaacaccttctcgtagctttgcgttttgatggtcgaatcggtgcctgggccgaagtcgatatcgatatgggcttcatcgcccctcaggaagccaggggaggcgagcatcacgacgaaatccgaatgacgtccgttggtgaacggggtcatcagtttgaacggcgcctcgaaataaatatcgtcgattttggtacgtccgtggcggaatgcagtggatagacgaaaagtgctactgcccatggacgaatcgctgccttcttatgattggtgcctgacgatgacatgggcaattatgccgcacttggtgcaacggtatgtttcggcccgtccgtttttggatacgggcgggccaaaacatcacatgtcctcgaacagcacgctcttcttgatccatgcgatgacgtcgtccactccggcaccgcccatcaggtcggtgaagatgaacgggcggtcgccgcgcatcttcttggagtcgcgggccatcacgtctagatcggcgtgaaccaacggggccaggtcggccttgttgatcaccagcaggtcggagcgggtgacgccggggccgcccttgcgtgggatcttgtcgccctcatcggtggcgatgacgtagattgtggcgtcggccaggtccgggctgaacgtggcggacagattgtcgccgccggactccacgaacatgatctgcacgtccgggtgggtgcgggccatttcctcacaggcctcgaggttcatcgagcagtcctcgcggatggcggtgtgggggcagccaccggtctccacgccgacgatacggtccggcgcgaggcgtgagtgctcgataaggaactcggcgtcttccttggtgtagatatcgttggtgaccacgcagatgctgtattcgtcagccatcttgcgggtcaggcgttcgataagcgcggttttgccggaaccgaccggtccggcgacgccgatgcgtacgtatgacatggggtttctcctttatgtgggaattagttaggtatgtggtttgcgggtgaggttatcctggctcccctccttgaggggagccaggataattagctcatgtagagcctcgagtacaagatttcatgctgcatggcggcgatgtcgaggtaagctccggagatgccgagatcctcgggcttcaacgtcatcgcgatattcaccgcgcgcacgaggcgcgggaacgaatcatgcagggcgacttggccagcgtactggctgagcggaatcgccttcgcggcgcacatggtaagcgcgctcaacagcgaatatccatacatgatggccgcgtcgcgcacgtcgttcgcatggtcagccgcgtacaggcccatcgcgatcgaatgcaggccacggcagcggcgctcgcgaatcagcccggcatacaggtcgagcgacggcgagccgtacaggccgtcggcggtatcgtgcagctggtggcgttcggtgtgatgctcgtgcacggcgatgatgctgttttcgcgcgaatccgcagcggatgcggtggcattgtcggcaggacttggcttggcgaacccacgatgcccatccgaggtctgcgcctggccggcatccatctgctcggccagcttgaccaggcgggtacacatgcgctcgctgccttcacggatttcacgtgcggattgcagggccgaggccagctcgtcaagttcgatgagtcgctcggccagccctttgcgggagactcgcgaatcggtggcgtacttgccggccagcaccatctgcccgatttccttgtacggtgcgacttcgaggtagttcttcatatactcctcgaaatcggcgccacggcgcaagaagtcgcgctgtacgaaggtctccatgccgttggacagcgcgaacgcgcccacggggaagacgctgtcgcacacctgcagcatggccagacgtcgcgattcggtttcgttgatgttcatggggctatcagtgggtgtgccaggtgcggccgccgtcgtggctgtgggagccgtccgggcggtgcagcacgccgttcatctcatattcgccgggctcaccctcacctgcgtcgtgtgtatgcacatccagatggccggcggcctcctcggccgggaattccttgtcggcctcggcttcctgctcctcctcggccacgtcgcccgtggtcttgttggtgcccggaatcagtgtgccggtgccggcgtgggccttgacgatcaggaagccgtcaaacccaccctcgatgatatgcggttcataaccgatcttcttcgtgtattccatggtcggatggtcgtacggcaccagcacgcggtcgttctcgaccttgagactcaggtggcggttgcccagttcgaagcacaggcgtcccatttccttcatcgagttaaccggaatctcaatcagctgtgcggttttaatgcgtgcgaaatagcgcttgtcttcggtttcggcgagcacatcgccatccttgatggtcttgccaaccatgatgccgaactcggtgccgtcctcggccaccttgcgcatgcgcttcttatcggtttcgaaccagtcgaaggcaatcgacacattaagtttgccgtcgctgtactgctgactgatgatgttgcctgtgatttctttggcgatcatccgttctccttggagaaaattgcttgtggcgtgagaatccccacgtccttcatgccacagtgtagagagcctgttgcgtcactttgtaacgaatgatcgaaaaatgcaaaaaatatagcggaaaaaatatccgaaaacacggaaaccggatatatggtacacggtgtgtcgctagtaattgcaagctattttgcatggttgtgcattagacgaatcacagttgtggtattacatatcacgttcctggagcgggaggttgtggtcgagctccgaaatcaacaaaaagagggaagttggatataatcgaagtacctgacaccgtcacattggcgatgcacattccggataatttcatttcgccgtccaccggggcgttgttctacgccatcatgattccggtgtgggtgctgtgcctacgctacgtgatccgcaacagcacgccggagaagatggcctacctgggcgccggcgcggcgttctcgttcctcatcatgatgttcaacgtgcccacgcccggcggcaccaccgcgcacggtgtcggcggcgcgctgatcgctctgctgctcggtccccagtacgcgacggtcgccgtgtcggtggccctgctgctgcaggcgctgctcttcggcgacggcggcctgatcacgctcggcgccaactgcttcaacatggcgttcgtgctgccgtttgtggcttacggactgtacgtgttgctacgcaaggtgctgcccgacggctggaaggaacgcgtggccgaattcgtgtccggctatatcggcatcacgctcgccgcattctgcgtggcgctggaactcggcgtgcagccgctgctgttcaaagccgctgacggccaggcgctctacttcccgttcacctttaacgtgacgattcccgccatgctgatcccgcacctggccgtagccagtgtggtcgagggtctggtgaccgtggtggttgtcgaattcgtgcgccgtaccgcaccggagattatcgaagacaatgcccgtgtgaacttcgccgagaccgccggtgctgacggcaaacaggtcgcacacgccggactgcgcaagtctgcgtggattgcgctggccgtggtggcggtgctttccccgatcggcctgctcgccaccggcgacgcctggggcgagtggggcgccgaggacttcatgagtgccacggggctcaactacgtgccgcagtacatcgcccatggcttctcgtgggatgcgctgttgcctgactactcgctgcagggtctgccggacatcgccggctacattctctccgcagtgattggcatcgccgtgctcactatcgtgttccgtctgctggcgctcgcggtgagcggcaacggcaagacatccgcgcgttgacgatacctgcatggatgcgtgagtcggaggattacgatcctccggctgacaagtcatccttcatcgaacacaacctggggcatttcggcagcgtactcgagcaggttggtcatgcgttgccgattgagtcgagcccggtcgacaaggtgctgggctcggtcaatccgggcgtgcggctgctgggcatactggccgcgattgtctgcgtcaacatcacatgcaacatgctgttctcgtacatcatgctggcggtggtgctgctgatgatggcgacccggccggcgcgcctgatgagggcgttgctcggcccggtgctggccgtatgcatcctgagcctggtcgtggcggtgccgaacctgctgattgggcagtacagtgcgccggttcggctggtggtgcgtgcgttcgtggcggtgtcgctggtgatcgcactggcgcgtacggtgccgtggaatcgcctgattgccggactgcgcgcagttggctaccctgattcggtgatttatatctgcgacgtgacgattcagttcatcgatattctcggtcgttcgatggtggagttgctggatgcgctgcggttgcgcagcgtgggccgcgaccggaccaagctgacgtccgccggccagttgatgggcgcgctgtttctgcgtgcgaatacgcaggcgcggcaaatggctgaatcgatggtgtgccgggggtttgacggtacgtatcatatccaccacgagcgtctgctgacgtggcgcaacggggtgtatgccgtgtgcattgctgcaatgattgcgctggcggtgtattcgggatgagggtggttcgaatgaatggagcccaataatgttcggattaaagcgtaatcataaacaaactgcagccatgcagccagataactcatggttccgcggcgacccgctggtcgaactgaatcacatcggcttttcctataaagattacggcgacgccgacgatgaaacctcgtcgcacgccgtgctacgtgatttttcgctgaccgtcgaacgcggtgagcgcgtggcgctgctcgggccgaacggcagcggcaagaccacgctgatgcgcatcatcaatgcgctggaatttccggactcaggcgagtatcggtttggcggtactccggtggttcgcgaggaagtcgaggcgaagaacagcctgttcgccaaagcgctgcatcagcgcatcggattcgtgttccaaagctccgacacccagctgttctgcccgtcggtggaagaggagattgcgttcggtccgttgcagatggggttgccggatgccgaagtacagcgcagagtcgatgacatggtgacgttgttcggcttggatcggatgcgggagcgggcgccataccgtctgtctggcggtgaaaaaaagcgtgtggcgattgcctgctgcatgtcgatgaatccggacctgcttgttctggacgaaccgaccgacggcttggacgagcgcaatactgacgtagtggttgaggtattgcgcgccttcactgatgccggcaagactgtactgttctccacgcatcaccacgacatcgtggagcggctcgacgctcgcatcgtgcgcgtgcatccgtcactatggcaatgacattcacgtggcgtctattggatatcttcatcgaaaaaagcagaaaggcatcggcgaggatcgcgagtccggcgagaactgcgatagtcgctttggtgatggttgccttcatgagagtttccccaaggtgttgacgttgatttcatgagattcgaaaaagagcgtatctaggccgaaccggacagtaagtcaacggtttctggaaaccagctgaaaaagctacggtattgtgaaatatgtctcatcggaatgggtcaagtttggcctagcgctcgcagtcgtgcgcgaagattcgttggattgattctcggtggattaagtcataggaagaaactagacaccttgcggtgtaaaaccgggaatcggaatggtgtaaaaccgggaatggaaatagtgtaaaatcgggaatgagaaaggtgtaaaatctatattgaggtgattgggtagctgagaaaggccggaaaatgaacgatttgaacaatcgtagtgataccttgactcaacctgattatcgtgctcgcgtggtcgatggcaggttaggtaagttacttaaagcattcggcgcggtggaaatcgtcgggccaaaatggtgtggaaagacatggacggcgctttcccgctcgcgaagtatggatcgtctggatgatgccgctacctttgcggccgcacagactgatccggcattggtactcatgggtaatgaaccgcatttggtggatgagtggcaagatgtgccgcaaatttgggatgccgctcgtcgtcatgtggatgacaatgcgaatcgcaaggggcagctgattcttacgggctcggccattccgaaggaccgagaaacaattcaccacagtggcacaggtcgaatttctcgcttgcgtatgtggcctatgagtctgtgcgagtcagggcaatctaccggtgtagtgagcttgtctggtttgtttgatggacaattcgagcctgccgaatgtgcaaccagcattgaagatattgccagatggtgctgtcgaggtgggtggcccgcaaatcttgatttggatgacgagtttgctctggaaattccgagtgaatatatcaagagtgtgcttgatatcagcgtgcccaagatgaacaagaaccctgaaaccgcgc

SEQ ID NO: 3209 - DNA, 11803 bp, Unknown
  R53_2m  MAG No. k141_4509
catatcggtgaactcgctccaggtggtcggcggattctccgggtcaaggccaaccttgcggaacagagtcttgttgtagatgtagccggaggcgttacacgcgaagggcaggccatacaggcgcttcttggaggaatcggtggtctgcaccagattcttggcgatctgcaccatgccggggttgagggtgtccacgatgggctcatcggtgaagtcgtagaaaacaccggatgcggcgaagttgccgaagctgatgtcgccgttgaaggtgattacgtccggcacgcggttcttgacgaagcgggtgcgtagatcggtctgggcgttggctgagttgttgatgttgaccttgatggtcgggttctgcttttcgaagtcggcgaccatggatttgaactggtctgcagcctcggacttgaactggaagaaatccagcgtgacggtgcctgcggtgctggagccgcagcctgccaggccgaacccgacggcgatcgcgcacatcacggcggcggtgcgcacggccagacgcttcagtctaggcgttgcatgtggggaatcggacagcataattgttgactcctttatctttcttttcctccggcttcggtgccggcggttcttccactttccaaggtaacggttcggccatttcattcccagcgccagcgagcccacttgcgcaagcaacaaaaagcgcggtattttgtgattaacgcaataaatacagcgaagggggcttgcatgtctgatgtcaacgcgattccacagtggttttccggatccgagcatacgcatcgcgtggcggcggcaattgcccaatacgggccgatagcccgcactacgttggcacagatgctgggactgagccaaggggccttgtcccgcatcaccagcgatctgatctacgccggggtgatcgaggagcttccggccgaggccggcccgtcaggcaagctgcccgagcgattcacgccaagggaaagttcggatcgtcgcggacgcccgcagacttcgctggtgttgtgttcgaacgcacgcaccttcattggtgtcaaggttcatgggatgtcgattgtggccgctgcagtgaacgcgcatggcgaggtggtgtccggccggcacgaggtgccgatcggggcggatcagtcggctgagtatgtggtgtcggccatcacgcggctggtgcgcgaatgttccgccgatatcgcctcttccggactgccctcccccactgcggtgggcgttgcggtaggtgggcatgtggtcgacgattcgattgtgacgttcgcgccgttcctgcattgggacggggccacggacttggggacgatggtcacagaggcgaccggcctgccgtgcggggtgttcaatgatatcgattctctgctggtggatgcctcctggttcgggccgggtgtcggcgtggatatgttcgccgtggtgaccatcggcgtgggtgttggttattcgctggccgtgaacggcaagccagtgcagtacccggataagagctatggtctggtgggccacgtgcttatcgatccggaggggccgcgctgcaccagcggacatatcggctgttcacaatgcttgactgacgattcgatcgccgaacagtactctgcgattgtgggtcgcgcggtcagttttgaggactttgcgcgcgatgccaagggacgtgtgccgcaggccacgcagttggtgaaccggacgtgtttccggttgggttcgctggtggctacggtggcgaacatcgcgatgcccggacatgtgatgattgccggggagtccgcgtttttggccaagctcggcaccgattcgctgcgcgatggcattcgtttctaccgtcacagccagacccagccggtcaagttcacgattatggaccacgactggcagctctgggccaaagccgccgccagtcgcgtaatcgtgaagcatattgggtaggccgttcttggctcccctcagagagggaagtcaagaacgttgcttcgccacagttactccgccacgaccagcaattacggacttgcctatcggcaaggctcaatcccaccttcgctcagctgtcgcttcgctcaggccgtggctactgacagcctactaggctgtcagcttaacgccacagccttgagcaatactgcctgctgggggtggagggacgggggacggatgccgtaacgctgcagggcttcgccggtcaggactacgccttcctcgttccaccagccgagagtgctctggccgttggccagaccggtcaaatccaagctcgggtcgagcgggctgacgcggtaggtgcgctcggggtcaagtccgggcaggtgcacgggcgcggccggataggtctggctggtggtcagctgggtgaagcggtagatggcggcgtcgcggttcggcatcaccatgccatccaagcgcacggccggatcgttggagtcggcgtgcacgcaggtgtcgatggcgaaccagtcgcggtgcttcttgaattcggccacccacacggccagcttggcgagcgcctcgtccggctccttcaacaggttccattcgatgcccgtgtggccgaagaacgccatggccatgcgcagttcctggctggtggcacgctgggtggagtgcgcgggactggcacccacgtgctcgcccatcatcgccggcggcaccagcagcgaggtgtagcgctggatgtccgcgcgctcgaccgggtccacgcagtcggagacccagatacggtcagcgtgctctaggatgccgaggtccacgcggccaccgccggaggagcagctttcgatctcaaggcccggatgtgcggtcttgaggcccttgaagatgttgtagacggcgagggtctgcgcgtgcacggccgggcggccggagcggcgggaaccgggctcggtgacgaacttgttgtggtcccacttgatgtagtcgataccaagctcgccgacaagctggtccatgcagccgtagatgtagtcgaacgcatccggattggtcagatcgagcacctgctgagtgcggccctgcagcggcagtcggccggtggtgggcgaaagaatccaatcggggtggttgcgggccacgtcggaatcggggttgaccatttccggctcgaaccacaagccgaattccatacccttggcgtgcacgtagtcggcgagcgccttcagggacttcggaccatcgggccagacgtcctgcgcaatctgccagtcaccgaggccggaggtgtcgtcgcggcgggagccgaaccagccgtcgtccaccacgaatcgttccacgccggagtcggcggccttgtcggcgagcgccttcagcgtatcgaagttgtggtcgaagtacacggcttcccatgtgttgaggatcaccggacggccgtgcgagaacaggcgcgggtgcagggagcgcacgtaggagtggaagcgggcggcgatctcgttgagaccatcgccataggagccgaacagccacggggtgtcgtaggagttctggccttcgccggggccggcgagcgtcacttcgccgccgaacaggagttcgccgccgccgatcacgccggttgtgtagggcagacgttcggcggacagcacggagttgccgctccagcccacgtgcaccgaataggcgtcgccatgctcgaagccgaaaccgggcacgccggcggtcaggagcagggatgcgtcgaagtcagggcggccggcgagctgcggcttttcgaaacggccgacggtcagcggctggcgctgcggactgcgttcacgtagatggtgaccggtggtggtgaggatttcgccggcggattcgggcagcgggaagccgagctcgatcttgccgatctcgagcggggctccggcgtctgcaccgaacaggttggttacggtggccttctgacggaccaggccgccggggagcagttcgaggtgccactcgacttccacgccctgctcctcatcgcgcgcggtgactatgacgccgggcacgcgggccgggccggtggcgtgggcatggccggccacatcggtgtagctttcgccggacacggcatcgagggtggcttccagcacgccgccggtctcgatgttggtcacggtgaacttggggaagagctcgacgccggcgcggcgcagcaccacgcgctgctcgccgatccagctttcggcctgggtgggcaggatagacggccaggcggtgtcgtcgagcgcgccggacacgcgctgcggcttcagggcgtcataggcggccagcagggtgtcgggcttggccagcgggcggccccagtggacgatgtgcggcaggtcgctgccggcaaacaccagaccgatcgccacattggcggcgggctgggtcaggtagacggcggtgagtgcggtgccgtcagcggcggcgccggtgaaagtggaggtgttctcggccatattgtctccttcgacgtgtgtggatttgcattgcactactggtttcgatggtagaagaaatggaatatgttgccttggtgccgcgtgttggttgcgtgaggtaagtaatgcgtccgtgtctatcgccgctgggcgaagaaatcagtcaggatggactgacactcgccttccagcacgccgccgtgcacttcaggactatggccgatatgcggatcgcgcggaatatcccaaatcgaaccgcatgcaccgagcttgggatcccaggcaccgaacgcgatggtgccgatatgggtctggatgcaggcacccgcgcacatcgggcacggctcaagtgtgacggccagcgtgcaatcggcgagattccaagcgcccaaggcttgggccgcctgacgcatggcgatgatttcggcgtgggcaagcgggtcgccatcagcctcacgcgtgttgtatccgcgcccgacaatctggccggccgcatccagcaccaccgcaccaaccggtacgtcaccagcggctgcggcctgaccggccagttccagtgcacagcgcatcgcctcgtcatattccataccaacgagtgtatgcctttttctcatatcgtctcatgatgtgcataatcggccgcaatcttaacgttttcttcatggttcccatatacttttggtggagaaaaaatacgagaaggcggcaacatggcggtatttgagctcatcctatgcatcattgcggcggtggtggtgagctcgtttgccagtcgcttcgtaccgaaggtttccacaccgctggtccagattgtgctgggcgtgctggttacgtatctgccgtttttcccggatgcaaagctcgacccggaactgttcatggtgctgtttatcgcgccgctgctgtatctggaagcgcacgaaatcgataagtcggcgttgctgaaaacgctggatctgagcctatcgctggctatcggactggctatcgtcacgatggcggcggtcggattcactttgcatgccgtctggccgtccatcaccttagcctcagccttagcactcggcgcggcactcggcccgaccgatgcggtggccgtcagctccctaggtaaagaagcctcgctgacgcagcgtcagcgcagcgtgctgaaaggcgaatcactcttcaatgacgcttccggcatcgtcggcttccagttcgctctggccgccgccttcactggcgaattcgccgtgggacaggccgccggcgaattcgtgatctccttctttggcggcaccttatttggcctggtgatagcagcagcggccaactggctattcgagaccgtgcgatccctcggttgggaaaccaccaccacacgtattctgatggaactgttcctgcccttcctgctgtatttgggcgcggaggaattcaatgtgtccggcattctgtcggtggtggccgctggcctgttcatccgattcgaccgtaccggcgtggggccgaatgtggcacgtacgaatatcgtttccacttcagtatggggtgtgctgagtttctcgctcaacggtgcggtgttcattcttctgggcatgcagcttccgcgcgccatgagggccagctggtctgacccgtatatcagcaataccgtgctgatcggcattattctgctggtcactctggtggtaatcgcgcttcgattcttctggattgcggccatgctgcgcgttgcgcgagatacaatcaccggccagcgccgcaaaatgacacccgaacgctggcgctcggccgcagtgatgacctttggcggccccaagggaaccatcacgctgtcattgatgtttaccatcccgtattacattgccggcggtgcgccgttcccgatgcgtgacgagctgattttcattgcgtcaggcgtgattatcgtgaccttgctgctggccaacttcctgttaccgctattggccccgaaccgtggcaaggatcccagcgcggaaatgattccggtgaccatcgatgtgttacgcgccacggtggaggaattgaccggacgcatcacgccagagaatcgccgtgcgattctgatggtaatcgaccaatacaccaagcgcatcggacgattgcagcagcgcatcggcgataccgatcctcagggattcgagcaattgcagatcgaagcgctgcattgggaaaaggaattcgtgcgcgaccgacttgccgacaccaaggcgcatccggcggcggatacggccacgcaagagctgaacgtcgaagcctgcgagcgcatgcttgaccagattatgaatacgctgcgtcacacttccactgatccgacttcggggcatgcggtatcgcagattcgcggtcgcttacgcatgttccagcggcagatgagcaattacgccaaacgcacggtgtccaagattcgccataccacaccattggtgagcgaggatcagattttcgcgcgcacccgcgaactgcaggtcgaggcgattcatcatgttatcggccggcttattgacgagatgggccaggatacgtacaacaccgagcattgttcggcgctgttgctggattatcgtcgcgctgaggcttcattgcaggcacgtccgaatatgagcggcactacggaaaccatcacgcaggtcgaggacgtaaagcgcgagagctacggtatcgaactcggtgtgattcaggacatgtacgaagccggcgacatcaaccgagcccaagcccgctccctgaggcgcaacatctacgttatgcaggtcgatgccgattccggcatctagtttccttggctcccttctctgaggggagccaagttggggattgctatttccgtatgattctcttcagtatgtgcagtagtgcttgcagtgctcacttcgctcatgggagaacagtctatgaccgcgccggccacaagcgccctcgatgtccgattgctgtgacggccgcgccaattccagtgatggcggctgactacagcacgccagaggtaatgtcgttgtcgagcagccactggcgcaaatcggcgaactcctcaagactcacattgtgatccagaccgtggtagctcttggttttcagccacgtatgctcttccaaccaagcggcggtggcgaacagttcgtatttcgggattacgccatcgttcttgccgtacgtatagaacacggggatatcgtaatcggccaggcgagagtcggcgggggccgtgccgggcacctgaccgggtgtgttgaagccggacagggagacgacggcccggtaccgctcggggttgatgcgcaacaaatgcacggcgaccagtccaccttgcgaaaacccaagcggcaccacgtcacggtcggcgggaatgttgtcggccacccatcggtcgactgctgtggcggcggcatacgcgtcgtagtcacgatcatcgccgataggcagggcatcgtgaaaccacgcgtagttgccggggtcgggactgccttcacgggccggcgcgagtgtcagcggcccgcgcaatgccacgaagtcgttatatggagcgatgaggcgcatgatgtccgccatgtcttcttcgctggatccccatccatgcaggcacaggaacagcggatgcgtggcatgctggtcgaagccgccgcgcgaggtgacgctgtgttccacggtgagtggctcgccaaaacgtccaggcacagtggtggattcgcggccgatcagaggctggctggcattcgcttctttgctcataccaatccaatatagaggtcttgcgcgctgtgcggaaaacgatggaccatgatttcagtcacattgggtaatccgcgccgaatcgccttgggactttccaggggataccggcaatctgtcaggcattaccgctgtttgcggctgcggtgtctgtggctgcggtgattgtctcaagttcgccgccccactgctgctgcagtgcggtcatcttgctgccctcgccgaacaccatccagcgtttgccgttcagcaatcgccaatcacctttcgtttgctcattatcagcgtattggctcagcagttcggaaatcttgctttcgataggtgcccggctgatggctgcggacgattccgattcaaaggacacgaaggccactctcggatcagtgcacatctgtacggtggtgatgcctggcaaaccgcccgtatcaagcccctgccatccttctttgcacgcgccggcagcttgttcgatgcctcgctccatctgtgcggtatcttcgacgggtgccttgtcgttcgactgctgaatcagtccttccgggaacaatacgcccatggccacgccgataaccaagcaaactatggcgcacaccagtgcgatgatgccgcccgcgcccactcccccgtgagtggcgtaccgaggcatggtgactcgcgcagcgatgaccagaatcagggtgatgctgataagcaccgccgccgtcaacgcaatgtatcgtcctggcactgccgtcataaaggaaatggcgtaaggcgcgatttcatgaaccgccgaggtggccgataccacgacggctagcagtccgctgacaacggcaagtctgcggcacaatatcgacgttgggctgctggcttttgtagcggcgaatcgccggccggcattccgcctggatgggcgtcgattctgtgcacgacatgagctgcgcgaatcgtcatactgaccatcgccgaagaaatcgtagtcctcatcgttgcgggccatcggtgcccccttcctgccgattacacagccagtgtaccgctatggcttgggaatggcggtcattcgggggaatgattcagggcaaaaaagaaccccggcggttgcccgccggggagagaaaggagagagaagaagaaagggggttcaattgtcgggaactgctgcggctcctgatcagctttccgctgacatcatttatataaccactgctttctgggtctacctctaagtttctctgagaaaaacctgagaatacttgcgattgatggaccgcggaagcgtgaggagcctctcacgtttccgcccaaggcgctagacttgaaggcagtatttatttgcccaaggagtttttcacatgctgctgtccgaccgcgacattctcgccgcacagtccgcaggtcatatctcacttgatccgtggacccccgaaatggtgcagcccgcttccatcgacgtgcgattggatcggtacttccgtttgttcaataaccacgcctacacctatgtcgatccggcggaaaaccagggcgcgctcaccgaacagttcgaggtggatcccgacgaaccgtggattttgcaccccggcgagttcgcactgggttccacgtgggaatacgtcaagttggacccgtccattgccgcccgtctggaaggcaagagctcactgggtcgattgggtattctgacccattcgactgcgggcttcattgaccccggtttcgaggggcatattacgcttgagttgtctaatgtgtcgacgctgccggtcaaactatggcctggcatgaaaatcggccagatgtgcttcttccagctgagctcgcccgctgagcacccttatggctccaagggcaccggctcgcattatcagggccagcggggtccgacgccgagccgttcctacgagaatttctaccgcgcgcacatcgacgactgagcgttgcgacgtaccattcggccggcggatgccggccatttgcttaatcccaaggagatgtcatgaccaacagcgatggtgggttccagttcgacttccagcagcacgaaaagccggtcaggccaacggttcctccgattcccgggcaagagacggcagcatatggcgcgcagccagcgacacaagccacaccggctctgcagttcccgcaatctgtgcaggcagcacagccgacgcagtttgcacagccgacgcagcccatcgatcaggccatgacgcaaccgttctcgccgcaattcccggctgcggttgccgcacaagcaccacagccggcggcagccacgcagccagtagtatccgaaacaccaatcgccgctgcgcccggccagcagcaatacgtttgggatcagacgacgcaaagcttccgcccggtggaaccgacagcgccggtgacgccagccgcaccagcggcaccggcgacatcgcctgtttcggcagcttcaaacgccgcggcacaagcgttccagcccagtcaggccgagcagcctgcggtagatgccgaggcaacacaggtgttccaacctgattcagctgcggccacacaggcatatggcgcatcatccaccgtatccggtgagaccgttgccatgcctgcaacgcaagtagcgtctgccgatgatgctgcagccacacaggtgttccaaccggccgccctggccgcttcggcacaggctcagcctgctgtgatgcctccctccattccgttggctcaggtctccgatgaggacgattccgatggcgccgagcctcgtcacggcggtagcggcaaaaagaacaccctcaaaatcgtcggcattgccgtagcggtagtcgccgtgatagcgctggttgtcgccggcctgctctggtggcattccaacagcagtaaggcgagccaagccgtggcactggccgagtgcaaggtagcggccaagcagtacacgaatgcgcagaagaagctcaccaccgccatatccaatggccaaaccagcgcgcaaacatccaccagcgatgtggccgatgccaatacgctcaccacgctgaatcaggcgttgcaagacgccggcaatccggctgacaccgccaagtgcgattccagcctcaacgccactgagctgaagtctcacactaaagagctgcagaatgatgccagcgacatggctgacaagacggatgccatcaacaatgcgatcaaggccgttaatacttcaaaggcgacggccgataccgacacactgaaatcgaacctgagctcggctatttcgcaggcgcagggcacactggataattccgcgggcagtgtggccgatgagaacacccgcaccgcgctgcaaaacgccatcaccgaggccaatacggtgatgaacgggaccagtccgtccgaatccgacgtcaacaatgcgatttctagactgcagaaggccgagtccgacgtcaccgcctcgatgcaggccaagcagcaggcagatgccgccaagcaagctcaggaagaggctcggcagaaggccgaccaagaggcacagcagaaggccaagcagcaggcacagcagaagtctcaagacgggtccacctctactgacgaccccgacggcagccacaactgaggtctgcagcgttctcccgtttcccatggggcggtaacttccccatggggcggttagcacattttcctttttcgcggaataacgccgttttcagcgaccg

SEQ ID NO: 3210 - DNA, 8801 bp, Unknown
  R53_2m  MAG No. k141_4608
gggtccacggtccattcctcagcggtgttgagcaccacgaggtcgacattgtcggcgtcatccacgcggctcaggtcgagcagtcggttgacgccttcacgctgcggctgagcgtcgctctcccccgcaatcacgccatccggatcatccccagtgggcgcgggttcggcgtagtcctcgaccagcgcggccacgtcggttggcacatgccccatgagttcggcgggtcccacggacatgagctcgatcagacgctcatcggaaatgaagccgccgtcgacgagcaccttgtggcacacgccgtacgcgcattccagtccgatgatgccgttgggcgcctcaaggaagccgagttccttctctgccaacgtgtgcggcgcatggtcggtggccagcagatccacggtgccgtcggcgatggccgcgatggtggctttgcggtccgcttcggagcgcagcggcggattcatcttggcgagcgtgccgtacttgagcagcgcctcgtcgctcaacgccagatagtgcggcgcggtctcgcaggtgattggcaatccttcggccttggccttgcgaatcgcctcgaacgagatggcagtgctcacatgctggaagtgtacgtggacaccagtgcggcgggccgcttctatatcgcgggccacgatcttgagctcggtgtcttccggaatgccgggcatgccaagctcgcgggaaacggggccttcgttcacggcacctgtatcgtgatgctcgcaatgctcgatcaggtacaggtcggaggccttgacgttctccagcacctgatccaggatctccggcgtcacggcggaaccgtcgtcactgatcgcggtaatggggtgcgtgagcatggccggcgtcttggcgtcgtcctcgaatccgggcacgtacttgagccaatcggcaacgtcgcttgcctcatgaccggcgcgatccttggacgcgcacacgcacagattgtaacgaaccggcaattgaacatcgtgcgcagtatcgtactgctgcaggaagtcgatgacgttgtcgaagccggcatccagaacctcttttgcaccggtcgcttccgggtcagacacggtctgcccatccagtgccggcaacgtgttcggcatgatgagcacgttcgtgtatccgccggatgcggacgcgcggcagccggagaccatagattccttgtaggtctggccgggatcgcggaagtggacgtgtgggtcttcgaaaccgggggccacggtcaggccggtggcgtcgatgtcggcgccgtcagccacggcggaggtgtcggcgaagtaggcggcagcggtcctgggcaccacgaggtcgatgacctcgccggtgttccagaccttgatgttgcgtagggtgatgctcacagtttggcttcctcgtcgcagtagtcgcagcggtattcgagccgttcggagtgcacgaggtggaacatctgcttgatgccgggctcggtggtggtcacgcagcgcgggttcacgcaggagatcacgccgacgatgtgctcgggcaggttcggctgcttcttttcgacgatcttgccgccgcgcaccacgtccacggtggcctggcgggccacgaagccgagcacgtcgaggtcgatgtccttgtcatcctcgattttgatgatgtccttggagccgtaacgcttggagttggcgttcatgatgagcgcaagcttggttttggccgggtcgattttcaggtattcgagaaccttcagcgaggttccagccgtcacatggtcgataatgatgccgttctgaatgctggtgacttccatcaggcatgaacctccttggggttgagcggttcgtatccgggcagttcgtcgcccaccacggtgctttcgagggccatgcgcacgagcatgccgttcttgacctgttcgaagtaggcggcacgcgggtcgtcgtccacgtccacggcgatttcgttgacgcgcggcagcgggtgaagcacggccatggacggcttggcgagctgcagcttctctttgtcgagaatgtaggtgtcgcgcaggcgcaagtagtcgtcttcgttgaagaagcgttccttctgtacgcgggtcatgtacagcacgtcgaggtcgccgatcacggaggccaggtcgcgcacttccacgtaggagcagttgtctgtggcgttgatgcggtcgatcacgtactgcggggtcttgagctcgtccgggctgatgagcacgaagcgcacgttgccgaagcggcacagggtctcgatcagggagtgcacagtgcggccgaaggtcaaatcgccgcacagtcccacggtcaggtcggtgatgcggccgaagcgcgactgcagcgtggccaggtcggccagcgtctgcgtggggtgcatgtggccgccgtcgccggcgttgatcaccggcacggatgcggcgcgggaggccaccagcgcggcaccctccttcgggtggcggatggcgaccacgtccacgtagttggacacggtcttcaacgtgtcggcgatggattcgcccttggtcacggaggccagctgcgcgccggcgaatccgatgaccttgccgccgagacgtagcattgcggtctcaaagctcaggcgcgtacgggtggagggctcgtagaacagcgtggccagcactcgcccatcgcaggtatgggcaacctctttgcggtgggaatcgatgtattcggccttatgcagcaggtcgagaatctggtttgtagacaggccgtccagcgttacgacgcttttgccgaccattggcgtttcttcagacaaggctcaccttttcgctcgtggttttcaggtggccacccttgtgtgacctaatctaacttacgccatttttcggacagccgcattcaccgagtgttcacctgaaaatccaacgaatatgctgtgtctgtatagctgatatctgctttggaacgccagagctcattcattaggtcgatttgacgttcattaggtcactgcaccctcgtatctgttgttggaatgccgccattccaacaaggtatgcggcggcggaccgacctaatgaacgatgaatcgacctaatgaacgtagtgaacgcaatacaagaaaggtctatcgctgcgcgcggcgtcgatttcgttccagtcgcggcgcgatcacgtgcatacgtgggcgaggggcggtttgcggctgctgcgttgcggcggaggccgtggcggtggttgccgcagtcgcctcgtcttcggtctgcccgtagaacaggcgctggcatacgtcacggcatttgcgcatcacggccagcaggtcgttctcgaaatgctggccgcggtgggcgccgtagccgaggtaaacggcgatgccgcccagcgaatagatgtcatcaggcagaatatcggcctggttggcgcgcccgctccacagatagttgccgttgcgggccgcggtgcacaacgtccatgccttgcgcagctgaatcgcatcgatagcgctgatgagcttcttggcctccagcacgtccaatgcctccaatgtgccgttgacgcgcagatctttgatatcgccggcgtgctggagctgcatgagttgcacggtccattccacgtcagacagaccgcccttgccgagcttcagatgacgttctcgacgcacgccgcgcggcagacgctcggcctccatacgggccttgagcttgcggatgttctgcaattcggcctcggtcagctccgtggtcgggtagcgcaacgggtcggcgatgttgatcaggaagtcccgcgccagttcggcgtcgccggccgcgtaccgggcgcgcagcagcgcctggcgctcccaggtcgagacccaggattcgtagtattcctcgcaggaggcgtaggagcgcacgagcgggccgttcttgccttccgggcgcaggtccaggtcgagttcgatcttgggttccagcgtcgtcgggccttgcaggatgttgcgcaggtcttccacgaccttcttggcgaaggcgttggcttggctgtcgtcggcatcgtcggccggacggtagatgagaatggcatccgcatcggagctgaagttcacttcgcgcccgccgtaacggcccatggcgatgacggtgatgccggccggcgcggtttcgacgccgaacgcggcgatctggtggcgcacggcccaggtcagtgaggcgtcgatgatcgcgtcatacacgtcggtcatggccttgaggctgtcggagtcgctgatcacaccgctcatccaagacaggccgatgcgttcgatttcgtggcggcgcatggcgcgcatggaggtggcgaactcgttgatgttcgagccgaaacgttccagcgccgagccggtctgcacatccaatgcctcgcgcgtgcgggcctgcagattgccgtcatcaccgagccaactgatcgattcgaccgacttgttgagcgcgtcgcccaggaatcgcgagttggacaggatgtggcacagacgctgggcagcggaggtggagtcgcgcaggaagccgaggtagccggattcggtgccgaagttctcctccagcttgcgccagttgagcaggcccatgtccgggttctggccctcgcccagccactgcaagacggcgggcaggatgatgcggttgattttggccgcgcgccccacgccggcagtgagcgcctgcacgtggcggatggcggcgtccgggtcgccgaagccgatggattcgaatcgttcctgtgcggcctcgacgctcagcacgatctggtcgttctccatctgggcgttgaccggcagcatcgggcgatagtagatgtcgaggtgcaggtggcgtacttcgcgacgggtgtcgtcgtatttgtcgacgagttcttccgggtgcaggccgaatgcgcgggcgaggcgacgcagctcctggttctggttgagctcatccacgtcgatgtcgcgcttcttttcgaggcctccgaccgaggcccggccgaggtccgggaacaggtgcgtgcgcttcagggaccagatctgctggcgatgctccatcacgcgctcgaagcggtagtcctgggacatgcgcacggcctgtttgcgcgagacgtagccgccttcggacaggcgctgcagcgagtcgagcgtgttgctggtgcgcagcgattcatcggtacggccgtgcacaagctgaagcatctgcacggtgaattccacatcgcgcagaccaccgcggccgagcttgatttcgcgatccttcagaggtgcgggaatcagatcttccacgcgcttgcgcattttctggcagtcgtagacgaagttcttacgcttggacgcgctccacacgaacggccgagtcatatccatgtaggcccggccgaggtcggggtcgccagccaccgggcgggccttgagcaacgcctggaactcccagttctcggcccactgctcgtagtagttcttgtgcgaggagagcacgcgcaccagcgcgccgtccttgccttccgggcgcaggccgccgtcgatctgccacagcggctgctcggccacgcccatgatggcggactggcagacacgctgcagcatggtgcccatcttggtgcccacgcggatcagcgtctgatggtccacgtccttgtcggccggttcgaccacgtagatgaggtccacgtcggagacgtagttcagttcctgtgcgccgagtttgcccatgccgatgatggtgaagcgcacgtgctcgctgccctcggtttcgtggcgggcgatggccagcgcgccttcgagcgccgcgtccgcgaggtcggacagttcgcggctgatggtcggttggatggaggtcgggtcgtccgccacggcatcctgggcgatgatggcggccagttggttccggtagctggaacgcaaggccgtggccgcttcggccagatccttggaggcgacgggcatggccggttcgtctgggtccgcgccgaccgccttgagcagacgtgcacggcgttgcgtgtgattgaacagatggctgttgcagttgtcgactgctgcagcctccacaagctgcggcttgaagcgcatgaacttgcccatcgcgtcggagacgccgagcaccgtgaccagacgcttcagggcgtcgttgtcggggatgacgtgtttcagatcgcgctggctggattgcatcgcgttgacgatatccacgaaattgctcaatgccatatcggggtcgcaggcgtgggccagcatgctcagcagttcggcgcatcgctcatcgggaatgtcgtccgtcttgagctggtcgaacaaggtgcgggccttgtcgaggtcttgcagacctgccctgatgagatccatggagctgggtttgaacatcgacgattccataagattccactatatacgctcatgccctccgaatggggcatgagccgggaaggagtcatcgggcgacgctgatgagctccgaggaatccatatcgtaatcggccatggcgtaggaacggatggcggggtcatcataggtgttcatgtaataggtgttggtcttggacgaatatccgctggtgaacagcgtgcgttcgaactggccgtcgcccatcttcgccatgccgtccaccatctgcacggagccgagggtgtggaacaggcgagacacattggcggcttcatcgttctgctgcgggtaatgcgcgttggtgtaggccacacgaacgaagcgcgacggggaactcacgtcgcccgggatgccatgcatgcccacacccgcaccccaggcggtcaaggaggccttgccccatgaagtcggttcggccatctcgttgctgacgcacatgtagttgcgcagattttccatatggaagtcgaacgtcggctgattggtcagcacatcaacgtcatcatgatgcacgtgcatgccatcggccatctgctcgacgacgatgctgcgcttgccgtcgccgatgaaccagtgcagcagagactcctgctgtcccggcacgatctgggagacgagcgtcacgttcctgagcgccttctcgacctcgtcgacggagtcgaaattacgcgccacccacagcggaaattcgaacgtggcgacgttttccgtgccttcgaccggttcgtggacgaacgaggcgtagccggggaaattcaagccggcgatggccagaccatgttcattggcgcagtcgaaatacatcggcctatcggccatgaccacgcccacgccgatcaccgcgttcggcttcgctttgccgcccgcaccgaacaccgtgtcatagcggtagccgcgcggagtgaccaggatggtctccccatatgagaaactccagtcgagattacggccgaaataggtgttgccctcatcatcggagaaacggacaccagtgcacataacggacttccttccatcgctttggttggcttgtacgttcatgatatccatcggccgctgggggaactctgggtttcgccagcagattaacgtgcggcgcgacgcattgagatgcgccgcgctgcgatatgcgtcaaccttgcgtaccgaggaacaacggttccgcattgcgccagatacggcgcgtggtggcggggtggttcatcgaatacaggtggacgccgtccacgccgtgggccacgaggtcggcgatctgctcggaagcgtagaggatgccggcggcacgcagggactggatgtcgtcctcccacttgttcagcagggtgttgagcttgtccgggatacgcgaggcgttgcgttcggccatgcgacgcacggacttggcaccacgcaccggcatgatgcccgcctcgatcggcacggtgatgccggcggcgcgcgccttgtcgaggaagcgatagaagtcctcgttgtcgtagaacagttgggagatcaggtgagtgacgccggcatcgaccttgatcttaaggttttcgatgtcctggtccagcgagtcagcctggtagtggccttccgggtagcaggcgccgaacactttgaggcccggcttcacggagcggatgtatgacacgaggtcgctggcgtggttgaactcgcctaccagctgctcgccgtcgatgtagtcgccgcgcaatgcgagtacggcgctcacgccggcctgctcgaacatgtcgagggcctcgtcgattttcgccttgtcggaatacaacgcggtcagatgcgcgactgcgggaatgccgtactccttgctgatcgtatgagcaatgcgcgcggtggcggtgcgatccgaatgggtgccgtggccgtaggtcacggaaatgaagtcggggttcagcccctccaggccgtcgagggtgtcatagatggtgtccacgggagcgttgcgcttcgggggaaagacctcaagggtgaacatcggggaatgcatgctgatttccttacataaacccgagctccctcatacagagggagctcggtgatttccgctacttgtcgagcttggcgcgcacggccttggcggcggcgaccaggttctccaggctcggccaggtctcggcgttaccacgggtcttcagaccgcagtcggggttgatccacaccttctttacgtcgatcttgtccaggatctcgtagatgcgatcctcgatctccttctcggaggggatacgcggggaatggatgtcgtacacgcccggaccggcttcggtctcgaaccgcgcgtcgtggatggcgtcaagcaccacgagatcgccgcgggacgcctcgaaggaaatcacgtcggcatccatcgcatcgatgtcgcggatgatgtcgttgaactcggaatagcacatgtgcgtgtggatctgggtggtcggcttgacggcggaatgcaccagacggaaggccgggatggcccagtcga

SEQ ID NO: 3211 - DNA, 10215 bp, Unknown
  R53_2m  MAG No. k141_4717
ctctcgaaaaatttcgtaaaacatatgcccaacgattaggcaaggaatacgttctgcatccccgccaactcgaagtggatggagaacgcatcaagctgccgttgtatatggcccactgtctgtgatttgtgctgattgatgcatgtttgggctgcaaggttcaggcagtcgaagagtgtccgttccgcataggacatccgtgaatatggctggactcacactggctcgactgcagggaaaggagttggcatgggatattccatcggtcaggtgtcgcgaaagactgggctgtccgaacatacattgcgctactatgacggccaaggtcttttgcccggtatcgcttgaactggtttcggacggagatgcttcgatgacggcgatcttgaattgcttgatctcattgaatgtctgaaatccacgggcatgagtctcgcagagatcaaggattttgttgatatgactaagcaaggtgatgccacgctcgaatcacgacttgctgtttttcgcaatcagcgacatgtggtgaaacgtcaaatcgtcgaattgcgacgccggtacatcaaacttgacgtggtcattacatccggtgcctcttgcacctcgtcgatgaaaatcaatgtaccgccgggagtgagcgttgaaggtgagaacaaggtaagtcggttgatgaactcctgcgcgtcattcgccgatgcgagcgcgcgggcctcctgcttgttctcgtacaggttgatttcaaggtaatgagcgtattcgtgtttggcgaactcgcgtaccgcgtagctcttgccgatttggcaggcaccggtcagcagcagtgctttgccggtgccgatcagcttccattccaacagatcgtccgagatcttgcgctcaagcatggcagttcctttccgaatcccttatgggagtagcattttctgccttgtatgtgcagaatgccgcatttcaaaatggggttttggcgcaaaataccgcatttcaaagtagggtttggtgcaagatgtcgtgcaaatggtgaatcgggcgtgtttgtaggggcggctggatgactgtgcggctggactgttgtgcggccgcatgcttatgcggccacaagtcgtgcgggctgttcgcaaactatgcgcggtcggccggcattcgcctgcgcttgaggtgttcgataagcagctcacactttttgacatcctcggcggtcgaggccggtaggtcgtcggaggaggtgtcgatgatgcgctgcaggtagccgtgtagggtttgtagctcggtttcattgagacagtccagcatggaggaggtctggtcgggcgctttgcccagcagatcggcggccttgcggccctggttggtgaggctgaccatcatgacgcggctgtcccgcctggatggacggcggctgatgtgaccgctggcctccagtttcttcaacagttcggccatggcctggcggctcatgccgaacatcgcggccaagtccttctggctggtctggtcggattccctgagcgtggccaagacgcggccttggccgcggcgcgggtcgaaagcatgttcgccgcgcggcgatttggcgccgggggagacgagccgtctgtgtatcgcgcgatacgccatgatgcggccaatgctgatgaaactgctgagaacatcgttcttgatatcgccgtcggcggtgttgtggcttgtgccgttctccgccgattgactcgtggccattacgttgtcgaccgcgtcgtttccggttacggcggcgttgttgctggtactgctcatgttcggaatccttacgtcagtgctgcatgttgtcgccggtggattcgccgcgatagcgcatcatcatcgagcgctgcatctcctgcgcgttcggcggggtccaggtcagcgcgttcgcgccggccacgatggtttcggccatggactcgtcggtcgaaccgccgctggcgagcagcgggatggaggggtgacgctgcctgatctgctggaccacgtcaggtgtcctgcggccggccgccacgttgatgatggaggcgccggcctcgattttctcgtccaattcgtcatcgcaggtcaggaccgtggcgatgaccgggatgttcgtgatgcgcgccacgtcgtacaccgtggagggtggcgccggcgcgttgagcactacgcccgccgcaccctgcatctcggccatcatggcgagttggatgacgcgcgggccggtggtggtgccaccgcccacgccgacgaacagcggggcctgggccacggtgagtagggcctgggtgatgactggttcgccggtgaacggatatacggcgagaatggcgtcggcattggtgttgcggatgatggccgcgtccgtggtgaacgcgaacgagtggagttggcggccttggacggtgatgccggaagtgcagctgatgatgtcgggaacacgggccgcggaggagctgatgcggttttcgatggggttcggtccgtctacttgacgggattccgggtcgtattcggtgaggtcgttgctcatgtcatgtgtgatgttcatgccggtctcctttaataaggaagcgagcgaagcgtcgctggtcgtgtgtctttttcatcctcttcagtaattatgtcaagtacctgacagatatgagtatacgactccatcaaagattgtcaagtaccttacgtattgctgttgtgtcgcatttttcgacaatgccaacatgcgtatgttgtttgatgcggatctgagtgtggaacggctgattcccgcactgtcgatcgagtccggaactaagatcactcccgaggatacgctcgtcattttcgatgaggtacaggaggtgccgagggcgatgacttcgctgaagatgttcaatgaagtcgccccggagtatgacgtcttggccactggatcggcgctgggcatcgccatgcatcctgggttttcattcccggttggcaaggtcagtagactcaagctgtatcctatgtcttttgttgaattcctgtatgcgtgcaaacagtatgccttggccgaaatgcttgagcccaaggattttccgctaattaacgtaatgcatgacagggtcatgacttggctgcggtatttcatgtatacaggaggcatgccggagatcgttgaagcgttcgccagtactctgccgaatcctgacttcacggcggttcgtaaattgcagaatagtctggtctccgattatcgtgacaatttctccaaacatattgatatgcgtgatagtcccgccgtcaccacgcttcgtctcaatcaggtatgggattcaattccttcccagttggcgaaagagaacaagaagttcgtatacggcgtggtgcgagctggtggacgtggcaaggattttgagagtgccatacagtggcttgtcgatgcgtcgttggcgttgcgcgtgaatcgggtgagtgcgcctcttgaaccattggcggcatatgcagacggctctgcgtttaaactgtacagcctcgatgtggggctgctaggagcgttgagcggtctgaatgttcgtgtgttgctggaaggcgacgcactgttttcgagagttcaaaggttcgatcgccgaacaatttgtatgccagcaattgaccatgatgaacggccattcaccctattgctggtcggccgagaactccagtggtgagttggattttctgttcgagaggaatggcaaagcggtgcccgtggaagtgaaggaggggactcatcgacaggccaaatcgcttgtaatcatgcagaagaggcacggttatccgcttgcttatcgtttctctgctgaccggtatcgggatgtggggccgatccgagatgtgccgttgtacatggctggcatcgtttagggcgttatggcccgttgcgctgaacgatggaatgcgaccacaacggatcctgtacggaagtagtcggtctcgtacctgtggctggcgttgcgcgcatccgccatcgcgcaagcgggaacgatcgcattcccggtcacgaggattccgctggttccgcctccggggatcggccggttggatgaggttacgccgtcttgcgagccgtcgaacgatcagggccaaaggtaaagaaattcggtattcttgcaaggctttttgggttatcccgcaggcatgggtagactggcatgcggtaggagagatactcgctgaaaggtgcatgccagctcatgggaacgggtgaccagccggaaaagaccaacaactaaaccagcgattgctgtcggctggccggtaatagccgtaactgcagcggacgttccccgctgcaggtgacacgcatcgccggagggcagctgcaagtccaggtaccggtccgcggccaccccagtcagccgcgctgacgacccccggcgtcatacgcgatgtgcacgtcgtgcactgctacgtgccgtccgccgggctacccgtccagcgaaagcgtaaccgggcagccagccagtatcgatacatgtcataacgtaaggaagtagcccatgccatcacacgcacgcacggtccccaggacaacccatcgcgttcgcaacgcgctgctcgtcgtgctgctgttgctggtcatgtgcgccgcggcggccggcttcagcggattcaaactgtacaagtcggcgatgagcgccaaagcgcacctcaacaatgtcgtcaacgcggccaaggtcatcaaggacggttccaccgacgacatggtcaaggcgctgtccgacgtgagctacatccagaaggaggcggccgccgccaagcaggatgtcagcggcggtctgtggacgctggcggagaagatgcccgtggtcggcggtgacgtgaagacggcgcgcaccgccatcggtaccatcgatgacttcgcgcagaccacgctgccccagctgggcaaggtcgtcaccacactgaccggtgccagcctctccagtggcgatgggcagctcaacatggagccgatcatcgccgcggcgcagcagcttgccacggtcgaccagtccgtgcaatcgcaggccaggacgatccaggatcttcccgacgccaaactcggcgtggtgaacaacgcgctgcagaacggcaagacgcagatggccgccctggcgcaggtgaccgaaaacctgagcggcatgctcaacatgctgccgaacttcctcggtgcgaacggcgcccgcaactacgtgctgctggcccagacgaattccgagatccgcggaaccggcggcctgatcggttcggccggttccttcagcgcggacaacggcaagatcgcggtgggggagttccacgcggatgccgagttcccctccaacgccgcgttggatgacgtcaaccaggacggtgacggcacgctgtacagcggactgtacttcggtcaagtcatccataatctttcgtccacgccggacttcccgcgcgtcgcgtccatggcccagaagttctggcaggcggctccgtttggcggatcgtccgacggcgtgatgtcgctcgaccccgtcgcgctgcaggcgatgatcggcgccaccggcgacgtgaccctgtctgacggacgcgtgctcaacgggtcgaacaccgccgaattcctgctcaacggcgcctacaaggaactgacgccctccgctcaggaccagtacttcagcgagaccgccgcccaggcggtcgcccacctgttcagcgacatgaacacgcagaagctcatgaccgtcgccaagacgatgctccggatggccgagcagcggcacctgtacttctggtcgttccacgaggaggatcaggcggtgctgcgcagcgccggcgtcaccggcgagatcaccaacgacgcgaagaacccggtgaccggcgtctacttcaacgagatgcaggcctcgaagatggactggtacatccagcgcaagtcgacggtgaagaggaccggcgacaacacctaccacgttacgtattcgttcaccaacaccctgcagccgggcgaggccggatccctgccggaatacatcacggcgaacgccaagggaggcgtggcggtgaaccgcgtggtcatctacacgccggccggaggcgaggtcagcaacgtgtcggcgtcgaacggcagttccttcgcacaggtgcaggccaaggaccatatgacctacatggacgacatctccctggcgcctcaggacacggtgaccatcgaatacgacgtgaccaccgcggccggctcggccaacctcaaactggatcagacgccgaccatcggcgaccccgcgatcacgtacgagtattgatcggtattgatctgtgggtgtgatcttgggattgtgtgcccttatgaaagcgcgccgccaactcctctcggaaccggtgacgtgcttccggacgacgatgtccattacgatcacggcagatcgatagccgacaatatcgtcacgctggttcagctagttcgaattgcaggtggcggacggtgcccaagacgaaagattctcgtccggcgttcggccgccgtcgttggccgtgatgatactggagaccatgaagctcaggcggcggcagccaagggcgaagtcgagaaagaggtgacggcgtgacactcgaacagaggtcagatagcgcggcggcggagcagtgccgagcatgaccaacaatcaacggccgcaggcgattgaggtgcgcggggcgcgcgtgcataacctgaagaacattgacatcgacattccgctgggcgaactggtgggcgtggccggcgtctccggttcgggcaagagctcgctggcgctcggcgtgctgtatgcggaaggttcgcggcgctacttggaggcgctgtccacgtacacgcgacgccgcctgacccaggccagtcgcgcccaagtggacgaagtactgcacgtgccggccgcgctggccctgcaccagcggcccacggtgcctggcatccgttcgacgttcggcacgatgaccgaactgctcaacagtctgcggctcctgttctcccgcgtcgcctcgcacgtgtgcccgcattgcggggcgcgcaacgaaccgacgctgaacgtggcggccggactgcccattacttgcgtcagctgtggcaaggaattccacgcgcccggcgccgaatcgctcgccttcaactcggccggcgcctgcccgacctgctccggaaccggcattgtgcgcgaagtgaaccgtgcggccctggtgccggatgagtcgaaaagtatcgacgacggtgcggtgctgccatggggttcgctcatgtgggacctcatgaagcaggtgtgcggcgcgatgggcgtgcgcaccaatgtgccgttcagcgagctcacgcccgaagagcgtgacatcgtattcaacgggccggccgtcaaaaagcatattctttacaagccgaagaaaggcgacgatttcgccgaactcgacttcacctacttcaacgccgtatacacggtggagaacgcgctcgccaaagccaaggacgagaagggcctgaagcgtgtggcccggttcctcaaggaggggccgtgcgccgactgcggcggcacccgactgagcgccgtcgcccgggccccgcatgtgcgcgggctgaacttggccgaagccagcgcgatgaccttggatgcggcggtggattgggtgcgcggagtgccggaatccctgcctgccgacatgcggacgatggccaccaacatctgcgaatcattcctggacgtggcccgccgactgttggatctgggcctcggctatctggcgcttgaccgcgctggtgccacgctttcaaccggtgaacgccagcgtgtgcagctcgcccgtgccgtgcgcaaccgcaccaccggcgtgctgtatgtgctcgacgagccgtccattggcctgcatccctcgaacgtggatgggctgctcggcgtgatgcatgacttggtggcggacggcaattccgtggtggtcgtggaccatgacgtgcgcgtgctcaaggccgccgaccatcttatcgaaatgggaccggttgccggcgccgaaggagggcatgtgatcgcgcaagggacggtcggcgaggtggcggcgaatccaggcagccgcattgcaccgttcctgtcagatcaggcaaacgcgcgtattcgtgagcgcgtggcggaaccgcaggtgttcgaccttggccacatccgcatgacaaccagccagttgcatacggtcaagccgctggacgttgatattccgcgcggccggctcgtggcggtgacaggcgtctccggctccggtaaaaccacgatggtgctcgaatcgctgattcccgcactcaaagcgcaggcggcgggggagctgttgccggaacacgtgcgcgagcttgagaccgcgggcatcagtcgcgcgaatctcatcgacgccacgccgattggcgcaaacgtgcgctccaccgtggccacctatgccgatattcacgacgaattgcgccgcgccttcgcccgcacggacggcgccaaggcgggcggctggaaggctggcgatttctcatacaacaccggccgactgcgttgccccacgtgcgacggcaccggttcgatctcactcgacgtgcagttcctgccggacgttaccatcgaatgcccggattgcggcggatcccggtatgcgtctgaagccggcgcgattcggcgtgccgttaagggagaatcgcacctttcgttgagtctgccccaactcatggcaatgagcgtggatcaggcattggccgtgacccacgacctcaagaaggtccacgcacgtctgaccaccttgcatgatttgggtcttgggtatctgacactcggcgaaccgacgccggcgctttcgggcggcgaagcccagcggttgaagctcgccagcgaaatgggcaaagcccaatcggacgcggtattcgtgttcgatgagccgaccatcggtctccacccgctcgacgtgcgtgtgctgctgggcgtgttcgaccggcttgtggcgagcggcgcaacagtcgtggtcatcgaacatgaccttgacgtgatcgccaatgcggactggatcatcgacatgggtccgggcggcggcgaaagcggcggacgtatcgtcgccaccggaacgccggaacaggtcgcggccaatccgaacagcatcaccgggcggtatctgcgctgacttgtatggcggtcacgcgcctttgcataggaccctgcgcgagtaggatagccgtccatggtgcagattcatggcattagacgcgcgagcgcggacgcgaaatatcggcagatgaccgggcagccggtcaagccgctgattctcaaactgtgtttgccggccgtcatctccaacttggtgaccaccgcctacaacctcacggatacgttctttattggtcagctcggcaccgcgcagtccggtgccatcggcatcgcgttctccatcatgaccgtgatgcaggcgctcggcttcttcttcggcaacggcgcgggcaactcgatgagccgcgaactcggcaaacagaacaatgagcgcgcctcccgactactggccgtgggcttcgcgggtgcggtgctctctggtttggtgattgccacaatcggattgctgaccctgcggccgctggtcgtcatgctgggatcgacctcgacgatcgccccatacgccgtgcaatacctgatgccgttgctggtcgccgcaccctgtgtatgcgggtcgttcgcgctcaacggactgctgcgataccaagggcaatcggcgttcggcatgatcgggctggtttcgggcgcattgctgaatttcctgctcgcgccgttgtttatcttcgtgctgcacctcggaatttttggtgccggcctggccaccgccatctgccagacggtgagcttcacgattctgaccacaatgagccgcaaattcggcgtgatgaaactgtccctgcgcaattgcaggccggatgtgctgctcatgcgcgaagtggccggcggtggcctgccctcgctgatccgccaaggcgccggttcgatttccgtgacctgcgtgaacattgccgccaatccgttcggcgatgcggccatcgccggcatggccatcgtgatgcgcattatgctgggcgccaactcggtgatcgttggtcttggccaaggtttccaaccggtgtgcggctacaactacggtgccggcctgttcgcgcgcgtcaaagaagggtactggttctgcgtgcggctcgccacctgcgtgctcgtggcgttggcggtgttgctgtggattttcgcgctgcaactggtcgagatc

SEQ ID NO: 3212 - DNA, 3543 bp, Unknown
  R53_2m  MAG No. k141_4785
agcccggcctattgacgacattgctttgccagccgacgtcttagtgaaccccgtcgctggataccttggcaggcggctgaatctcgaggttggctgggagacgacggcgcccgccaccggaagtacgccgaattggaacggcaaggaagtcaggactctctcgtggtcggggcactcaactcgctttcgccatagcgaaaccgccgcgctccttgagggaatagagcgccgggtgggcgccctccaaagctcatgcaccgtgcgtgttgcgcgcgcgagagacctggagggtcgggtcataacgccgaacgatttcccggcctacccgtcctgaagtggcctgatttttgttccgcctctattgtgagacggtttgtgccgcctgtttctggtaatactcgttctcggcctgttccggtgtcctgtagcccagggaggcgtgcagtcgtttcgagttgcaccacgagacgaacctcatggtcgcgtattccagctcgccgaccgtccggtacggcctgttgatccaaatcagctcgcgcttgtacgtgttgttcgtgcgttcggccagcgcgttgtcgtaggagtcgccgaccgtgccggtcgacggcagcatcccgtattcctccacgcgcgtggaatacaccaggcttatatactgcgagccgtggtcagaatggtgggcgcacccctccgtcccaccgtgggcgcgcgcccacgcgatggcctgttccggcgcctgcagcggcagctccccggtgcgcatcgtggaggcgacggcccagccgacaattcttctggcgtatgcgtcggtgacgaacgccgcgtacgcgaacgagccgtccgccagccgcacgtaggtgatgtcggcgacgtgcagccggttcggcgcgcgggcggcgaacttgcgccccgccaggtcgagcctgccgcccgtccccctggcggggatggtggtgaccggcctgcggccgccccgaacgccccgcagaccgagttcgcgcatgatgcgggcgacctggtctcggccggcctccaagggatcccagccttggtcgagcagctgacgccacaccttgcggtacccgtacacgcgcatgaactcgtccccgtggatcgacgtgatgtcacgcgccaatgcctcgtggcgcgccgccatacggctgagaggcctcgtcttgaaggcgcggtagccgcgggcggtcaggaaaccgcagtccggcccggccggacagcacccggcagatcggcccgaccccgaaacggccgcggtacgcgtcgatgcacgcgaccttcaacgccgtgtcgggtcgagcctggccacgaaaaaagccgacgccgtcgtcagtatctcattcgccttgcgcagttccgcgacctccgccctgagcctcttcagctcggccgccgcctgcgcatcgcgcgcggattgcgccgtgaccgtcctatcggccctgttgcgccagcggcgcagggtctccggggccatgcccaggctctgcgagaccgaggccaaggccttcgtctccgacgaatggttcgcgcgtgactcgcccagaagccgcagcgccttatcctggaattccctcgtgtaacggatgccccttgccatgattccatcatctcctatcaagtgagaggaaatgcggaacaaaaatcaggtcacatcaggtgcaggcgtcgcatttgcctgccggtgtctcgacgcctcggcatcaccagcggcggcctgctcaaccttaaactccccgaacccgacgcgaccataggccgcactcgcggctggctcccctcgacgatagacgaatggaacgcgaagcgtcccggacgcggcgtcggcggaggaagaccccgcaagaacaggtgagtggcttgggcgggattcgaattcgcgatggcccgacctctgtaggtctattgtggtcacgccccagcagtcgctgctatggccggctatgtcctctaccgtacgcaagccgtggcgggctgactggcgccggcgctttggacgctgccggcggagtactctcagcccatgagatgtgactggatatgagtaaagcccctgagatgtatgtcccagaggctttcacactaatcctgatacggagtatgccacggggtggattcaccctactcccgcttgtgttttgttttttcaggcggcttggatggtgaggcgtccgccgagggcgtggattaccttggcgatggtctggaagctggggttgccgtccttgctgaggctcttgtagaggctttcgcgccccacgcccgcgtccttggcgatctgggtcatgccccgggccttggcgacgttgccgagcgcggcctgcatgagtgcggggtcgtcgtattcggctatggcgttgaggtaggcgatgatgtcctgttcgttttcgaggtattcgctggtgtcgtagtcggtgaattcggtgctcattgtcgttgttccttgtagtcgttgaggatgtcgtgggcttgtctgatgtcggtctgctgggtgcttttgtcgccgcctgcgagcagcagcatgagcacgttgccctgcatggcgaagtagacgcggtatccggccccggtgtggaaccgcatctcgctgaccgggcctcccatgggtttgatgtcgccgaatggcctgcctgcgagcttgcaggcatcgagccgggcttggatggcggccttcgctttgtggtccctgagtttcttgaaccacttgcggtattcggcggattgcttgatttccacacctctattgtatcctacaggctacatcatgtcaagccgaatggccgctggagcccatagccaacgcaagaatctcccgtatgttgaactcccagtagccgtcatcgacgggtctcgagctggggagtttgccccggttgagccggttgctgatccgcttgcggctgacctcgtacccgtagtttcccttgagccattggctcatgcctgccggggttttgatcaggtggattgattcggcctcggcttggctttgctcgcgcagctcggccacgttgacggggtcgccgcatttgcacaggcgcagcgcctcgcccttcgcggccatcacttcgcgtccgcattcggggcagacgccgattatccggcgcgtgcgcggcctgcggtcaaccttggcagagcgtccacggtgcctcgacctgctggttgccgcagtattggcatggttcggtggtggtgactgcacacgttgtactgtagggaaccatgaaagtcgtattgcaacgagtatccgaagcgtccgtggacgtggccaatgaattgggcacgctggatcccacgttcgagccgcagcagattggcccgggattcatgattctggtgggcgtcaccgatgaggacgacgacaagcagatcgcctggctggcccataagatcctgaatctcagggtgttcgaggatgcgcagggcaagatgaaccgttcgattcaggacatcggcggcgagattctctccatctcgcagttcacgctgttcgccgacgtgcacaagggcaatcgcccgagcttcatcaaggcc

SEQ ID NO: 3213 - DNA, 19561 bp, Unknown
  R53_2m  MAG No. k141_4815
cacgaaaggcgggcctgaaggcaaaggcaggatgccttgcccagacccgcgcgttgcaatgtcgccgctatttcacccttcagcggccgcaaacgcaacaacatgtcaggccaatcgcatgacgatagctccatgctccctcgattcgccgaaactatccatcggccaaaggaatgaacctgcgcatcatccgcaaggacgatgcatccgactcccatcgcacacttgccgccaccggtctctctcttccccccccccaaaaaaaatggcgaagggcgggttccagtgatcgtcgcaacgcctggctgactgatgggagggccaggtggacaggtgggtgttcgagggcgtggagtacgcgacgcgtggcgagatgtgcgcggcgcggcggcgccgctacgccgagctgctggaggcgggcatgaacttcacgcaggccgcgcgggcggtgggcgtgtccaaacgcaccggcaaggtgtggcgcaacggaaggacacgatcgaacggcaggaacgagaagccatcggtggactggtatcgttccaccgtggacattccccaaaagatcagttcgaggtatctgagccaggacgagcgcatcagcatcgccgactggcggaaggccggcatgagcgtgcgcgggatcgcgcgcacgctcaatcgtctcgcgtcgaccgccagccgcgagctggtgcgcaacacgaatcccgcgaccggcatgtacgagccgtaccggccccagcagatgagcgcggacggcccagacgacccaagcccgcgaagatccatacggtgcccggcctgctcgcatacattcgtgcaggattgcgggcgcattggagtcccgagcagatcgcggggcgcctgcgcgccgatttcccggataatgatgctatgcatgtgtgcgcggagacgatctaccaggccatctacgtccaggccaaaggcgaactgaaaaaggacgtcatcaaggccctgaggagcgggcgcgcccaacgccggccgcacgggcaggcgggttcgcgcaggcccgtttccgcgagctcatgatcatgatcagcgagcggcccgccgaagtcgaggaccgggcgatacccggtcattgggaaggcgacctgatctgcagcgcggccaacaaaagcgcgatcggcacgctcgtggaacgctcgacacggttcacgatcctcctgcacctgcccgacgggcacgacgccaaacacgtccggcaggccgtcatccggaaaatgcaatacctgcccaagctcctgaggaactcgctgacctgggaccagggaagcgagctcaccctgcacaaacgcatctcgaccacgctggacatgcaggtgtatttccgcgacccgcattcaccctggcagcgcggcaccaacgagaacaccaacgggctcctgcgccaatacttccccaagggcaccgacctgagcgcataccccgaggactacctcgacgcggtcgccgaggaactcaacgaccggccccgcaaaacactcggctacaggaaaccatccgagaaaatactcgaactcatcaacacagcatgatacgatcgcaccaatccaagaccgccatcaagagcggcaaaacacacaggtgttgcaaccaccactaaaatccgccaagcccaccttgccgaatggggtgtcgaacatggaatccgtcttgggggggggcgtgcggtagtcgcattcgtaacaacaatccgcttgaatgagctgctgagcaaatagcaggtctacatgcctgctttgaaccagccgatggcgatttgagtgcgattgcgtaggcccaaagttgcgaggatacgggtcacggcacgtttgacggaggcaggttcgacggtgagttgattggcgatttcctcgttgatgagcccttcggagatgagtgcgcagatttcacgctggcgaggggtgagtgcgtcgaaagctttgcgcatttcttgctggcgctggctgctggtgggatgcggaacgcctcgttcaagcacttgtctggtgattcgtggggtgagtattgcgtcaccgttggcgatggcgtgaaccgcgtcgatgaggttgtgcttggtgacgtccttgagcaggaagccgctggctccggcgtcgagaccgccaaaggcgtaatcgtcctcgtcgtacgtggtaaggatgagaatgctgatggtgggccagcgtctggtgatgcggcgagtggcttcgatgccgtccataccgggcatccgcacatccatgaggattacattcggcaatggacgatgctgaacggcgagctgttcgagcgtctcgatggcggatcggccgtcagcggactgggcagtgacgacgatgtcggaagcatcgtcaagcatgagttggaagccaagtcgcgcgaaacgctggtcgtctacgagcattatacgaatcatgcggtgtggtccttttcgttcactccgttggacgggatggtcgcctcgacgacccattcgccgtcttcgtttggaccgtattcgaagatgccgcttgccgattcgacgcggtggaatagacggacgagcccagtaccgtcatccttgcgcgcgtccttgcgcgcgggactgccgtcattgcggataatcacggcgacggtgccgttctcgctgtggttccaggcgatgctgatatgcaccacgttctgtccgtgacgtatggcgttggtgatggcttcgcgagtcacatcgaaacacaaatcagcctgagcttcgtcatcggcgcgcgtaccagtctcggtgaacaccgtgacgatgcccagccggcgtgcgtgcgcgagaatcggccgaatgtcatcccatgaatgctggtctgattcttgggtgtgcgtatcgtcaccgttcgccgctccattgaactcggtcagtgcgcggacggctttgcgcgtgtcgcccagactctctcgtgcgatttcgttgatgccgtgcagcgcatcctccacgcgtgggtcatcggttttgccggccagaccctcagacagtgcgatgattacggtcagatcctggcccacactgtcgtgcagttgaccggctatgcgcgaacggcgtattgcggcatcgcgttggaaggccagctcggctgcccgccggcattcctcggcagctttgtgttcggcttccttggcctgttgcctgccacgtactgcaagcgcgccgcctcccacggctgccaacgttaccactcgactcacccattcggtcgcgagaacgtccggatgcaccatgatggccgacgcggtcatcgacagcatcatgccgatgcctccaacgcacagcccgcgccccctcgctgtccgggcgaacgcatagcaggcgacgagcgtctgaatcatcacgattgagtccaaccgccagtacgaggcaactattaacaataccgcttcaagcgccaaggcaacggctggcagccagtaacggacaagcagtatcgcactgctggctatggtcatcgccagcagcagagccaatcccagcggatctttggcaaacgtatacatggtgtcggccggcgctccgatcgcatgctcccacagcatcgctgcacattcgaccacggcgatgaccagtggcacggccaggaccgtgaccttattggcctgcgcggattgcggtttcatggctcccattgtggctctttttgtatgatgttgcgtgcatgtcagcatgtgcgtatcgtgtcggccacgctgcggtgtagcgcggggcgaatctgcgtgaactggatgaggaacaatgccagccagcaggccgtgcccatgccgattacgcccggccatgggatttcggccacggggatgccgacgagcgccgcggatcttgcggcgaaaacgcttgcgctgacggcgaccgggatgagcgagagaatgaccgcgccggcggccagctgcaggctctgccagagatacatgcggatcacacgacgtggggacaggccgatgctgcgcagcaatgcctggtcggcgaccatgctgcggttcgacagggcgatgaccgccatgctggtggccagggacacgatgcacagcatcgttatgagcagcagcgagtccgcgtagttcaggctcttcggatggccgcccaaggcgagtatccggccataggatcgcgcgcaggtcagcagggtgaccgacagtcccatggcaagggcgagcggggcaatcgtgttcgtgttgctggcggccttcgcctcggcggaacgggcggcgagcacgccggtcgcggacccgcacaggcgacacacgacacgtccgatgcccaacagaatcggaatcagcatgctgacaaggatgtacatgccgaacgaggcgatgatgccggcccacagcgcgctgttgaatgtctgccccgcctcctggccgaacgcgagcgcccgtggcgtgcccatgccggagaacgccaatgccagcgccgccgccatgacaatcaaaccaagtgcccagtgcgcccaagaccgccaaccgtgccgtatcccgatggctcccgtgccgcgaatcacctcgatgggacggatcttcgctgcgcgcagcgaggggatggacgcgcccaacatgcacgtggccacacccaacagcagggatccgagccacgcggccatcgacggcgtgaacgcaggaggtgcgaacgagccgaatccatcggcgaagctttccgcagccatggcgttgaactcgggaaccgccagcaggctggccggcactgcagccagagagccgatcagggaaccgaacaggctcgccacacccacgagcatccacatgctggcaagcacctgactcgggctggcgcccataagccgccattgcgcgaacgtgctgtgaatacggttgaccgtggccgagccgaccaccgtcaacgagaagaacgcgagtaatgacaccaccacatagatcgtgaccgacaccatgccgaactcggccggatcaagacccgcctgccgcgcggccaatgtgaacgacggagacgaggtccacacgaattggttcatgcatatgcccaccagcgtggtcaccactgcgaccaccagaatcgtgggtacccatcccgtgacattgtcgcggaacacacgcagcacatacctagccacgatgagcctccttccgctgctgcggatacgccacgcgctggaccggtcggcccggttggacggattggataggctgggcgttcaccatcatcgggccgacagaccgcgccgccgcaaccaacggcggcgacccggccggtacgaaagtgcggcgtatgccatcggcaatctgctcggcggtgagtctgccagcgatgtgggtgacctgaccgtcgcgcaggaagatcacgtggtcggccaaagcggcggcatccgtgtcatgcgtgaccatgaccacgctggagcccgcatccgccagctcgcgcagcacctgcagcacaagctcgctgttcgcggtgtcgagcgcgccggtcggctcgtcggcgaacaccaccgccggacgcatgagcagcgcacggcacagggcgacgcgctgctgttcgccaccggacagggcgcttaccgtcgtcttcgccctctggcgaagaccgaaccgggacagcagctgcgtgacctgcacgtagtcggccttgcgatgggcgagcgagagcggcaacatcacgttctcctcgaccgtcagatacggcacgagattgtattgctggaacacgaaaccgatatgcccgcgaatgaaccgcgaacgccgttcctcattcagtgcgtagacgtcggtaccgccgatggtcacccgcccggaatcgggcctgtccaatccggacagcacatacagcagcgaggtcttgcctgcgccggacggaccgacgatcgccgtcaagcccgctccatcgatatccaacgaaacattattgagaacagtctgcgtgtttgcgggtcgggaggcggttcgagcatcgaaccctgtccgtttcaccagtccgagcgcctgaatcggtgtgccggcattttgccaagtcatgaggtagccccctgtcgtgaaagttgacgccgtttttctcaaccttcgcgccaggggcatggcaggtcgaggtaaacacggaaagtgacaccctagggtgacagattccagtagcgttccatgaccggcacccaatatgccctcaaccagaccagcgacaacgaggacctgcccggcatcgtccaactgcccgcctatgccaagtatgatggacggctgctcgtcatacttggttcctccgggaagcgaatatccttctgtcgtttgcggaaacaagccctgccgatgcccaagaccgccagataaagcaggaacatcacgggcacgacccatgtcacgtaccgccacgggtcaatctggaacgtatcgaagacgatgaacatgacgccccacacgttgatggcgacgatcgccagaatctgggcggccgccgaatcgaacctggattcggccgggctggtatcgttcgcgtcggccggaacgtcaggcgtccgcccggcgcgacgcatgaagccgagcgccgcccacacgatggccgccaccaacgccacggccgccggcaccaccagcttccagaactccccgtcattccagccgtaccggatgacggcgcacgtgatggccgtgacggcggccacgcccaatgtggcggaagcgccgaaaaaccacagcagaccttgattccgacgcccaccatgggaggcccgcacctcatcgtccgcaaccatatcgtccccgcattccataaagtccgacgcgtacgcatgccatctcaattatggcactcaaagagtcaatcagacaacatgctgtcaagcgatcgcatgacaggaatcggctatccgtcaatgccttagggtgctgtcgatgcatatccgattgaccgatgcttctacatgcgtgccgacatgtgccggtccttcgcgtccgcgtacgcattcttacatcacgacctcaaactaatctacgaaaaactttaaacagatatctatttgattttaatattatttatggtatacttaattttattaaacccgccgtgaattgaaggaggcaggtatggatacgacgatgatcccgccgtggatgtcgaacctcgatgacgaggatatgacgttcatcaaacggtttctgctcgcatcaggctccatgaaggaggtcgccgcgcagtacgacgtctcctaccccaccgttcggcttcggctcgaccggctcatccagaaaatcaagttgggcgagcagatcgagaacgagccgtatatcgcgctcatcaaacggctcgcggtcgacgacaagctcgacttcgacaccgccaaaatcctcatcagcgaatatcgcaagcagctcaagcaaggagagtaatcatgattggcgccacaatatttgccgtagtgtttttcgtgtttctcatcgccatctgcatcggcttcatcatattgcagatcaggctttcgaagatggacagcaagtggcccggtctggtattgcccgccatcacattgctgctgtcgcttgtggcggcgattaccgtcttcgccagggcggacatcggtgcgtatggcaacatgtggaacgtcgtgctttccgcattcatcgcgttcctgtccaacaacgtatccaccatcgtgctggccggcatctacttgtatcagcgtgacaagatcaatcgtcgcgccgagctggcccgtatgaacgttcaggacctgtaactcactgtgcaaaacacgcagactgaaccctacgccgcttatgccgactcatcatcttttgcgccgcttcgcgcagcttggatgattaagccggtgacgtggtcgcagggttcgtcgcgcaatcggagccggacgccctgtcatttcggctgattccgtacatcctgttccgccgcgaaccgttcggcgatttgccgtgcgtggatgttcttggcttcgttgacgaagtcggcgcatgccttgctgccgtagagcgcctcaccacacgggtcggcgaaacgcggatcgccgaccagcgcggagcgaatggccccgaacgagccggacagcggcatggcgttcatcacggtcgcggtttgattctgtgccgcccgggtgcgggcggtcttgaccagaccggtctcgtcgcagtagcgcaacgtgcgcgtcgtcacgccgctgatcaatgccgcctgatcaatgggccacaaccggcccgtatccagcggattgccctccacatcgaacgcgccggaaccgttgacggcgttcgccgtgttgtcgttctcgttcatgatcgatcatcccccttgaagccgattatcctctacccgccgtgcgtgtttcgcggcgttgccatcaggatagacgtttacgcaacgtcaaccgcaatcgataatgggatgtatcgttcaagctaggcaatatgccgtcaagcaatcgcatgacagcaccatgttcggcacataccagatggaagaattggcaaaccttaaaaaataccgcggttattgctgtgccgagaacgccaatatgaccatagacgtgctttcccgctacacgttattcacctgtcatgcgccgatatcaatcaaaagacacttgcataaccaccgctacgcatcgccaataacataccgatgagccagaatgaggcccaggccacgatgctaatccgtaaataatactggtcagagtggcaggtacattggtcctatggctaagcgcaaacatatcggcactgttgttattgcaatactggtcgctattctgctgacggtgggcgtttccggctggctattctggcagtcggtacaacgggtgatcggcgaggcgcagcaggcgggcgaatatgcggctgaagcacagcaatccgtcgggcagggcgacttcaagcaggcgcttgagcagatggacagcgctggcagtcacatcgtcacggcgcacgacgaaacccagggcgcgctatggcaggccgccgaatacgtgccatattacggttcggacgtgaaagcggtgcgcggcatgctgggcgcggccgccgacgccgcgaccaacgccctgcccaaaatcgacagtgccgcgcagggcacgttggtggacttcaatatcgaagagctgctgtccggcatgaacttctccgacggcacgctgtccattcccaaaatcgcctccatcaagcaggatctgtccgacgccggcgtggtcttgaagcgcgtcaagacgtcgatttatgcgctgccgcagccccacacggaacagatcaccgaaatggtcaaccagggcaagcaggtagtggaccaaatcgatgaggctttcgacaccttgaacaccatcatcgagaagattccgggctgacgttggttcgttcttgtcagtcgtaccattcgggtcgtcgcagttccaggaatggccgctgtttgcgcgctgctgcggtctgtgtgagatcgatgtcggcgataatcaactgttcatggtcatcagtctcgctgacgacgttgccgtacgggtccaccaccactgattggccggcgaacgccacatcgccctccttgccgacccggttgcacatggcgatggccacctggttctgcatgacctggacgcgaatctcccacaggaacatctccaatggttcggcgctgatgttcgcagtcgggatgatgaccagatcggcaccgcgcaatgcgcatgtacggatgctttccggcatgtgacggtcgaagcagatgacgatgccgatcttgccgaacggggtctcgaacacgtggaatccgtcttgggagggcgcataatagtcgcattcatagaagcgttctgcttgcaggatgtgcaccatggtcgagatgccgctgatatggccttgttcgttgatccatagcgaagcgtcgtagttgtggccgtcctgggctttgaggtacaggttcggtgaaacgtacatgccgtgttgcagggccttgttctgtaatgcggcgacgtgacggtcggtcaggtccatgagatatcgcgacgcatcgcggttctcatactgggggaagaacggggagaactgtatctcagggaagaacaacagatcggcaccggcctcgccggcctgatcgtagtaggccaaggccctatcggcgttttcgtcgatattgtcggtcatcgccatctgcgccatcgccagtctcatatcgtttccccatctttgagccgcaaatccacccgcacatgccaattgctgcccctgacgacatacgtcaatctcatagatgctcatcacaacccgacggagacactttttccatacgccgctcgccatacggcacctgatacggccatgcatcggctgcttttttcgaattactttccttaaacaagaaacgcgccgcacgctggaatatattttgagccccgagtacattaaccgttcacaaaatcaatattgcaacggcgcatacggccgctaccacacgctcaaaaagcccggaaaaccgccaatccgagccggtctacaatcgccatacaacggcacgcaatcaccataggaggctgacagacatgtccaaggacacatcaaaacaaacaacattcgatttactgtcgggtttctggctttcggtctactgtggatcagcggcctgtacgtggtggccaccgtgctgctccccagctgttcaaggacatcggcgtcgctaacccggatgcggcagtcggcacgttgaactcggtcaccgccatcgtgggcctggtttccaacctcgtgttcggcaacctctccgaccacacgcgttccaagatgggacgccgcaccccgtggatcatgccgagtgtcacgggcatgtacccgtacgcgggcatcgccggcttcggctatggcgtgtactcggccatcgaccaggcactcaacgtcgacgtgttgccgaacaaggaagaggccgacaaggacctcggcatcctcagcttggccaccacgctcggccaagcagtcggtcccaccatcacctccgtggtcaagaccacgaccggcacctacacgccggcgttcgccatctccatcgtcatggccgtgtgcgctgccgtgttcgtgctgcgtatccagaaggtgaagtagccgctgcgagtgcctatctccgtttcaaggggctgattttgactttgcggaacatctacttccgtttcaaggggctgatgccaaagtagccactggttaaaaacggcggaatagtgatagaacaatgccatttctatctgcgttccgccagttgaacagccccttgaaacggaagtagacctccggcaaacgccaaatcagccccttgaagctgattttgactcagcatcatgcagcgcagctatatcctcagtgcgggtatactattccgggccgtcacgacgacgcctatggaacgcacgcatggcaaagagagaaacatgagtcagcccgacaccgacacggcggcacagtcgccgtcctcgcagcaggaaccgcagattcagacggatggccgtcaaaaccagccggaacaggtgaaccaaccagcgcaaatcagccagtccgagtcgccacatgacggcaaaggcgagcacgcgctgcataccaacctgaagcgcggcatggaatcccgccacctgcagatgatctcgttgggcggcgtgatcggcaccggcctgttcctgagctccggatacaccatccagcaggcgggccccatcggcaccattctggcgtatggcatcggcgcgctgatcgtctacctggtcatgctcacgctcggcgaactgtccgtggccatgccggtgaccggctccttccatgtgtatgccgagaagttcatcggccctggcaccggcttcgtgatcgcgatccagtactggctcacatggacggtggcgctcggatccgagttcaccgccgccgggctgctcatgcagcgctggttcccgaacagtcccacatgggcgtggagcgcggcgtgcatcacactcatcttcaccctgaatgccttgtcggtgcgtttcttcgccgaggcggagttctggttcgcctccatcaaggtgttcgccatctgcgcgttcatcgtcatcggatcgctcgccatcttcggcgtcatcccggtcgccggctaccaacatgccccgatgttcggcaatctcatcaaggacggcgtcttccccaacggcttcatgccggtgttcgccacgattctgaccgtcaacttcgcgttctccggcaccgaactcatcggcgtgaccgccggtgagacgagggacccacaaaccgccgtgccgaaagccatccacaccaccctgtggcgtctggcgctgttcttcatcggctcgatcaccgtgatgtgcgcgctgatcccgtggcgccaggccggcgtgggcgaaagcccgttcgtgctcgtgttcaacggcatcggcatcccctatgcgggcgacatcatgaatttcgtggtgctgacggccgtgctttccgcctcgaattccggcctgtacgcctccacgcgcatggtgtggtcgatgggcaacgaaggcatgattccgcgctggttcgccaaaacgaaccgtcgcggcgtgccgatgctcgccttgtgcgccgcgatggccggtggcctgctggcgctcctgtcttccgtgatcgccgcctcgactgtgtacctggtgctggtggcgctttccggcctgtccgccgtggtggtgtggatcgccatcgcctactgccagatcgtgttccgtcgccgttggctggagtccggccattccaccagcgaactcaaataccgcacgcccggctatccgtacgtgtcttgggcggcgttcatcctgtgcaccgcatcgttcgtattggtgattttcgacgtggagcaacggttcgcgctcgtggccgagctcgtgttcatcgtggcctgctatggggcgtatttcctgcaacagtgggtacgcaagcgcaaaaaggcgaccgaggccgacgacctcgatacgctttgggtcgcgcgcgactgaacggctcgcgacctaccggcgcaccgctattcgcgccgtgaacgtgcactgatccaacgcaatgccagacccagcaaatccacaccgccacgattgcccatgatgtgggtttgagcgcggccggggagaacggcagcacctgcaggccaatgatgattaagccggcggccagcagcgaagctgagatgaccataccgaacttcttccagtcaaggccttcgcttgcctcttcggcactctgcggaatcgtgtcgaaaccggtgtagaagagcggcgtcatcaccagcactccgggcagaaacgacccgaccatggtaaccgcgccggacgtcgagccgatcggcagcagaaacacggcgcccagcacgaaggcgatcatcgcctcgaccgggccaccgccgacgatcatccagtcaccgaccagcagcacccatacggtgccgatgattgcgccgaatcccatggtgaagtagttccacaggctcagcgatctgaccatgccgccgtcgccgccgctgccatcggcactactgtcgccgttgccgttgttaccatcctcgtgcacaggaatagcggcactgggcaggccagtcgattccaccaaactggccgtcatcgtgcttgacgggctgaatgccgtggatgcgacgaccatgaccgagcctcctttaattcggcctgactgtgatgataacgccgttcacgatatgccgtattatgaacgcagtgagagcccgcttcaccggccctattcggctcatgaataaacttcgcctatctgcggcactgaacacatgaccataatgtgatacacgtcacttcctgaaatacgtagtcgttatggaatcacccgcacgtttcccgtatcggagctgtgcgatagctgtgagacaggggggtcgtcagatttcggggggagggttccggaaacggtccgactgcaggatgcaccgggccgtgcgacacatgtcaacttgcgtattcacgccaaactcaattgagcaagccgattctcgtaaatggccagaagcggaacaacgccacaccttggatatcgtcgtatggcactagcccattgttgccgtcgtcaagatggtatcgagaatctctggaattggagcgattatcaccaagcacgaacacgttgccgtcagtaacggttacggaaaaaggactgtcgcttggattcacgccggacttaagataagcgctttcatcaatgggtttgccgttgaccgtgatgggctccccggatcccttgcaggcgacggtatcgccgggcagaccgatgacacgtttgattaggtaacgattgctgtcgattatcgacatcagattggtgggaagctgctccccctccatccagtctgcgggatctttgaacacgatgatgtcgccacggtgcagtgcaaagagtctcggagtcaatcgcgaggcaaatacgcggtcgccgatttgcaacgtgtcttccatgctacgggatggaatcacatagacgttgaacacgaaggtgcgtcccagcaacacgaccagcatcaccgcgatcaccgtcagcagatagccgcgaatttcactccaaacggagggctttcgcgcatgtctcctcgactgtccacgcgcttttttgctatgacgccccaccatcatatcctttccgaccggtaacgcaacaccatagtcctcaaaccatgccgttacctacgcccatgtttgagctcagctgtcacaccagcggttcgcgcacgtctagttcacaggcgatgccggtttccttgcgggcccattcggccgcctgcagtgcggcgatgttccataatgcgcacggcactccgccaaggtccggatgcgatgcccagaatgtgaggtcatcagcgtatgcggtgatgaccgattcttccgtgactggcatgatcgtgtggtacagacggtccgcaagcgtggccacgaattcgttggccgcggcgaacgtgtcgataagatgctgttcggcggtcaccggcgggccgaccagctcccaggattcgacgtccgtggcgctccaatgcgcggcttcgccgtccacatcgcgttgcaaagagacgaacagcctggcgaactcatccgaagtcagtcccgtaacccggcgtcgggttgacaattcaatcggagtcatcagataccgttcctttcgcttcgttcattccgttgtctcgctggtttgatttgctgccaaccggtacaaagcctatctcgcacacctcacgatagcccaaaccaccggcatggccatgattgccagccctacgaccagtgaccatgaggagccggcgattccggtcagattggtcatggcggcggagacgtcatacatgccatgagccacgatcagcggtgtaatcatgcccatacggcggtacagcagcacggcgagcactgcaatcagcacacgcggtggcgtgccgccggcacaatggccctatcgagcatcgccgcatgattcgtgcggtccacaatcgaggcagcatcggtttccattcggttcatgcggccagactatcgcccgttcttgccgattgcctgtaagcaggttcggatagactggcgcgagaacaatgtgagaaagaggcaagaatgacccggaaacggtcacaacagcacgacgcacaacgcaaaccgtcctggcgcgtacgctggaagaccatgagccgagccgtagacatggaaatccgcgaacacaaaagctcattcgcggtctatgtggtgctgcgcatgctggtgctcgccatggcaatactccagttctttaacggcgactacgaaaatgtgttcctgtgcatcctgacgttgctgttgctgttggcgccggcgttcatccaggtgcagttccgcatcgagctgccttcggtgctggaagtcatcgtgctggtgttcgtgttctcgtccgagattcttggcgagatcagttcgttctatgagatcttcccgttctgggacacggtgttgcacacgatgaacggcttcctcgccgcggcgatcggcttctcgctggtcgacctgctcaaccggtccgaccgggtgaagttcgagctttcgcccctgtatctggcgatcgtctccttctgcttctccatgaccatcggcgtgatctgggagttcttcgaattcggcatggaccagttgttcggattcgacatgcagaaagacgccatcgtgcattccatcagctcggtgatgctcgaccccacgcacaccaaccatgcgattcgcatcaacgacatcacccaggtcacggtcaatggccaagacttgggcctcggcggctacctcgacatcggtctgatcgacacgatggaggatcttatcgtcaacttcatcggcgcggtcgtgttctccgtgttcggcttcctgtacgtgaagaaccgcggcaagaaaaactccatcatcagtcggttcgtgccgcgccgcaagtccgccgaccgcgattatctgcgactggtgatcgatggcgggagcgcggctgatgccaaggccaaagccggcggtgccaacgctgacgatagtgctaacgccagtgcggccggcaccgattcagctgatgcagccggagccaaagccggcaatgccggcgccgctccgaccgtcaccgccaagccctgagtacgctctacagcactttcgaagcgtcgaaacggtagtgcccggtgaccgtcatgtgcttcttgaaggcgaagtagtcgttttcgcgctgccgctgcgccatgttgtgaatcacgtacggtgcacgccccgcgatcggccggcggatagccgccctgatagtagccggaatcgtaagccggatggttttcggcgtccttgcgcgcacccgccacgatatccgcgtaatcgtccacaccattgtcattgaaatcgaccgaactggcgactctcgaatacttgcggtccgcctcgccgtgtgattcgatgattcatgaacgtattcgggtcacactgtgatcgtccgacccgccgcccgcacctcccaatccgcccggtgcttgaacttgtggggctttggcggtatcgcgaccgcagcatcgccatgctcatctccagccatcagctcaacgaattgcaggagttgtgcgggcgattcctgttcatcaaaggcggccggcttgcggacgaattcgccggcgaacagaagcggatcacggttatcgagcttggccggccgctcggtgtcgcgaaacgtgcggcggtcgcggctttggatccggccgccgtcattcatactgattctgccggccgtgaacctgttcaactccgatttcatgaaagtcagcggaaagaccggttcggtgagtgtgctggatttcctcgctggcgagttcgtcgtacagaacatgctgatgctgccgatggtggtcatggcctatctggtggctggtgccatctatacgcccgtggcctccggccgcatgttcctgtacaaggatctggaccgcgccacgatcatcaatgcgaaaatccttgccctgtttggtatctacgccgtgtacgtggcattgcagacggtggtgacggtcgctctctacatcctgtacatcgcgcgcttcgactacgcttccggcacactgctgccggccgcaggtgcggacatcgcttcggatgtggcctccatcgccggcatcctgtgcgccggtgtggtgactatactggtggtggccgcccttgccacccggttctcgaccggcagtacgagagcgcggaccacaccgtgcacctcgatgtgaaggtggacgaggacacggtgtggcttaacagacagcaattggcattgctgtgtggccgcgatatcaaaacaatcggcaagcatatcggcaatgcattgagggaagagctcaatggattttcagttgtcgcaaaatttgcgacaactgcatctgacggtaagacataccaagtcgagcattacaacttggatatgatcctgtcggtcggataccgcgtcaaatccaaggaaggcatctaatttccggcgatgggccaactcagttctgaagcagcatctcgttgatggttacaccatcaatcacaagcggcttgacgcacttcacgccgtcgtcaaggtgctatcgaggcccaccgaaccggaaattgctggcaccgcagagatcttggaacgatatttgccgagtcttgtgctgcttaacgactatgacacaggcaatgtccctatacccaagggcgacgagtcccagtgggtcttgacctatgaggacgcgatgctgttcatccggtcgatgccgttctacacgcaatccgatctgttcgggagggaacgcaacggttcgttccaaggaatcgtcgcaggactctaccagacgttcggaggcgaagaactgtaccgttccacccaggagaaagccgcgaacctgctgtatcaagttgtcaaggatcacccgttctccgacggcaataaacgttgtgccgccgcactgttcgtgtatttcctgaacggcaacagtatactgggcgacgatgactcccctgcttgtggagggtaacgccttggcggcgatgacgctgatgattgcgctgtccgcacctgcggggaaggacacgatgatcgccttggtcgagaacttccttatacggcatgaatcgcaggagatcaattgagagaccgtcaatgaagggtgcacatcaatcacgttctagcattgcgcgactatctgtacgagtcgtctgaacgatctgctgggagtgctcttcgcggaaaaccaacagcagaccggaggccgcatccactatgtgttgttcaacccttgggccgtacgcagcaatgaggcattgaacagtttcgattcgccactgatgaagctgctggcgcgtgccatttacgccattgtgggcgtcagcgtcgaggaggcgattgcccccatcacccacttgatcgacaacccgccgcacaccgcgctgtcagcgttcatcaagaccaaacccgtcgatctcactatgaacaccttcaacaggggcacggcggttcggttggacgatatcaccaaaaagctgctgaatcgctagctgtcatagcacaaggccttagacagaacacccagaaatcgaacgggtagatggatcgcgtctccccttgacttccggcaagcgcacgccaatcatggggcgtatgggtattgcaatcaaacgtatatatgaagagccgactgcgtcggacgggtatcgggtgctggtggatcgcctgtggcctcgcggcatgacgaaagagcgtgcggcgttggacctgtggctgaaggacgtcgctccctctcccctcctgcgcaaatggttcggccatgaccccgccaaatttgcggaattccgcatgcgttacatcgccgagctcgacgccaatgccgccgtggacaatctgcgccacatctgcgcggagcatcccgacgtgaccctgctctatgccaccaaggacccgcatatcaatcacgccctcgtactgcgcgattatcttaactgaatattgactcaggacgaccgtcgtttcagtccatctgctagattctcgccgattttcgtatctttgaatcgaagtgcacagtcgtcactccttggattgccaagtaaaggga

SEQ ID NO: 3214 - DNA, 46622 bp, Unknown
  R53_2m  MAG No. k141_4816
taaatctcctgcaagtcgtcccatgcctgctgccagccgtctgctggccagtgaatcagatacagatccacataatccacgcccaagcggtcgaggctttcttggaatgcatccttgccgtggcgtgcgcgaatatcgtcattccacagcttggtggtcaagaagaaatcgctgcgcggcacaccagcacggcgaataccttcacctactgaggcttcgttgcggtaaatcattgcggtatcgatatggcggtagccattctccagagccgtctgcaccgcgttcactgtagtatcaccatccggtgtctggaatacgcccaagcccacctgcgggatgacagtgccgttgttcagcataattgtcgattgaattgccataatgcctcactattcgtagtgttcattcaatttcctattttagaaacaagacgatgcaatgagccgcgtttcgcgggcaaagaattgcgtaatgatggcgtgattctcgttcattaggtcattattgcattcattaggtcaatgggcccagggtcttcggcatcagaacccagtcattacgccattcctgaagagccgtcttacggcataccgacctaatgaacgtgaaatcgacctaatgaatgcaacgagtaagcggctacgataataaccagtagaatcacaacccagattgaaggggagagcacgtggcagaggaatatgtggctgcattcgatgcagggaccacggcgttgaagggtgccttggttgataggcaaggccgtatcgtagccagtgcgagtagtgagcttaaccttattatcaacggcgactatcgggaacagagccccgatcaatggtggcaagctttctgctcggcctccaggcacatgattgagcaggcgcggcaatccgagtcagaattcaatgtgactcgcattcgtggcatcattttcagcggtcagatgcaggatgttattgctttgaacggcgagctcaatcccgtccgcaatgccattctgtattcggatggccgagccgaggaacaggccaagcaactcgccaagacatatcagggtggagtagaacgtttcctgaacaccgttggtaaccggctcgaaggctgcttgccgttgcccaagttgatgtggctgcgtgaacacgagccggaaacgtacgcgcgcattcgtcatgtattgatcagttccaaggactacttgatcgcccaattgaccggcgaatgcgtgggcgatgtggcggcttgttccacagccggtgccatgaatatccgtaatggccaatgggatgccgaattgtgcgaggccgcaggaatcgacatggccatgttgccacacctgcacaatccgcaagacaacattggcacagtgacggaatccgctgcacaacgcaccggtttctccgccggaactgcggtatacgcgggcattggcgatgcgggtgccaccacgctggccggcggtgtcagccgccctggtcaatacaacatcaatatcggcacctcaggttggatcgccaccgtttcgcccgaaccgttcaccggcaagcccggtgctgcgaatctggcatttggtgtggaagaagtcttcgtgaatgccgtgccattcctcaacgccggtgacgtgcataaatgggttaccggcgtattcgctgatggcgattacgcggaagcacatcagcttatcgaaacatccaaacccggctccaacggtgtgatgtgcctgccatatctggtgggggagcggttccccgtaatgaacccgaatattcgcggggcctatgtaggcctcgatccagacaccaccaaggcagacatgatgcgtgccgcgcttgagggcgtggccttctccattcgtcaaggtatggaaagttttgacgccaaacccagcgagatttccctgattggcggcggagccagagaaaatgcgtggtgccagattctggccgatgtgttggagcatcccatcgaagtgttcgccaatgccgatattctgccagcagtggcaatggcctcgttggtattcaatgtaccagacctgctgcaatcagtatgcgaatgcactgtataccagccgaatcctgacaccgcacgcacatatgccgacgcataccggcgattcctgagcctctacccgatgctgcgaacgatggattaggaactgagcatcatgaggcaatcagcgaatttggtccgcaaacatatagtggtcaccggactggtgcaaggcgtgggattccgttattttacggtgactcaggcacgtcgacttggtgtacagggctgggtgcgcaattgccgcgatggctcggttgagctggaagcacaaggcagtagcgacgcagtgcaagccttggttgagcaattagctattggtccgcgatggtccgaagtgagtcacgtcgccgtacatgacatgccgattatcgatgagaccgctcgggcatttggcgtgcgtcaataacctgcatcacgaatccacatcacgcacgataatctcacgatacgggtgaacatgggcgttcctcgccgcttaggccccgcacgttggtacgatggggcgttatgagtgagaacatgatgcaaatcattgacctgcgtggtcagaacctgtcccgtgccgaactgctcgccgcgatgccgcgtgctgcaatgggcacttccgaagccaccgatctggtgcgtccgattctggacgatgtcaaggaacgcggtgccgcggccctgcgcgacttcgaggagaagttcgatcacgtgcgcccgaaaaacctgcgcgtgccggtcgaggcgatcaaggacgccctgaccacgctcgactccgaagtgcgcgccgccatcgaggaatcggtgcgccgcgcccgcgccgtggccgccaaccaggtgccgaaggacttctacaccgacctcgccgaaggcgcccgcgtggccgaacgctggattccgattcagcgcgtcggcctgtatgtgcccggcggcaaggccgtctacccgagctccgtcatcatgaacgctgtgccggcccaggccgccggcgtcgaatcgttggccatcgccaccccgcccgcccgcgacaatgaggaaggcctgccgaacaagaccatcctcgccacctgcgccatcctcggtgttgacgaggtatacgcggtcggcggcgcccaggccatcgccatgttcgcatacggcgccaagggcagcgagccgcaggacggcgacatcctgtgcgatccggttgacaagatcaccggcccgggcaacatcttcgtggccaccgccaagtcactggtctccgcattcgtgggcatcgacgcggtcgccggccccactgaaatcggcatcatcgccgatgaaaccgccaacccgagcctgttggccgccgacctcatcggccaggccgagcatgatgagctcgccggttccgtgctgttcaccgactccaccgagattgccgacaaggtgcaggagaacctcaagtaccgcgtgccgcgtaccgagcacgccgagcgcgtccacacgtcgctgtccggcacccagtctgccatcgtgctgaccgacggtctcgaccagtccatcgacgcggccaacgcctacgccgccgaacaccttgagattcagaccaaggatgccgatgctgtcgtcaagcgtatcaagaacgccggtgccatcttccgcggcccgtactccccggtgccgctgggcgactacatgtccggctccaaccacgtgctgcccaccggcggcaccgcccgcttcgccgcaggccttggcgtgcacacgttcatgaagccggtcgaagtcatcgaatacgacgaggagggtctgaaggccctggccgcccgtatcaatgcgttcgccgtttccgaggacctgcccgcccacggcgagtgcgtgctctcccgcttcgtcaaggatccgtatgacaaggccaccctgcgcgagcaggagaagggagccggtctgcgatgagctcgattcccgaaaacctgccgctgcgcaacgacctgatcggtgaggagccgtacggcgctccccagctggacgtgccggtgtgcctgaacgtcaacgagaacccgtatgcgccggacccggccgtatgcgacaccatcgccaagcgtgtgcgtgaaatcgcccccacactcaaccgatacccggaccgtgagcacattgaattgcgtcaggcattctccgattacctggcccgtgaatccggtacccgtctggacgtggacgagctgtggggcgcgaacggctccaacgagatcatgctccagctgttccaggctttcggcggcccgggccgcaccgcactcggtgccgacccgacgtactccatgtacccggagtacgctcgcgacaccttcaccggttggaagctcgcccaccgcaacgccgacttcacgttgaacgtcgacaaggtgcttgaggccatcgccgaggtcaagccctcgatggtgctgctcaccagtccgaacaacccgaccggcaccccgttgccgatggaggatatcgagcgtattctcgccgcctgcgaaaccgccgaagtggccggcgcgggtgagggcgtgcacccgattctcgtcatcgatgaagcgtacgtggaattccgcaagcccggcaccccgagcgccgtgagcctgattaaggaccacccgaacctggccgtaagccgcaccatgagcaaggcctttgccttcgccggcgcgcgagtcggctacctagccgcatccaagggcatcatcgactgcgtgcgcatcgtacgtatgccgtaccacctgtccgccgtgacccaggccgccgcactggccgccttcgaacacaccgatgaacagctgagccgtgtcgagcatctgcgcgaaacccgcgaggccaccgccgcatggctcaaggaacagacctacaaggaccagccgcttgaagtggccgaatccggctcgaacttcctgctgttcggcgggcacttcgacaagcgcgaagccatcttcgacgagctcctgaagcgcggcgtactcatccgcgtggtcggaccggacggttggctgcgcgtgtgcatgggtaccgacgaggagatggaaaccttccgtaacgcccttgttgaagcgcttcgtatagtggaagcagcataagggacgtttctttccgattgcggcgagacccgaagcgattcgagtcccgccgcaatccaatatgacgaatcacacaggagacatgatggcaagaaccgcgcacatcgtccgcgaaaccagcgaatcacacatcgacctcgaactgaacctcgacggcaccggcaaaaccgatatcgatacatccgtgccgttctacaaccatatgatgaccgcgctcggcaagcattcgctgatcgacctgaccatccacgcccacggcgacaccgacatcgacgtgcaccacaccgtggaagatacggccatcgtgttcggcgaagctctgaagcgggccctcggcgacaagaaaggcatccgccgcttcgccgacgccaccgtgccgctcgacgaggcgctggccaaggccgtggtcgacatttccggccgcccgtactgcgtgtgcagcggcgagcccgaaggctacgaattctgcatgatcggcggccacttcaccggctctctgatccgccacgtcatggaatccatcgccttccacgccggcatctgcctgcacatgcaggtgctcgccggccgtgatccgcatcacatcgccgaagccgaattcaaggcgctggcccgtgcgctgcgcttcgccgtggaaatcgacccgcgtgtagacggcgtgcccagcaccaagggagccctgtgatggccgacgacaagttcgatccggacgaatcgcacttctccgacgaggagcttgaggccgcgctcgccggattcgagaaagaattcgcggacgattcggcatccggcgatgccagtgataccagtgatgccgataaaacagcggacgctgcttcagcgaagtccgattccgacgcgaatgatgatacggctgataaggcttccgctgattccggccagcctatgaccgacgacgtcaccgggtcggtcgctgatgcggtgaatgaggccatggccgacgtggtcgacccctcgctcggcttcgacaacgaactcgctggactgttgggtaacaaggcgaaggtggcgctgatcgtcacccgtcttgcctccgccgaactgttggccgcgttctgccagctgtcggacatctccgccgcatgcgtcggtgccaatcagggggccgtcgcggtgctgaagaatctggacggcgacggcccggaagccgcagccaaggacctgaccaccgtggtatccggcatggccgtgattcttgcagtcaatcgtgccgacaagctcgaagtggccatgtacgtgcagggagaggccggacagagtttcgcgccgcccgtgctgttcacctccacaccgcgcttcgtcgaggacctgatgctcggcatcgtaaccctgaaccaactcaagacccaagggttcgaagtggtggattccgctggactcgaccatgaccaggcgatgcagattctcgccaaccataccaagcgtaggcgtggcggacgcggctcccgcatcgaatagacgccaaccaaccagtaggggataggagagaatatgaccacagcggttgttttcgattacggtttcggcaatgtacgttccatggtgcgtgcgctcgccaatcttggcgtcgacaccaccctcacctccgactaccggcagtcgttggaggccgacggtctggtcgtgccgggcgtgggcgcgttcgccgcatgcatggaaggactgaagaaggtcgacggcgaccgtgtgatctatgatcgcatccgcgccggccgcccggtgcttggcgtgtgcgtgggcgagcagatcatgttcgaacacggtctggagcacggggcccatgccgcgggcatcgggctgatcggcggaacggtgaacctgctggacgccgacgtggtgcctcacatgggatgggacacgatcgaggccgcccccgattcggtgctgctcaacggcgtggagaatgaacggttttacttcgtgcactcctacgccgcgatggaagtgaagccggcggatacgtcccgcttcgacattgatctgagcggtgcgcccgaacgcgtgagctggtgctcgtacggccggtcgcgtttcgtggccgcctacgaacacggcccgctgtccgccacgcaattccacccggaaaagtccggggacgctggcgcccagctcctcaagaactggatcgccacgctgtaaaaagcatgaagctcccctctgacgagagagctcaaattatgtataagtaactgaagaaaggctcttcttatgtcgttgactctgctgcccgccgtcgatgtacgcgatggcaaggccgtgcgcctgcgccaaggcgaatccggttccgaaaccgattacggttcgccgtttgaggccgcccgtacctgggttgaggccggtgccgaatggattcacctggtcgaccttgatgccgctttcggtacgggcaacaatcgcgatcagctgcgtgagatcgttcatgagcttggcgaccgcgtgaacatcgaactgtccggcggcgtgcgcgatgacgcttcgttggacgcggcccttgaggccggtgccgcccgagtgaacatcggcaccgccgctttggagaacccggattggaccgcttcggtcatcaagaagtacggcgaccgtgtggctgttggtctggatgtgcgcggtcacacactggcggcgcgcggctggacgcgcgaaggcggcgacctgtttgagaccatgaagttccttgactccgtgggctgctcgcgttacgtggtcaccgacgtggccaaggacggcatgatgtccggcccgaacatccaactgctgcgtgaagtcgccgaacgcaccgacgccaaggtcacggcctccggtggtatctccaagctggacgatttgcgcgccatcaaggaactggccgagatcggcgtcgattccgccatcctcggcaagtcgttatacgtacgtgcgttcacgctccaggaagcgctcgcagtcgcgaagtaggcaaaggactcgccttagcgagactgttaagctacctttgctcagctatcgcttcactcaggcctcgcctacggacagcccactgggctgtccgcttaacggctcagcaaggaaggtcgccggatttgaggagctttttgaagacggtgtagtcttcatcattctgttcggcgtagctgacggcgaacgaggcaatggcctgatcgaattcgtcggtgccacccatgtaattggcgatcgcgatcgaatcgccggttcgctcatagtcactaccatagtgccgtgccggcatgggcccgaaccatgcctgacatgcggaccggggcatgttgatgaaatctcgcgactcgcaggtgacaaacagtgagatgttaacgcccctcgtaacacggttatggaacgataggcgactatggataaacagcaggagtttgcgctgcgcacggtcgaagaacgcgacgtgcgctttattcgtctgtggttcacggacgtgttgggaacactgaagtccgtggcgattgctccggccgaactggaagccgcgtttgaggagggtctcggcttcgacggttccgccatcgagggcatgacccgcgtgtccgaagacgacatgatcgttcaacccgatcccgcgacgttccagatcctgccgtggcgcggtggcccgcaaggtaccgcccgcatgttctgcgacattctgaccccagacggcgagccttcgctcggcgatccacgtcacgtgttgaagcgtacgctcgccaaggccaaggacaagggcttcacgttctacgtgcatccggaaatcgagttctacctgttcgaaagccaggacgactggtccaaggccccgaccccgatcgacgagggcggctacttcgaccatgtgccgcgcagcccaggcatggacttccgccgcgccaccgtgaacatgctcgagcaaatgggcatctcggtggaatactcgcaccatgaggcggggccaggccagaacgagatcgatctgcgatacgcggacgcgctcaccatggccgacaacatcatgacattccgtacggtggtcaaggagatttccttggagcgtggcattcacgccagcttcatgcccaagcccctggccgacgcgcctggttccggcatgcacacgcacctgagcctgttcgaaggcgattccaacgccttctacgaggccggtcaggagttcaacatgtccctgaccgcccgccagttcgccgccggcatcctgtaccatgcggccgaaatctgcgcggtcaccgaccagtacgtcaactcgtacaagcgcctgtggggcggcaatgaggcaccaagctacatctgctggggccacaacaaccgttccgcgttgctgcgcatcccgcagtacaagccgggcaagggcaactccgcgcgcatggagttccgtgcgctcgacccggtggccaacccataccttgcctactcggtgctgctggccgccggtctcgatggcatcgataagcagatgcagctgggcgaacccaccagtgatgacgtgtgggagctcaccgacggcgaacgtcaggctatgggcattcagccgctgccgcgctcgctggacgaggcgctgaagatcatggagaaatctgacttcgtggccgacgtgctcggcgaacacgccttcggctacttcctggacaacaagcaccaggaatgggaggagtacaaccagcaggtcacgccttacgagctgaagaagtatctgccgaagctgtaatcgcaagcgttgcacatgtgccgaaccccgtcgatgattggtcatcggcggggtttttatagcgtgtcgtggtggtgggtagcgggcagaggtgggaatagtgttgtcgctgagttgatacgaaaaacgattgacgtaaccgacgaatcagcttgtagtacgagcgagagcactcaagagagcacccatgacgaacacacctgcgaacaccgcgcgcaccgaccgcttcttcaatctgccggtcaccatcctgatcttcgccagcttcatgctgggcatgagcgaattcgtggtagtgggcatcctgccggacatcgcatccggacttaaggtctccgaagtgaccgtgggtaatctggtggccatcttcgcattcgtgtacgcgccctgcacgccgctcggatccgcattatccgcccgattcccgcgctttctcacctatctgacgttgatgggcgtgttcctcgtcggcaatatcctgtgcgccttcgcgccgaactatccggtgctgctcattgcccgactgctcatcgcctcggtgtccggcacgctggtggccatctccatgaccttcgcgcccgacgtgaccaccgacaaataccgcaccaagttcattgcctgggtattctcgggtttctccatcgcctctgtggtcggcgtaccggccggcacttgggtggccaatactttcggctggcgtgtcacctttgccttggtttcggtgctcaccgccgtgctgatggcatcgatggcagtgtctctgccacgcaactcacatccggcgaagatcggtttcctgaggcaattccgtctgttcttcgaccgccgcatccagctcggcgtggcggatgtggtctttggcgcagccgcctcctacgtcttctacacgtatctctcgccgatcatgcgcgacgaaatcggtgtgcccgaacgctatatcagcgtcggcttggtggtctacggctgtgcctgcctgtggagcaacctgtacggaggcaagctggccgatcggggcaggggggtcgagccgctgacccacattcgaccgatctactgcgtgcaggccgtctgcctgtgcctgctggctttcgcctcgctggtgccggccggcggcgcactgctgctggtggcgcttggcatgctcatgtatctgcagaattccgcttcccaggtgctgtatatggatgtggcctaccaatcccatcccggttcggtgaatctggccgcctccctgaattccatgtcgttcaacatcggcatcgccatcggctccgcggtcggcggcctggtcaacgacgcgttcgggctgatgtggcttggcccgttcggcgcgattttcgcgctgctcgcggtcggcaccacgaccctgctgcgtccgtacgtcagcccggtcggggaatgacgggtggcgtgacgcgcgggaacgaagggtttttcccgcatgtccccgcggcatgccttatccgccgattgccgtccattgataacctgctatccaaataaccgataaggccacagcatgtcatcctgctgcgaaaccttaatgttaggacaccggctgcagggggacccggctcacgggcgcccacctgcgcggattgatgattatcggcatgttcagcgtgaaaatggggatgacaatatgacggatgcgacggcgaaagccgcgccgaaggcggaaagacggcggcgcgttctccgttccggcgctcgctcatcgatagtggtcggcggcgccatcgtgctgttcttcgtgctgctggcgccgctggccgggctgttgtcggccatcaccggcaacgacccgtacgccgagcatcccgaggccttgggtgccgggtcggtgccggccggattcggcggcggcatcagtgcccggcactggttcggcgtcaccccgctgcgcggcgtcgacctgttctccatcgtggcgtacggctcacggatctcgctgggcatcggcgtcgtctcgtcggtcatctcgctggtcatcggcgtggcgctcgggctgctggccggctatttccccgggttggtcgatgcgctgatctcgcgcacgatggacgtcttcttcggcttcccgttcctgatcttcgcgatcgcgctgtcggcggtggtgccgcagggcttcccgaggccggtgctgctgacgctagtgctcggattcttcggatggcccggcatcgcgcgtcttgtccgggggcagacgctgacgctgagcaagcgcaatttcgccgtcgcgtccaaggtgatgggcgcctcgcctgcccatgtgctgtggcatcagatcctgccgaacctcatgccgctgctcatcgtcaacatcacgctgtcgatccccgggcgcatcggcgccgaggcgggcctgtcgttcctcggcgtcggcatgaacccaccgacgccctcatggggccggtccatctccgacgccgtgcagtgggccctggtcgacccgatgtatctgatcttcccgggcgccgccctgttcctgctgaccttcggcttcaacctgcttggcgatggcctgagcgacgccatcgacccgcgcaagggggtgcgtgcatgagaatcctgcaatacatcggcaagcgcgtggcgagctcgatcgtcgtcatcctgctcatcacgctggcgctgttcctgatcttcttcctgctgccgaccaatccggcgcagctgtcgtgcggcaagccgtgcacgcccgagcagctgcagcgggtctccgccttcatgggcaccgataagccgtggtacgagcagatgggcaattacgtggcgggcatcttcgtcgggcgcaccttcggcagcggcggcggcgccgtggtctgctcggcaccatgcctcgggtattcgttccgtctcaacgaatcggtgagccagctgatcctcgaccgcttcccgatcactgcgtcgatcgcggtcggcgcggccgtgctgtggctggtcatcggcgtggcgaccggcgtgtgggcggccctcaagcgcgatacgctgatcgaccgcacgctgctcgggctgtcgatcgtgggcgtttcggcaccgtcatacctgatcggcctgctgacggtgatcgccttttcgctggtgctgcagatattccccagcggcgggtacgtgaacttccacgacgaccctgtcggctggttcacgcatctgctgctgccgtggctggtgctggccgtgctcagcgccgccggctacaccagggtcacccgcacgcagatgatcggcgagctgagccaggactacatccgcaccgcccgctccaagggcgtgcccgaatcggtgatcgtcttcaagcacgcgctgcgcaacgcgctgctgcccgtgatgaccatgttcggcctcgatctgggcgggctgctcggcggcgcggtgctcaccgagaaggtgttctcgatgcaggggctcggttcgctgctgctcgattccgtgtcgaacctcgacctgcaggtgctggtcggcgcgacgatgttcgccgccgtgctggtcatcgtcgccaacctgatcgtggacatctgctacagcctgctcgaccccagggtcgcgctcggcacgaagtagtgcggctgcggccgacgcgatacttgccggtctgctccacggaccggcaccgatagagaggaaaaccatcatgaagaacaacgcatggcgcgtattcgcggcgggggcttgtgccgcggtactggcgctgtccggctgcggcgcgtccaacgacaacgccgccaccggctcggcgagcggcaccaccgtcaagggcggcacgctgaacgtgctgctgtccagcacggagatggatctggacccggccaagagccagggtctgccgaccaccacgaacggcaacatcttccgccgcctgaccgcgtggaagatcaccgacaagggcgagacgaaggtcgtgcccgatctggccaccgacaccggcaagtcgagcgacgacggcaagacgtggacgtacacgctcaagaacgggctcaagttctccgacggcacgcccatcacctccaaggacgtcaagtacgggctggagcgttccttcgccgactcgctgaccggcggcctgagctaccacaagacgctgctcgagggcgcgcaggactaccacggcccgttcgacggccaggagctcagctccatcgagacgccgaacgacaagaccatcatcttccacctcaacgcgccgttcggcgactggccgtgggtcgtctcgctcgccgcgttcacccccgtgcccgacggcaagggcccggcgtccggctacggcaagctgccggtggcctccggcccgtacaaggtcgagtcgaacgaggccggcaagcaggccgtcttcgtgcgcaacaccttctgggacaagaagaccgatccggtgcgcaccgcgggccccgacaagatcgtgttcaagatgggacaggacacctctgtggccgcccagtcgatcatgcagggcaccggtgaaggcaagaactcgttcctgtccggattcgtgccggccgcgcagctcgcgcaggcgcaggccaacccgaactacaagaagctgctgaccaccagcggcgacggcgcgctggaatacctcgccatcaacacccaacacgtgaagaacgcgaagattcgccaagcgctgcagtacgcggtcgacaagaaggcctaccagacggcttccggcggcgagatcgccggcaacttcgccaccacgctcattacgcccggcatcgagggccgcgaggactacgacctgtacaaggccgatccgaccggcgacgtggacaaggccaagcagctgatcaaggagtcgggcgagcaggccccgaccctcaagctcatcgccacctccgctcaggccgaaaccgcctcctcgatccagacgagcctcaagcgggccggcgtcaaggtggacatccagacacttaacgacgatgtgtattccgatacgctgaccaacgacaagggcgactacgatctggccatcagctcgtggcagcccgacttcccgtcgccctacgccaacatctccccgctgttcgactcctcgcagatcggccacggcaactacaacctggcccgttacgcgaacccgaaggtcgacgagctgatcaagaaggccaccgagaccatcgatcagaccgaggccggcaagatctgggccgaggccgacaagacgatcatggccgacgcgccggtcgtgccgctgatctattcgaagaacacgttcatccacggatcgaacgtgaccaacttcgtcatcggcaacttcccggcgtacccggactacacgcaggtctcgctcgccagcgcgaactgagccggcatccgcatccggcgcgcgccggcggcatggtccgctggcgcgcgcgccggacgcattccaacgcttgtgcatccaaggagcttccaatgagtgaaccacgcgcgatcgtgaccgtggacggtctggccgtcagcttcgacgagcgggaggtgacccacggcgtcagcctcaggctgttcccggggcgcatcaccgctctggtcggcgaatccggctccggcaagtcggtgacggcgatggcgctgccccgtctcgatccgtcggtggccagcgtgaagggccacgcgtacctcgacgacgcccttgtggatgacgggccggactccggtccgggcggcgacggcaaggacgccgccggccgcggcatcgatctgctggccgccgacgcgccgctgcaacgcatccgcggcgaatacatcggcacggtgttccaggaaccgtccaccgcgttcaatccggtgttcacgctcggcgtacaggtcgcggaatcgctcaaataccaccagaagcagctcagcgccgccgagcgcaaggccaaggtgctcgaacagctgcgcgaggtcgggctcgacgacgccgaacgcgtgtggtcgtcgtacccgcatgagctgtcgggcggccagctgcagcgcgtgatgatcgccatggcgatcatcaaccgacccaaggtactcatcgccgacgagccgaccaccgcgctcgacgtgaccacgcagaaggcgattctcgccctgatctcctcgctggcggtcgacctcgatctggccgtgctgctcatcacccacgacatgggcgtggtgtggcaggccgcgcaggacgtgtacgtgatgcacaacggcgtgatcgtcgagcaggggagcgtcgcgcaggtcttccgccacccgtccgacgactacacgcggatgctgctcgacgccgtgccgcgcctgcgcatcgacgagcatgcggcagacggcgaacatgcggccggcggcgaacgcatcacggaaagtgacgcgcccggcggcggcaggcgcatcacgcaggtgaacgacgtggccgtgtcgtacaaggccggcagctttgccgtcaaggacatctcgttcgatctggtggccggcaggacccgcgcgctggtgggcgaatcgggagccggcaagaccacgatcgccaaggtgatctccggccagctcgcgccaacctcgggcacggtgctcatcgagggggaggatctcgccaaggcgcatggcaggcgcaagcgcgagatcctgaagcatatgggctatgtgttccaggacagcggatcggcgctcaacccgcgcaagtccgtggcatggagcatcggcgagccgatgctcgtgcagggcgggctcagcgagacggaccggcgcaagcgcgtccttgaattgcttgatcaggtggagctgcccgccgatgtggccggccggttcccgcaccagctgtcgggcggccagcgccagcgcgtcggcatcgcgcgcgccttggcgctcaacccgtcgctgctcatcgccgacgagccgacgtcgtcgctggacgtgaccgtgcagcgcaaggtgctcgacctgctgcgccggctgcagcgcgagcacggtttcgcatgcctgttcatcacccatgacctgggcatcgtgcaggagatgtccgacgtgatcacggtgctgcgccacgggcgcgtcgtggagagcggggagaccggccgcgtgctcaaccatcccaaggccgagtacacgcgtaccctgctcgacgcctccccgaagatcgacctgtgagccgtgccgcccgtcatccggccggttctccggccgtgcggcggggcggcgacggcgcggatgacacctagccttaccgtggtttcggttttttgccgtcccgcccctatcggcgcgcggcaccgaaccagttggtgtatatgagggcgaagttgcggttgccgtagctggagcatgagtcgccctcgccgaacccggccgccagcgaggcgtcgttcggctggtagggcgtgtagatgtagagcagcgcggtcgccttgttctcgatgtacacgttggtgccgccgcacccggcatccggatggtactggatgtagttcagcgcgttggcgtgatagccgtaggcgctttcatgcgccacgtagtattggtagcggtgcgccgccccgtacacctgtctgaagaagccggcataggccggatcgcagttcgcgttgtccgggcagctcagccccatggcggccttgtactggaagtccgtcggatcgacggccgtgaccaggtgctgctccttctgcatcacggtgagcagcaccttctggctgatgccgcacgcgcgcgccgacttgtcgacgatcgcggccgcggtctcctttctcgcgccctcgtacgccgcgcaatactcgttcgccgcctggtcctcagtgtcgaaggtcatggttttcaggcaccgggaaccgctgcacgccgcgccctgcttgtcgaggaacgactggacctcggcctcgctcatcgcattggcgttgaagaactggccgtccgagatgatgtcgccgggattgaagtcgtattgctgcgtcagctgcagctggcgggcctcggcctcctgcacgtcgcgacgccactggacgacccgcacagtgcccacgaccagcgcgaccacgcatgcggccgccaccacggtgaccagcacagccgcgacgcgctgcgccaacccggcccgcttccaccagcgcgccgggctgagcggatacctgcgattgcgcgggcgtttgcccgggcgacgtttgcgattgccgcctgacacgccccgccccgcgacaatcacgttcgccctgccgcgcggattggccggcttgcgccgttgcgtcgtcgccatcgctacgccagtgccttcttgatgcgctgcaggctcaccggcttggcggtgccaagctcctgcgcccatagggacacgtagaactcttcaagcatccaacgggcctgttcggcctgcttcatcaatgcctcatgcttcgggccggccggctccgccttggcacgggccaacgccttatcgaccacctgacgggcttcgtcggcctgccaggcccacttgacgtcacggttcttatcggttttcgccttattgagtcggctcagatcggctctcaaatatcggctcaacgacttcagcgcatccgggggagtacgcccaatgaatccggggtagacgagcgtggcgatatggtcgcgaatcgactgcaacaccgaaagcatcggcagatcagccttgccgccagtggccttgtcgacttcggcataagccttgagcacggcgatcacgtcatgcgccacctgatagacggtgtcctcgtacacttcgcgcacatcgagcaccgcattggccaacgcctcatcgtccgagagcctgtcgacattcggcatcagccgtttgaccgtggccagctgcaggtcttcgaccagatccttggtgaacttgtacggagcagaagccagcatcaacgcctcggtacccagccagcgcgacgaaatgcgttcggccggcaaccgcagcgcatccaatgcgccacgccagagcatcgtggcccgggactcggtggtggcacccgccttatgcaacaggttcgcctgactgaccagcttgccctgttctccagcctgatcggcctgcttcttgaccatttgacgggccgacgcctccgcctgcgcggcgaacttgcgttgcagcgccttcagatccttggacacacccagcaccttgacggggccgcgcgcatgccggcgtccacgagggtgcttgccggccggcagttgctgctccaccgagaacgtgaccctgagatacagggaaagacgctcgaccagttccggccccaacacttcgggatgaatctgcgcacccttggtggcgatggccgccttggtgaacacatgtgccaaatcaggccagccaacggtcgtgccatcctcatccaccggcggcagattcggcttctgctgcgagcccgagcccggcagatccgggtaatgctcgtcgatccagtcacgaatcgcacgcgcggcatccggggccggcacgaactggacgcgcagctgcttgggcagcgccttgatcatcgacagaatcagctcatccaacaggcccggcacattccatgtgaactggtcgggcgtgatacgcgagagcgccttcaacggcacatgcacggtgacgccgtcggccgggtcggccggatcgtatacgtagctcaaacgcaggtcgatgggttggccgtccgatccggtcgtatgccaatggtcggggtaatcgtccagactcaccgaatcgctggatgccagacgctccaccttggccgggtcgaaatcaagcagattcggctgacggtcatgctcggacttccaccatttcgccagatcggccacgctggtcacatcgttgggaatgaccgcgttgtagaagtcgaacagatcctcgtcggacacggtgtccgccagctggcgggtgcggctcgcgtcatcggcggcatcctcgagaatgtcacggtttttgcccacaaagtcgtcgtaactgaagcgctgctgaatatcgccctcgaccagaccctggcgaatcaggaagtcgcgtgcctcaagcggattgatgcgtccccactgcacggcacggtcctgtacgatcggcagaccatacagcagcacgcgcgcggtggccacagccgagccacgcgaacccgaccagtgcggctccgcatacgtggtgcgggtcaattggccggccaacggttcggcccacgccgggtcgatggccgccgaatagcgggcccacaggcgagaggtctccaccagttcggtgctcatcacccatgacggggtcttcttggccacggcggaggcggggaacagggcgaaacgggtgccgcgcgcgccctgataatcgttcttcgactgcttctgggcgcgtttcatcgcacgggcgcgcgccgcaccggtcagccccgcgaaatcggaggccttgggctcacgcaccacctgcatgcccatcatcgacagcaatccggcgagcatcgacttgtggatgccatccgcatcccacgagcagcacagcgaatgcgcggcctgctgattcaacggcagctggcgaatctccaagcctgggcgggaggcgggcaacgggtcgccgaccttgaacttcagctccttgcacatctggcgtagctgggagacgagatctttccactggcgtatcctcagccagctgagatactcggttttgcagatacggcgcagcgcgttgttgctcgggtcgccgtccgcttggaacacgcgatcccagatgttcagggccgtcaggaaatcggaagtctcatccgcatatcggttgtggatacggtcggcatcctcacgcttgtcgtccgggcgttcacgtgggtcctgcaagctcaggaacgccacgaccacgagcacctgggccagaagattcggcgaaccggttttcgcggcctcgataaccatacgtcccagacgcacgtcgatggggatgcgcgccagctgacggccggtatgggtgagcgtcacctcgccgcgctttcggccgatggccttgagctcggtgagctcattgaaaccgtccgacacggccttcatatccggcggatcgatgaacccgaagttcgtgacgtcctcggccgtgcgggccacgcccaccgacagcatgtgaagcaccacggcacccagcgaggtacgcaggatttccggctcggtgaagcgcggtcgggtctcgtaatcctcacgcgaatacaggcggatcgcgatgccgtcggccacgcggccgcatcggccggacctctggtcggcactggcctggctgatcggctcgatcggcagacgctggacctttgcggtcttcgaataccgggagatacgggcggaaccggggtccaccacgtagcggataccgggcacggtcagcgaggtctcagccacattggtggcgatgacgatgcgctgatgcaaatgcgattcgaacaccttgtgctggtcggcggcggacaatcgcgcgaacagcggcatgatctcgatggcgtccggtcggcgcatgtcgtcggcgcgcggaccgtaatgatgccgcagtgcggcctcgaactcgtggatgtcgcgctcgccggaagcgaagaccagaatatcgcggggaccgcgctcatgggaggagtggatcaccagttcggcgcaggctcgagccacggccgtgggcatatcggtgatgccgtcatcggcataggagtcgccggaccggccgcggggccggtcggaatcggattccgcgatggcgctggccagctcgtcgtaatcggcgtcgccggggcgggcgcccaccgcgaatcccggcacttcgcgcatcaacgcgggcgcggtgccaagcggctcatagaccacctgcacggggaaggtgcggccggaaacctcgattaccggcaccttctcatgcaaggcgtgctcgaaatgctcctggaacttgaccgaatcgatggtcgcggaggtgatgatgagcttcagatcgcggcgctgaggcagcagtgccgtcagatagccgagcagaaagtcgatgttaagactgcgctcatgcgcctcgtcgatgatgatcgtatcgtattgggtgagtttcggatcgcgctggatctgggcgagcagaataccgtcggtcacgactctcaatcgcgtgctgggcgagctttcgtcggtgaaacgcacctgatagccgacctcgtcaccgagcttcacgcccatctccgaggcgatacgttcggccaccgtgcgcgcggcgatacggcgaggctgggtgtgcacgatctgcttgccgtgcgcgccacggccaagctcaagcaggatcttcggcagctgtgtggttttgcccgaaccggtctggccggacacaataacgacttgggaacgtttgaccgcgctggctatctcatcacgcgcggcagatacgggaagttctgcaggatactcatatttcatgacggacttcaatgatacggaagcccttggagctcgcgtatttgctcgcagtgaacccctcgccgagcgcatcgtccagccaggggatcagcgaatcggagccgagattcttctgcactacgagataggcggcgccgcccaccttgagcttcggcagccaagccataagcaatgtatgcagcgcttccttgccgactcgaatcggtggattcgaccaaatcgcatcaaacgtgaggtcgcccggcaccgtctcgcagaacgccggctggttctcggcgggcaggggagtgctggactcgtccacctgagccgtatgaatgttcgtgcggccgttcgcctgtgcgttggcatgggtcaggtccagcgcgcgctcgttgacatccaccgcccacacgttcgcttcgggcgactcaaacgccaatgtcagggcgatagggccccagccgcagcccaaatccaggaaatcgccggtaagcggcggctcgggcgcatgcttcagcaataccgacgtaccgaggtccacgcgcgagccggagaacacgccgttcgacacctgagcggtcgcctcatggccgcgcaacgttacgttcaatgtgcggcgcacgtccttcgacgcgggttccgcagagaaatactgttctgccatggtcgctccatttctgcgggatttgccgctctcgtatgccgacctgtatcagccggcctatgccggtacgtgccgatctatgccagcatgtcacctcatgtgatgataataaaggaccatagaagaatcgtgaaccattccaaccaaacgaggcgcacttgaccgacaacacccagtacaccgacatcgaccgcggcaacaacgacgttacccctgaaggtgtgctggccgggcagtccgaagtgctgctcgacgacagccagcgcgcgaccggctggcacgaggacgccaaccaggaatgggaggagcgcgaggcccgcaacgagctcaagcatgtcgccggtctcggcgagctgcaggacgtcaccgaagtcgaataccgcaaggtgcgactggaacgtgtggtgctcgtcggcgtctggtcgtccgccgtcaccacgcaagccaaggccgaggaatcgttgagggagttggcggcgctcgccgaaaccgccggtgcggtggtatgcgatggtttgctgcagcatcgctccaagccggatgcagccacgtacgttggttccggcaaagccaaggagattgccgacatcgtggcgcgtgaggaagccgatacgattatcgtggacgacgacctgccgccgtcacagcgccgtgcattggaggacgcagccaaagtcaaggtggtggatcgcaccgcggtgattctggacatcttcgcccagcacgccacctcgcgtgaaggtaaggcgcaggtggagttggcgcagctcgaatacatgctgccccgactgcgtggttggggtggttcgctgtcccgtcaggccggcggtcgcgcggcaggcgcggatgcgggcatcggatcgcgaggcccgggcgagaccaaaatcgaaatggaccgtcgtgtaattcgcacgcgtatcgccagactgcgccgtcagattcgtgagatggctccggcacgtgaggtcaagcgcggttcacgccgtcgcttcggcctgcccacagtggccgtggtcggttacacgaacgccggcaaatcctcgttgaccaaccgtctgaccggttcggccgaactggtggaaaacgcgctgttcgccacattggacacggccgtgcgccgcgccaaaacccgcgacggacgcgcttacgcctacgtggacacggtcggcttcgtgcgccgcctgcccacccagctgatcgaggcgttcaaatccaccctggaagaggtggccgaggccgacgtgatcctgcacgtggtcgatggctcccaccctgacccgttctctcaggtcgacgcggtcaatgacgtgttggcggacatcgaaggcacggcctcgattccgcgtattctcgtattcaacaaggccgatcaggcggacgaggcgacacgtgaacgactcgccgcactgcagccggatgcgttcatcgtctccgcctataccggtgagggattggacgagctgcgtaccgcggtcgaaagtctgctgccggtcccgcatgtgcatgtcaacgctctgctgccgtataccgctggctccctgatctctcgtgtacgcgaatacggcaaggtggacaaggtggagtaccgcgatgatggcatacagcttgaagcggacgtcgacgcccatcttgccgctcaggtggtcgaacagtccattgactaacgtgataaacatcacagtttgtttgtgagcgctaacaaccgttggaaacattaccataccgttatcagacagggtggtgtgctggtagcaaaacgtcttagcgggtttatagagtgaaaaccgttagttacaaggcctgccattcatcagcagaccgcctttgaagagaggttcatccatcatggcggaaactaccgttaagcccacgaagcttgctgttattggtgccggtgccgttggctccaccctcgccttcgccgctgcccagcgtggcgtcgctcgcgagatcgtgcttgaagacatcgccaaggagcgcgtggaagccgaagtgctcgacatgcagcacggctccagcttctacccgaccgtgtccatcgacggttccgacgatcctgagatctgccgcgacgccgacatggtcgtcatcaccgctggtccgcgtcagaagccgggccagtcccgcctggagctcgttggcgctaccgtcaacatcctcaaggccatcatgccgaacttggtcaaggtggctccgaacgccatctacatgctcatcaccaacccggtcgacatcgctacccacgtggctcagaagctcaccggtctgcccgagaaccaggtcttcggttccggcaccaacctggactccgctcgtctgcgcttcctgatcgcccagcagaccggcgtcaacgtcaagaacgtgcacgcctacatcgccggcgagcacggcgactccgaagtcccgctgtgggagtccgccaccatcggtggtgtccccatgtgcgactggaccccgctgcccggccacgatccgctcgacgccgccaagcgcgaggagatccaccaggaagtcaagaacgccgcttacaagatcatcaacggtaagggtgccaccaactacgccatcggcatgtccggcgtcgacatcatcgaagccgtcctgcacgacaccaaccgcatcctgcccgtgagctccatgctcaaggacttccacggcatctccgacatctgcatgtccgtgccgaccctcctcaaccgtcagggcgtcaacaacaccatcaacaccccggtctccgacaaggagctcgccgctctgaagcgctccgccgagacgctgaaggaaaccgccgcccagttcggcttctgataaaaaatcgctgtacggagcgcctttcacaccgcacaaggttcgaactacctttgtaggccttcaccttgtgcggcacgaaaaatcgcacacgtacagcgattttttataccctgctgaatgcttccagaggaagcattttttattcgtggaattcgttggaggagggggagctatagccctcgggctcaagctggaaggtggtgtgggggaccgagaccgggaagtgctcgcgcaggcaatcctgcagttgggtgaggattgtggcggcatcttccatggtgaggtctttgtcgactaccacgtgggccataagaatcggcatgtcggtggacaccgtgctggcatggaggtcatgcacggcaagcacatgcggcacgtcttccagatgctcgcgtaccttatcgagatcaagaccatccggtgtttcctccagcagcaccttgaccgcgttgtgcagcagcttgatggcgcgcggaatcatcatcagtgcgatgacggcaccggccacggcgtcgaagccattccatccggtggagatcattaccagggcagaggccaccacagacaccgagccaagtgcgtcgttcattacctcgaggaacgcggccttcatgttcatgttgtcttcgcgctgcgaggcaaggatgaagatcgagatgatatttgcgacaagacccagaatgcctacgaacagcagcaagccgatatcgtcgatttccgctttggagccgccgaacagacgcatgccggcctctaccaacgcatagatgccgacgataagcaatactacggcgcccgcggcagcggtgagcacctcaagcctggcccagccccaagtacgagtgttgttgggcttgcggcgcatcagtatggcggtgattgtggatgccaccagcacggacatgtcggtgagcatatgaccggcatccaccagcagggccagtgagccggttaagacggccgacaccacttcgatgaggaagaccgaaccagtgacggtcaacgtggcaatcagcctgcgctggtgcgcggcagggtttacggatgtggatggtgcgggtgtatgggtatgggccatgtgcactccttcgctctatcgagttgaaaccgcttctcaataccatttgcgatatggtctgaatacgacgaaaccccggcgcgaggccggggtttcgtaagcagtgtgcgactatagcacgaccagcgcgattcagcgcacgctgatcagctggtggcgaacaggctataatttgcgcagtacggtgaccaccttgcccataatcgtggcatgtgtgccgtcgatgggcgagtatgcggggttgtgcggcatcagccagacatggccgttttccttgcggaaggtcttcaccgtggcctcgtcatccaacagagcggcgacgatatctccgttgacggcggaattctgttcgcgcaccaccacatagtcgccatcgcagatagcggcatccaccatggaatcgccgtggacttccagcatgaacagggtgccggagccggtcagccgttcaggcagacgcatgacgtcgtccacatgctgttcggcggtaattggcacaccggcggcaatacggccaacgagcggtacgtcatgtgattcggcaatggcttcggcggggaattggtatatctccgccacattgctggcgctggttgcctcttcgctggcttgtgatggcttttcggcattcggggcggatcctgccatcacctcgatggcgcgacccttgttcgcgttcatgcgaatgaagcccttgtcttccaaaacttgtagctgatgcttgaccgaagacggacttttgagcccggcggcatttccgatttcccggaaagagggagcgaagccttgttcgtcgatatgcgtgcgaatggcgtccaacactttgcgctggcggtcggtcagggtggactcgtccggcttctgcttgggggagaggggaatggtgctcacgtcagggctcctttcgttatgtcaccagcataacgtgttgttcgtgtgaaatcaaacatctgttcgagcttcgacttgaccgtgtcgaacatttgtgccattataagaacagttgttcgatagaacatctgttcgagagaggtggtcgtgatgactggttcaatggtgatggccccggcccgtagcgcacgtgtagctatgcagcatgctggaacgtcccgccggaatgtgcgtgggcggattatcgcagtgatgatcgccttggcgctggcctggtgtggtttcggcgcgcttaccgctcagcgggcccaatcagatacgggtgccacgcaggtgaccagctatatcgtgcggccgggggatacgctctggtcatatgcttcggctattacacctgctggccatgatgtatcggaaacagtggatgagctgattacgctgaacaatctcgagtccggaacattgcaggccgggcagcgcattattgttccggttgagtaaatgaaacccgagcggcatggtttttccgcccgtacacgttattctggagagcatgcattgccctttttgccagaaccccgacaccaaagttattgatacgcgcattagcgatgacggtcattccatccgtcggcgtcgcgtatgcccgaaatgcaacaagcgttttaccacggtggaaaccagtatgctgctggtcactaaacgttcgggtggcgtggagccattcagcagagacaaagtgatttccggcgtacgtaaagcctgccaggggcggccggtcagagaagaggatctgaagctgctgggacagaaagtcgaagaggatcttcgctcccgaggccttgccgaagtcacctcagatgaagtgggcaaagccatcctgaaaccgttgcgtgacttggatgtggtggcgtaccttcgattcgcgagtgtgtaccagaactttgcaggtctggaggatttccaaagcgccattgatggtttgcgtgaataatatgcgaatgccatgcaccgtgatatgcgagtgattcgcaaaccatggtgcgaaccaatcatgaagccctgcacttatgaaagagacccgtcagcgacgggtctctttcatatcaatcgaggatgagctgcgtcagctgatgacacgcatgcgaacggtgccctcgatgttgcgtagtgcttcaagcgtggcggcgctgggcttctgagccacgtcggtgaccacatagccaagttcgccttcggtggccaacgactggaaggaaacgttgatgttctcttcgccgagcacgcgattgacatgagccagcacaccaggaagattgtcgtgcagatgggcgatacggcacacgcccttgcgttcacctaggttgatctgcggtaggttcacggacaatgaggtagaacccttgaaccagtaatcctcaagacgctgagagacgaaatggccgatggattcctgagcctccaaggtggagccgccaatatgaggagtcagaatcatattgtcttcgttggccagtgaggtctcgaacggatctccgctcttcttcggctcaacggggaacacgtcgaccgccgcgccagacagatggccggaatcgaggtgctgcttcagagctcccagatcggcgacgaaaccgcgcgaaaggttaatgaaaatcgcgtcctgcttcatgtgggcgaattggtcttcgccgaagaagccggtgttcgacttgcggccatccacgtgcagggtcacggcatcggactgttccagcagttcgttgagggtatcgcaacggtgggcgttgcccagtgccagtttctcctcaatgtcgtagaacaccacgcgcatgccgagggcctcggccagtaccgacagctgggagccgatgttgccgtagccgatgatgccaagggtcttgccgcgcacttcatgcgagccggaagcggacttgtcccacaggccatgcttgatgtgatgcgtgtgtgcgggaatgcggcgcatcaagcagatgatgtcgcaaatcaccaattccaccacggaacgggtgttggagtagggggcgttgaacacggcgatgccacgcttgccggcatgtgccagatcgacctgattggtgccgatgcagaagcagccgatggcgcttagcgtaggacgcgcatccagcacgcgggctgtgacgttggtcttggagcgtacgcccaccaagtccacgccatccagcgcgtcgatgagttcgtcctcgctcagggctcccttcatggtctcgacttcgaaaccgtgatcacgcagcgatttggccgcgtcggggtgaatgttttccaataacagtgctttgggcatgcttcataccttagatgttcagggacttttcgtccgttcttgtccgaactataaccagtttctgggtcggcctggtcattgccacgtacaggtccgaggcggcgaccaggcggctcggcgcgtcatcctcgatgagaccgggctcgaccaccacgacggcatcgaactccagacccttgaccgtttcggtgccgcagacgctgatttgctcatcccattcgggctgctcgatgagccttgcgtattcggccgggtcaagaacggcggccagtttgcggcgcacggcgtcgcgcaccggggcgatgagatcatccggacagatgacggcgatgcggccggtgccgtctgccgaaacgaattgttcggcaagctgcgccgcctgctcggccgtcgtttccagcaaggacgacatgtcgggcaccacattgcgggacaccgaatcggggatggtgcgcaccgcattgaccgtggagatgtagaggccttccttctcggcaaatcgtgaggcgagttcggaaacttcctgcggattacggtagttgatggtcaactcgttcagatcccagtggctttcgccgaacaggcggttcatcgatttgctccagcgtcgggtgccacccagcgccgaggtctgcgccacatcgcccacgatggtgaacgagcgggaggggcaacggcggatcaacatacgccagtccatggcggtcagttcctgcgcttcgtcgaccacgatgtgcccgtaggtccattcacggtcggccgcggcccgctgcgcggtcagctcggcgtcgtccccgttcatctggtcgagcagcatctgactggagacgatgcctccacccagaccggtcgcggccagcgtgtctttggcatactgctcttcggcggcacgacgtgcgtcggcggcggactggcgggccaccgtcttgggatcggggcccagcatatccatcgcttcgtcgagcagcggaatatcggagcgggtcagcggggagcccttggggcgggcaagtgccgcgatgtcgttgtcggtcagccaaccagccagagacttcagacgttcgggatgggcgaacagctgatcgatgagccatggggcggtcatcggcagccagcacaggttcagggtcttgcgcacctgctcgttcatacgcagcaacgacatcgcgcggttcagctccgcctgatccggcgtgtaatcaagctgttcggcataacggttctgcatgctggtcagcatcgaacggataaaggtctcgcgggccttgttatgaggttgccgggtgcgcttcgcgtccgcctgcgcctgctcgatatcagtggccagcattggtacctgaatgccgctaatggttactgtcggcagaacagcgggaacacgcacgcgcgcggcgatggcattggccactacggaggtcatgcgtcgatcgcccttgagcttggctgcataaggggagtcgaccgccgtggcggtgatgccgggaatcagatcgctgatggtgcgtgagaccacgccggtctcgcccaaggagggcagcacctgatcgatgtagtgcaggaacgccgagctggggccaacaaccagcacgccggaacgttccagcgtgcgccggtgcgtgtacagcaggtaggcggcgcgatggagcgccacggccgtcttgccggtgccgggaccgccctgcaccaccacggcacgattcatgtcggagcggatgatgcggtcctgctcggcctgaatggtggccacgatatcggtcatcttgccggtgcggcgtgagctcagcgaagccagcagcgcaccctcgccggtcaacgtgccggcggaagacgcctggccgacttggtcggaatgcacgtcgagcacctcatcctcaacgcccacgacttcgcggaaactcaaggtgatatgcctgcgcatcacgatgtcgccgtgattggagggggtcgcctcatagaaaggacgtgcggcttcggcacgccagtcggtcagaatcggctcatggtccgggctcgacaggccgatgcggccgatgtaatgacggtcgccgttcttggcgtcgagacgaccaaacaccagccgatcctcaacgctgcgcaattgcgtgaggcggttttcgtacattgtggcaaaggagtctcgttcgctgcgttgcgtgggggatccgtgggagccggcggcgcgtacggtgtccaggcgttgccacatttcggctcgcagatcatccaatcgtccataggcgcgatcgacggcctgctgctcctcatgcagctgggaggcgtaactcgacatgctgttctcttcgttccatttccgtggggcagaaaaaacttaaggcattcaaatttaccgcacaccccctacgtcagtgatgcggacaacccggaataggtgaattcagcgtgaattcgccatgctgctcggtcggtggagtgcgcaacgtggattggatgtgcggagcgcccattcgtgcgacagtcgtggccgacacgcgcaatccatcggtaattgccctaaaagggtgagcaaatcgtgcatgagtggggagaaatggggaatcgtggggtagagtggtgaaccagttggccgaagtgtatcccacgtaacgatgaaggaggtggagccatggttgccgatcagacgattcgcgacgctgatgccaacgcacaaggctccaccactatggctgatctcatggctggtctgccgccgctgcttctcggcacatatacgccgaagatcgacgccaaaggccgtatggcgctcccggccaaattccgctcccagctggggcagggcctggtcatggcccgaggccaggaacggtgcgtgtacctgctgccgttcgatgaatttcgccgtatcgcctcgcagattcagcgtgtgtcggtgggaaacaaagccgcccgcgaatacctgcgtgtgttcctttccggtgccgtcgaccagcagccggacaagcagggccgcgtactggtgccgcagatgctgcgcgattacgccaatctgggttccgacgtcgtggtgatcggcgttggcacccgtgccgaactgtggaataaggacacgtgggagtcctacctcgccgagaaggaagagggatattccgacattgctgacgatgtgttgccggaggtggaattctgatggttgatgtggcgaatattcatctgccggtattgcttgacgattgcgtgaacctgatggcgcctgccctggaacatgagaacgccgtcgcagtggattgcactttgggccttgccggccattccatcgccttcctcaaaaccgcgcctcaggctcggctcatcggcattgaccgtgacagcgaagcgctggggctggccgccgaacgcatggaacgggaggggctcgccgatcgattcatcccagtgcatgccgccttcgatcagcttgatcaggtgttgacggaccgaggcatagaacgtgtggacgccgtattcatggatctgggattatccagcctgcagatcgacgaaaccgatcgtggcttctcctattcgcatgatgcgccgctggatatgcgcatggacgtcagccagccgttgacggccgaacggattcttgccacctatgatgcggcggaactggtccgcatattcaaggaatacggtgaagagcgtttctcgcgtcagatcgcccgcgccatcgtggcgcatcgagacaaggagccgtttaccaccaccgcacagctcaaccgtctggtcgatgaagtggtgccgcaagcccaccgcccggcgggcaatcccgccaaacgcgtcttccaggcgttgcgcattgaagtcaacggcgaattagacaagctcgcttccacattgccgcaagccgcgaaccgactgcatgtcgggggacgactggtggtggagtcctatcattcgctcgaagacaaaaccgtcaaatcgttcatggcacaagggctgcgagtggatgttccggctggcctgcctgtcataccgccggatgcccaaccgtttttcacggatctcacgcgaggtgccatcaaggccgacgaacatgaaatcgcagccaacccgagatcggcttcggtgcggttgcgggcggtggaagtcagccgcgatattccgtcacgatggaggaaacgctttacgcaaaccgcgcagggcctgaatgacgtcaagatacaaggctccgcgtctccgggcagagccaaaaacacagcacgaattcgtacaaggaggggataacggcatatggcaaccgcacgtaacattcgatcgaacgcggctccggcctcgaaccggccgcacaccaagcatcagtcctcctcccgacctgagctgcgggtggtctccaacccgcgtggaaacgagcagggcaatgtcgtcggacgggtcatcgaatggaccagaacaagaagcgcaccgctggtgcacgtggccatcgcagtgatcttcctcgtcggcaccttgttcggtgcgctgatgttgcgtacccagatggtgcagaactcgtttgaggcggcacagatcgaaaccaatatcaacagacttacccaagatatcgaagacgatcaggccaaactcgatcaattagtcgcgaacctgcccgacaaggccagcgacatgggcatggtcccgcaacagggatcagtgtccatcgacttaagcggataccagtccaacaaaggcggaacccagtgaacaccattcgtcgcatcgtagagttcgccaaggtcaagaccttcgcgttcaaatgcatcgccatcggcgccgcattggcgttggtggcgtcggcatgcgtgattcagctggcctccacccagctcatcggcggccgtcaaaccgcacaagcggccacggctaaccgcaccctgaccgtgacgttgagcgccaagcgtgggcgtatcctcgacgccaacggctccgtgctcgctcaaagcgtggagcgttatactatcgtcgccaatccggaggctgcacaggagttcgagccgattacttgcaatgacaacacccgtgattactgccacgaaattgacggcaaacccgtgggcgctaccggagcggcggccgtgggccgactgctggccaaagtcctggatatgaacgccatggaactgggcgctgatctgtccggtaccgggcagtatgtgattctgaagaaagatgtgactccgcaggtcaagcgcagcatcgaggcgttgcacctgggcggtattgtctggggtgagctgagcagtgaacgactgtatgcggatggcgatctcatgggcgcgctgcttggcggcgtgaacgacaacggcgatggcgtcgccggcatcgagcaggtcgagaacaagacgcttaccggaaccgatggccatgaaacctaccagcgtggtaatggcggcgaagagattcccggcaccatgaccgaatcggtggcggccaaaaatggcgacgatgtcaccctgaccattgaccgtgatgtgcaatggtatgtcaaaaaggtcttgaaggaggccgaatccaagtatggtgcagcgtgggcgatcgccgtggtgcaggatgtccagagcggggagattctcgcactggccgatagcgatgaagtacaggctggtaccgatgcggcgaagatgagcccgtctcgggccgtgtccgaaaccttcgagcctggttcggtgggcaaggttatctccatgtccggctatctgcagatgggactgcataagatgagcgatcaattgtcggtcccggaccacatcacacaggagggccagacctacaaggactcattcgaccatggcactgagcgctggacgctcgccggcattctgcagaactcatcgaacgtcggcatgattatggccggggagaactatccggatgagcaacgctacgagtacctgaccaaattcggcatcggacaaccgaccggactgaacctgcccggtgaatcgagcggtctgctcaccaacccttcggcgtgggatctgcgtacgcgcaacaccatcctgtttggtcagggctacgccgtcaacgccctgcagctcaacaacgtggtggccaccatcgcgaacaagggtgtcaagcagcagcagtcgatcatcaaatcaaccaccgatgccaatggcaagaccactgagaccaagaagggcgaagccacccgcgtggtggatgaaaaggtcgcatcggacatgatgaatgcgatggaatcagtggcggaaggctacaacaagttcgtcaaggtcgatggttaccgcatggccgccaagtccagtaccgcagaggtgcagggctcggatggtacgctctcgtccattatctccgattattccgtggtgattcccgcggacaacccgcgctatgcggtcaccgtggtgatgaaggatccgaatggtgtgttcggcggtctgacggccggccctgtttccgcacagatttgtgagttccttatgcagaaatacgaggtgcctgtctccagtccacgcaaaaatgctattccagtcacgtggtaaggatcaggggagaaaggcgatagcccatgagtgcagtgagcgaatccatcgcccagcgggtgaccctgggaatgctggtcgaacggtacggttttgaagtcgatccacccttcgccaccaatgtcaccattacctcactcagcgatgccgtggacaccgtgattcccggctcgctgttcatctgcacgcatgagcaggaacccgatgtactgcatgccgcacaggccggtgcctatgcggcgttgctgccacgcgcgtccaaagggcagatcgccaatgccgatataccgttgctctacggcgatttcgacgatcgcgtactcggcgatctggccagcggtctggccggcggaccgtccaatgccatggcggtgttcgcggtgaccggtgcggatgagcaggccgtcgacgcaggcgtgtcccagctctccgaattcctgcacatgctgggcaatccggtggcggtaatcaccgcatccgggtccacgtcgatgacacgtaccatgaacctgaactatcctctgggcatcctcgatatgcagcgcgcgctgtccgtgtgcgccgaagacggtgtggcggccgtgatcatcgccatggatgaccgcacgttggccgagcatgcgttggaatcggtgaacgtggatgtactgggcacggaggatgtcaacgcaagcgcaagcttgaacgaattgaagacacgctacgcattcgttgcggaacatgacatgtccatgacctcgtcgacacccgaatcggatgaaatggctgcggattcgccggccatgtacgaccgcgtccgactcgggcacatgtccttggccatcgccatggtgctggccgccggcgtgaggaaaaacaacatacgcagtgccctgcatgtggccaataatctcaattaagtccgtggatgcgggacgaagcgtaatcgtaaaggagtttgaaacaccatggttccgatgagtgtggaggagatcgccaaggccgtcgatggtcgattgatcggagacgccgattccgagtctcgagccaccaatacggtcagcgactcgcggcaggccggccccggatcggtgtttgtggccatccgaggcgagcgtgtcgatgggcatgactttgtggcgaaaaccgccgaacagggagccacggtggccatcgtcgaccatgaggtggagtccgatggcctgccgcagatcgtagtgaaagacacggtcgacgcccttggcgagctcgcccgacacaacatcgttcgccgccgcgagctggacggcgacttcgacatcatcggattgaccggttcggtgggcaagaccaccaccaaggatctgctctcctccctgcttgccaccgtaggtccgaccgtggctccggtgggatcgttcaacaatgagatcggcctgccgctcactgcgttacgggtcgatgagcacacccggttcttcgtggctgagatgggtgccagccatatcggcgaaatcgcgcgactgacccgtatcgcaccgccgaacacggcaatcgtattgaaggtcggcgtcgctcaccttggagaattcggctcccgcgaacgcatcgcacaggcgaaaagcgaaatcgtgcagggactgcttcccggaggcaccgcggtactgaacgccgatgacgaacacgtggttcccatggccggcctggccagcggcgatgtgctgtggttcggcttgggatcgtcgcaggagcccgaggtgcgggccattgatgtcactgccgaccggtccgatcatgctgaattcacgttggtcgatgcggacggcaaccatacgccggtgcatctgggcattcctggacgtcacaacgtgatgaacgcgttggccgccgcaaccgtggcgatgcgttacggtatggcacccgaaacggtggcgcggattctggcctcgcagcacaccatcagccctcatcgcatggcattgtccacggtgaatcgcgaggggacttccttcacactgatcgatgattccttcaatgccaatcccgactccatgaaagccggcctgaacgggttgaaggcttggaactcaaatgacggcaaggatccgttccgcgtggcgctgctgggtgccatgctggaactcggcgccgatgagacggcattgcacacctctatcggcacgtatgcggccgaattgggcatcgacgcgatcatcgcggtcggttccgcccaagaccaacatctcgatgcactggcacaggctctggcggacggtgcccgtcagagccaatccgcgtcggtggattgcgtacacgacatcgatgcggccgaacagctggtcatcgacttggcgcgcaaccattccgacgctgtggtactgctcaagggatcgcacgcgtcaggcctgagcgctttggctgaacgctgggcaaagaactgacccgataaccaccccaagaaaccgacaagaaagagaagctgcacgtgattgctctgatcattggaatgctggtgtcgctcatcgtcaccttagtcggcaccccgctgctgattcggctggtccacaagctgcactatggccagtacatccgccaggatgggccgcagtcgcatctggtcaagcgcggcacccccacgttgggcggcgtggtcatcaacttcgcgattctgctcggttgggcatcctccgcactgtaccgatacctgcgttcgggcgacgtgccctcctggtccgcggtgctcgtactgttcgccatgctgtcgatgggtctgctgggctttatcgacgacttcgccaaggtgcgtaagaagcagaacgaaggcctatcggtgggcggcaagttcatcggccagttcatcttcgccaccatctacgcggtacttgcgctgctgattcccaccaaatcgggattccccagtgcgcaggcgggcatcagcttcatcgaacagccgttcttcaacttcgacttcgccggccgtgccgtaaccatcatcctgttcgtcatctgggtgaacttcctgatgaccgcatggaccaacgcagtgaatctgacggatgggcttgacggtctggcggcaggttcgtcgatgatcgccttcaccggttttggcatcatcgcattctgggaaagctaccacatcaagggcggcagccatggcggctattcctatgccgtgtccgatcctctcgatctgaccgtcatcgccgtatgcgcggccgtcgcctgcttcggcttcctgtggtacaactcgaaccccgcatcgattttcatgggtgataccgggtccctggccttgggcggcctgttcgcagccctgtccatcgccacgcacaccgaattcctggcggtggttctgggtggactgtacgtcatggaagccatgagcgacgtcatccaggtcgggtacttcaagatgacccacaaacgtgtattcaagatggcaccgatccatcatcatttcgaactgaagggttggaccgaaaccaaggtggtggtgcggttctggatgatcgaactcatcttcgtgctgctcgccctgacgattttctacggcgactgggtcacccgctccggcctgctgttcagctagcggaaatctgggtgggattatgctcacccacggaattcctatatcaggaggaacaatgcaagtagcggataagacagtggtgatcgctggactgggtgtgtccggcacctcgttggcggaggtattgagggaatgcggcgcccacgtgattggcgtcgacgagaggaagcccgaggccggtctccgctcctttgatgacgtggactgggaccatgtggactacgtcatgtcgtccccggtgttcaacccccgcaccccgttcgtgctggaagcccaacgccgtggcatccccgtgatgagcgaggtggaattcgcatggcagctgcgtgtgaataacgagcgcaccggtactccggctccatggatcggcatcaccggcaccaacggcaaaacctccaccaccgagatgacctcggaaatgctcaccgcctgcggactcgacgcgccgaccgccggtaatatcgcctccggagacatgagcatgagcctgtctcgttgcgccaccaatcctcagcatgacgtactgtgcgtggaactgagctccttccaattgcacttcaccgattcgctggcacttgactgcgcggcgatcaccaatatcgccgacgatcacctcgactggcatggcgggcgcgagaattacgccgccgacaaatccaaggtgttccacaacgccaaacgcgccatcgtctacaatgcgcaggacgccaaagtcagcgaactggcggccgaggcccaaaccgccgaaggatgccgcaaggtgggattcacgctcgaggccccccaggccggtcagatcggcattgaagatggctggatcgtggacaggagcggcgtggccggcggcgcagtgggggagcaggtcagactggccgccatcaccgatttcacgcatctggcagagccggacggctcactgtacccgcatctggtggccgatgcattgacggcattggcgttggtgctgggacttggcgctgatcgagataccgcgttgaaggcgcttacctcgttcaagccgggcggccatcgcatcgaaaccgtggctgaggccgcagtcgagggcggctccgttcgtttcgtggacgattccaaagccaccaacggtcatgcggcacgcgcctcgctgtccagtttcccggccaagtctgtgatctggattgccggaggtctggccaagggcagtcgattcgaggacctggtcaaggaccaggcacataccatcaaagcggccgtcatcatcggcaaagaccagcagccgatggtcgaagcgtttgccagccaagctccggacatcccggtgaccatcatcgatcccgaagacaacgataccgtcatggatcgtgccgtcgaagcctgcggcacgtatgccgccgccggcgacatcgtgcttatggctccggcctgcgcctccatggaccagttcaagtcctatgcggatcgaggcaatcgattcgccgccgcagccaagacgtggagcgaggtgcatggcctccactgatacccataagcgtaaggcatacagagcccctgacaggcccgcactcgagatcaccgactacacgggttggcgaagcttgctcaacccgctatggtgctaccacggattccgcatggccgtggtggggctgacatgcttcggcctgatcatggtgttctccagctccacggtcaccatggccgcactgggcaagtcgccgttccttcagcttctgaaccagggcgcgttttgcctgatcggcttggtgctgggcttcgtggcattgacgatgccggtgacgttctggaaacggaccggcgtgttctttgtggtgggtgcctgcctgttgcaggcgctgacctttactccgctgggtatcgacgtctacggcaacaaaggttggctgaacctcggcttcaccactatccagccggccgaattcatgaagttcgcgatgtgcatatggctgccctcgtcgttgcatgcctgcagcaagatgtaccacaagaagggaatcaaagcatatgccgcgccgttggtgttgtatgcgataggcgtggcgctggtgatgggcggcaaggacctcggcacggccatgattctggtctccatcggaggcgtggccttcctgatcgtcggattccccggcaaatggatgggaatcggcgtattgggcgcggtggttatggtcggtgcattggcggtttccagcccgaaccgcatgcgtcgtattctggccacatatggtgattgctcggccgctgacgcgcagagcgtatgctaccagtccattcacgccaagtacgccatcgcctccggaggctttctgggattgggcatcggtaattcgcgtgagaaatggaattacctgccggccgcccataacgatttcattttcgcgatcatcggcgaggagaccggattcgtcggttgcgccatcgtattgctgttcttcgcgattctcgcctggtgcatgatcgtcatcgcattgcaggtcaccgatcgttatgttgccatggtgctgatgtgcgtcaccatttggatcgtgggccaggccatggtcaacatcggcgtggtcgtgggtgtgttcccggtattgggcgtgcctatgccgttcgtctccgcaggtggctcatcaatgatcatgtgtttgacggcggccggactggttgtgggacttatgcgttctcaaccgcagataaaacagtcgcgtcagagcgcgtaagtagactcggtaatcatgaatcaaggcacaccacatatcgttcttgctggcggcggtaccgccggacatgtcaatccgctgctcgcggtcgccggagcgattcgcgacatcgaacccacggcacaggtcaccgtcatcggcactgcggtgggtttggagaaggatttggtgcctgaggccggctacgagctcgacaccatcgaaaaagtgccgttcccgcgtcgccctgacctgtacatgcttcgcttcccggcaaaatggaagcgagaaaccgccaaggtgcgctccattcttgaaacgcggcatgcggatgtcgtggccggattcggcgggtatgcttccgcccccgtctacgccaccgcacacaagatgggcattccgattgccatccatgagcagaatgcgcgtgccggcatggccaataaactgggcgctcgttgggctgatttcatcggtaccgtgtacgagggcaccggtctcaaaccgcgtgccggagccgacgtcgagcgtgtcggtctgccgttgcgcccggccatcgcctccctgaccaaacgcatcggtgacgaccgtgccgccgtacgccgtgaatcggccgcgcagcttggcgtcgatccgaaccgtccgctggtgctggtcactggcggatcgctgggagcgcaaagcctgaaccgcgccatcgcctcctccgccgcagacctgttggcccacgcacaaatcatccacttgaccgggcgaggcaaaatcagcgaagtacgcgaactggtcacggcctcggccggcgcggacgtgcttaccggcatcggccccgaatcggccggacaaggtgactaccataccgccgaatatctggaacgaatcgatctggccttcgcctgtgccgacttggtgatttgccgcgccggagccggatcggtatccgagctggctgcactgggtctgccggccatttacgtgccgctgccaatcggcaacggcgagcagcgtttcaatgccgagccagtggtgaacgccggcggcggccttctggtcgcagacaaggacctgaccccgcagtgggtgcatgagcatgtgcccgatctgctcgccgatcacgaacgacttgccgaattcggccgcaaggcatgggaatacggcatcagaaacgctgccgaaatcatggcccggcacgttctgcaattagccggaccatccaaatagtattcagatatcatcccgtgcgcgatacagaccaatcccgtcccgcaacacgagatacggtcataatatagggtgctggaatccccaaaggagttttgaattgtctcaagatcagcccatcgtgcttgaccccacgtatgcctcgttcgatgctgcggcccgccccgcggatctcggcgccacacatttcatcggtatcggcggcgccggtatgagcgttctggccgaaatgctgcacgccgaaggagtcgcggtggacggctccgatcgcgcacacagcgccaaaaccgaccgacttgaaacgctgggcatcaccgttgaattcgggcagcgagccgaaaatgtcgcccaggccgagaccgtggtctactccagcgccatcaaaccggacaatccggaaatcgtcgcagcgcacgcggcaggcaagcgcattgtgcatcgcagtgacatcctcgctctgctcatgaacggcaaacgagccgtcaccgtggccggagcgcatggcaaaaccaccaccagctccatgctgtcccacattctggtgaacgccggtgctgatccaagctacgccatcggcggctttatccaaggcccggacggcaccacgctggacggtggacacgcgggcaaaggcgatattctggtggccgaagccgacgaatcggacggcagcttcgccaaataccatccgaccatcgccattatcaccaactgtgaagccgatcatctcgaccattacggcgacgaagcccactaccgtgccgcgttcgttgcccacgccggccgggccaccggtcacgtgatcatcagtatcgacgaccccgacggacttgccgtgctggaggccatgcccgccgacgtgaaatcccataccgttgcctacggcactaccgcgcgtgaatccctgcccgatttgggcggtgccgcgtatgtctggatcgcttcggaaagcgagaccgcaggcagcggcgtcgaacagctcaccctgcatctgccggccgcggtgacggcgggggagccggtgtctcagagcgttgccctgaaggttcctggcgtgcacaatgcgcgcaatgcggccgccgccatcagcgctgccgtgctgctgggcgtgagccccgcagacgcggccaaggcggccggcacattcctcggtgcggcacgccgtttccaggtgcgcggcacggtcaagcaggtcactgtagtggacgattacgcccaccatcccaccgaaatcgcggccctgctggatgcggcccgacgccggtaccccgattcgaccattcgtgtgatcttccagccacacctgttctcccgcaccaagttcttcgcgcaccagttcgccgaatccttggccaaagccgatgacgtcattatcaccggcatcttcccggcccgtgaaaagcagaccgatttcccggacatcagcccctccaccatcgtggacgcggctgagggactcaaggacgcttccgcaggcacgtggattcagccggtcgaggatatgtgcctggccgccaagatgatggccatgcgcgcccaccacggcgacgtgatcttcaccgtgggcgcgggcgacatcactgacatggatcaggtgctgctcaccgcacttgaggcccatcgggaaagctgcgagtgatgtccgggcgcacggtcagatccgggggcaatgacaacggctcacgtcgttcgtccggaagtccccgcaagccgcgcaccatcggttcacgcggaaacacgggtcactcgtcgaagtctcgcgctccccggtccgtgtcttccgggcatgagatcaacgagccggagatcatcgacgatgtgacggtagccaagggccaggccggtgccttcgtcgatgcacgacggctgcacagcgaggattacgttgccgaaacgctgcaccagaccaccggctccctaggagtcgtatcacgcccgaaagtggtgaatttcaccgaacgcgccaaagaacgcaagcgtgcgaacgtacgtgtcgttgcgttacgcgtgttgattgctgtcgtcagcgtggctgtagtgacggggctaacgtggctgctgctcttctcgtcggcgtttcgtctggaaaccagcgagatcggcgtatccggtgccaacgaatgggtgagcgcgcagaccatccatgccatcgccgataagcaggctggaaagtcgttgttcctggtctccacccatgaggtcacagagcaactcaagtccattcccggcgtcagcgaggccaaggtctccaaacagttccccaagtcgatgagcgtggaagtcaaggcgcaacggcctgcggccatgctgaaaagaggcgataccctgaccgcggtggattcccaggcgcgtgtgttgaactcggtgaagaacgccaacgtggatggcatcccggtgatcgaggtcaaggatatagacgccagtctcaagaaccgttcggtgaaggaggcgctgacgattctgggcgcattgccggaatcgatgcgtaagtccattaccaaggtcaccgctgagacgcaggattcggtgaccaccacgcttaacgacggtgaccgcgtaatcatttggggagactcctcgcaactgaagctgaagctggcggaagtcgaggaaatcgacaagaacatcaccgctggcacggctggctttgccggcaaacatcagattgatgtttccgcatcccagaagcccatcatcaagtgacggcgattccgttggcttcgttggttccggggcggcgttcgctgccggcgacttgcgcgcgtagcgccatagggtgtatactgaaaagtccggccgaaa

SEQ ID NO: 3215 - DNA, 14046 bp, Unknown
  R53_2m  MAG No. k141_4864
ccagccccgccccggatcaggtcggcgacgacccgcatgaaaccgtcatcgtaatgacgcctgcgatccctacacatgagaaaccgcacctccgatcatcgaatctgaattacttcagtccaacaatcggggtgcggttcatttgaaggggagcctgagtgttccatcaaaaccgaatgctcgcccggaactcgccttcggccggttggccgagttccagcctggctcccatcgcctcgcatgccgcactggcgatggacaggccgagccccacgccgggcacggcgctgatacgcgagttctcgccgcgatggaacggttgggtcagctcgttcagatcgtccggcagcatctcatccgtggtgttcgtgacggtcagacggggtccgcttccatcctcatccgatacgacggtcacgtcgatcgacccatcatccgtgttgtgcacgacggcattgcgcagcaggttgccgaccgccagttccagcaacgccgggtcggcggcgatgagaaacatgtccgcgtcgccgccggccttgttcacggttatggtgatgcgacgcttggtggcggcatcgtcgatatccgcaagggagttgccgacgcatccgtacaaatctgtggatgtgcgtgccgttgatgcgggactcatctgtgtcacatcgcccgcctgcttgccgccgatggtcccgctttggatacgggacaaggtcagcagcgcctgcaccagttgcgcgccgcgccgattggcatccagtgcgcgctgtaccgacggtcgcacatcctcggggaaccgcccctgggccaacggcgcgtccagattggtctccaccgcggcaatcggcgtgcgcagctcgtgcgaggcattggacacgaaccgccgctccgcttcggatgcggcctgaatccggtcgagcatgccgttgatggcgtcaccgagctgcgtgacttcggaggattggccggcagctcgaccgtccgtgcggctgtccgtgcggctgtccgtgctatgatcccaatcctcggtcccgcgtctgcccgcacgccggaactggggcctacggcgagatggcggcccattcacgtcgatgcgcgtatcaagtttggccgggtccaatgccgccgcctgcgcgctgatggaggtcagttgccgggacatgcgcgaggtgaccagccagatgatcagaatgctggtgatcccgaagaacacgaagatgatggccgcgctgatgcgcaatccggtggcgatgttgtcctggttccacacggagacgccatacggggtgttgatggtatacgatccgtccttgccccattccacctgatagtcaccgtcgcccatatcgccgccgacgctggatgttccagtgatatcgttcagacctgtgccgcttccccgggaaaacattcgcgggtcggaatccgggcgtttgccggtgccggaaccgctgtgctggctttcgacctgcatctcagggtttttggcggtgaccgtcgtggcgtacgtgaacatgctgttgaccacaatggtctgcacgagggtcgccgatcccatggcgatgaggaacacgagactgatggccaacgtcagtttggcgcggaatgatttgggccgcagtttgccggcaagcgcctgtatacgacctgatgctttcgccgtgttcgtcgccttcattgcagccggtatccttccccgcgtgtcgagacgatggcctcgcgatcggcgagtttgcgccgtagcgaatagatggtggttttgatcacgtcggtcgggtcggcggcggtcggctcatcccaaaccgcatcgtagagttcgtgcgcggtcacgtatccgccttccgcacgcatgagctccagcaatatgccgtactccttgggtgtgagtttgacgagcgtgcgcccgtggtcgcggaacacgagccggcgtgtggaatcgagggtgatgtcgccgcgcgtgagcacggctgcggtcgcgttgctggtcccgctgcgccgttgcagggcgcggatacgggccagcagttcgggataggcgaacggtttggtcaggtaatcgtcggcccctaggtccagcccgctcacgcggtcgctgacctcggcggcggccgtcagcatgattacggccacgggaatgcggttcgcggcgacggtggccatcaccgcgtcaccggacaataccggcagatcacggtcgagcagcatgatgtccacgttcgtgccggcaaggatcttcaacgcttcgacgccggtggttgccagactggtcgcgtacccctcgtagcgcagcgcgtcgtccaacgcggcggccagttcgcggtcgtcctcgacgatcagaatccgcatcatgtccccttccgagccttcccgaaccaatggcatcacccaacattttcccgattctacggtaaggcgaaagtaatccgtccgcttaccgacgctccacggtgagggcgattggatggaagtcgtcacaatcgactcacggaatggagacggtaatgtccactactcatacgcgcctggtacggcgaatcgcaatgcttacgtccgcactctcgctggcttcgatgctgggcgcctgctcgtcaccgctggcggcagtcggaacaggctcaggtgccgacgatcggtccgatgcgacgaccaccaccgacgccacggcgaagcgattcgccgcctgcctgaccggcaaaggattcgacgcgcgtacggctgctggcgtgtcgtccggctccggctcgggcaaacaagccccgaccaaaaacgcggtcgcactgcgcatgatcggcaccgacggcaagccggtcgcctcccaaggcaacagcctcagcgcatccgacgacggcccgcaactctacccgaacgctgcctacacgtcgatggaagacgacagcacctgggtggtgttcaaggacgccaaggcgctcgccggctcaccctacgaatccaaacagcgggaatacgccgactgcgaggccaagaaccccgacttcacccagcccattccggacatggggccgcaacaccagtattccggggaagacaagcaggcggcgctcgcctacgcccaggccgcgcgtaagaagggcttcgactgggtcaaggacccggacgccgatacgcccacctcaatcacgattcccggcaccgtaagcgaatccgaactgcgccgattcctcaaggaatgcccgaccgatggcgcgaacatctcctatgccttcgctggcaccaccgaggaattcggctatgactacaacaaagtcctctccgaattcacctccggcagcgcgtccaccgaagccgcgccccagcaatgagacggccatccgataacggacaaaggagcaatcatgacacggacagaagcgcgcagattcgggaaacaccgcagaatcgtgacgatgattatcgcggcgatcgccgtgatcggactggccgcggtgtgcgtggcggtgaggccgtggacgttggccgggcacgtcaccgcgaccgggcagactggccgatcgcagcaggtggatgtgtccacgctgcgcacgcaggaggtgaccaagggcgtactcaacgccgagacccggctcggcgcgagtctgcaatacgatgacgcctccgatttcgcggccgcttccggcacaatcacccaactgccggtggccggcaaacagatcaacaccggcgaacaggtgtacgagatggacggcgcgcccgtgccgctgttccatggcgaccgcccgttctggcggacgatcggcgatggcgtctccgacggcccggacgtcacgcaactggagcagaacctgcaggaactcggattctacggcggcgaggtcggaccgcatttcaactggctgacccgcgaggcgatccggcaatggcagcgctcgctcggcctgaccggcgacgcggtcaccggcacattcgacccgaatacggtggccctggccgcggccgcaccaatccgcatcacggcggtgaacgcgaaactcggccaatcacaggtcagcccggcaagctatacgggcgtcaccctgcatgcgcaggccacgttgaccgccacgcaggcggcgatgttcaaagccggagacaaggcgcaggtcgtgctgccggacaacaccaccgtcgaaacgacgctcgcctcggtcgatcagggcgggcagaagaccggcgacaacgggcaagccacacagccatcggcgcgcatcgacttcccggaccagtcgcaggtggcggctttcgggccgacggccgtgcaagtcatcatcccgaacgccgatgcctcgaccggggaggcgctgatcgtgccggtgaccgcactgatcgccagcgccggcagcgcgtatgcggtcgaagcggtacgcggcggcaagttggtgcgtgtgccggtgtcaatcgggctggtgtccgacgcgcaagtgcaaatcaccaagtccgacggcctcaaggcgggagacaaggtggtggtctcatgaacgacatcgagtttgcccccgctggcccagagcatggggcattgctgacgttggagcatgtgacgaaggcgtttccaggcaaggacgggagcgtgctggagatattgcatgatacgtcactggccatcgatcgcagcgagctcgtggccatcgtcgggccgtccggctcgggcaaaagcacgctgctgtcgttactgggcacgctggacatgccgacctcgggaatattgcgatacgacggcggggatgtgaatgcgatgggtgagcggcagcgcagcgtcctgcgggccgcgcgcatcggcttcgtgttccagcagttccatctgatcgccaccgtatccgccttggagaacgtgatgacaggcctgcaatacacaaccctgccgcgcggcgaacgtcggcaacgggccgccgaggcgttggaacaggtcggattggggaaccgcctgcatcaccggccggcccagttgtcgggcggcgaacagcagcgtgtggccatcgcccgcgccctggccaaacggccggacatcatcttcgccgacgagccgaccggcgcgctggactgcgaaaccggccacaccatcgtcgacctgctgctcacggcggccgattccggcgcaagcctggtcatggtcacccacgaccagaccatcgccgcacgtttccccaggcgtctgcacatccaagacggcctagtcaccgaactcgacaagccgaatcaagccccctctgacgaggggctgtcagccaaaggctgactgggggagagatatgagtgaacgtactcctatgagtaaaccaatacgcacgcgaattgcggatttgatgcatgcggcttgggttggggccgccgggcgggcgtcccgcacggtgctggcatcgctgggcatcgcgcttggcgtggccgcatatgtggcgttgtccggcatcgccgcatcgaaccaggcagcgctcctcgcccaactcgacgcgcttggcgcgaatctgtcggtggtcgcccccggcgtggacgccgcccagcagaaggttccgctgccggattacgcgcccacaaccatcgcccgtcagccgcaggtcgaacgggtcggtgtcttcgacaccgcgccagagaaggtgcagatcttcaagaacgggctgtgccccaaaaccaacggcaacgcgctggccctcgccatcatgcggcccggcgcactcgacgccgtcggagcaagcctcgcccaaggtcatggcatcgacacgaacaacgagcacctgcccgtcgccgtgctcggctcggacgccgcctaccggctcggcgtcaacgagcccggcgaccgcatcctcatcgacaacgcatggtacggcgtcatcggcatcctgaaccccacgccgcaggctgaaaacctgaacgccgccgtcatcatcggcgagcaatgggcgctcggccggtaccccgaccaggccgacaccatcggacggatcagcgccatctacgtgcgcaccacgcccggcgacgccgaaggcacccgccgcacgctcgcccacgccgccaacccggccggcggcaacgtgtccgtcaccgcgtccgccgacctatccaaagcgcgcaacaccaccaacgattcactgaccacgctcggcctgatgatcggcgtgatcgcgctggccgtgggcggcatgagcatcgccaacatgatgattgtcaccgtgatggaacgtcgcggcgaaatcggcctgagacgcgcgctcggcgccacgcccggcaacatccgcatgcaattcgtcaccgaagcggccctcctgtccacactcggcggattcgccggcatcgcgctcggcgccggcgctgccatcggcgtcgccgccagtgccggccagccgatcgccctcgactggacctccctgccgctcgcctgggccgccgccatcctggtcggcatcctcgccggcctctacccggcctcccgcgccgcccgtctcaccccgaccgaggccctgcgcggcgaataggggcgacggctggagtgaacgatcaccatgagtgcgcagcctcaatgtcacttttactgcacatgatgacatgtgcagtaaaagtgacatattggtgctgggcgggagagagcacgcgtggcgcgggcggggtgtggttcgcggctatcggctagtatggtgcggtcacgacagagggaggcatgctgtggccgatgtgatgcgggagctggaacggctgcgaccggtgtatgagacgggcgtcctgcggttgctgttgcgccagaacgcgatgctgtacgtgtcgctgctgcgttccacgttcgacccgctcaccggcgagctgccgcgcgagaccgtggaggagcggttcgcgcaaagtctgaacgctctggccgacgccggcgaatatgcgccgcgcgaggaccagaccttcgccgaggccgcccatcagatcctcgccgacctgacccgtgaaggcgaaggcgactacgcctggctcgccaactcgcatgatgcggccacacaccgattcctctaccgtttgacggcccgcgcccaccgcgccatcgaggcgctgagcaggctcgaagacgaatcacgcgccctgtccggcgcgcaggccaacagcatcatcatggaaatcgaacacgcgcgcatgcagctgaccgccgaccccggcgagcgcatcaaactcctcaaccgtgaaatcaaggaacgcaagcacgagatcaaacgcatccaacagggcaagcagcacgccacgctgagcgaagcccaggtggaggacgtgatcgccgtgatccacaacacgctgcgcggcgtacccatcgacctgcgcgaactcgtgctcgacgagcgggacaacggcgacgccttgcgccggcgcatgcagaccggcgacatcagcgtggacgagaacctgacccgctaccacgacgaataccgccgctcgttcagcgaatcggacagcggccgccgcttcgaggacgccttccaggtgatcatcaccgacgagggccgccagcaaatcgacgaagccctgcgcgccatcgccaaaaccccgtatctggccggcgaatccggcgtgctgctcggccagatccgcgacgaactggcccgcatctacgacggcatcgaagccgtgcgccgccagatgcgcgtctccgacgaggcgatcagccggctcgtgcgccagcaaaccgacactcgctaccgtacgatgctcacccgcttgaaccgactgtacgcgcgcctcaacgcggatgcgaaaacccatatgggagacgcctcgcgcccgtacgacacggccaccgcggacgcgctgttcgcgccattgccgatgcgcccggccaaatccatgacccgcgccaccgcacccggcctgagcgacctcgccgccgaagccccgcaggcgactccggtggccgatctgcgggatatggtcaacagcggcggcccccgactcctgcgcatggtcagcctcatccggcgcaacccggtgaccgttgacaggtccgatgacaggtccaacgtaaccctcgtggacatcgccgccagcttcaaccggctgcccgaaagcgaacgccgcgaaagcgagatcgtcggcttcctgggcgggctgggagccgcaagcggcagcgccatcgccgacgagccgtccactgacggcgtcggcatcgacagcgacatcgccaccgagccggccccggcgcagcgcggcgataccgcgatctggcattgcgtatcgatcgacggcgcgccccggaactggatcactagaccggtgctggccgacatggacgagctgaacatcattgtggaggaaggatgaccgtggccgaggaacacgaggaacatatggacaacgccaacccgtacgccctgttcgaaggcgacaccggcgacatgccggccgaggcacgcatggccgccatcgccctcaaacgcgaccgctatatcagcgggcccacctacgacaccgtgctcgacaaccgcgacgccgtcgtacgctccctgaacaacgacctgctcgacttggtgatcaacgaacgctaccgcatcatgtacgccacgcccgtggccggcgacgacgtgaccctgcgctcgctcaaaacccgcgtcagcctcaaacgcgaggaggccgcgctgctcgccttcctgcgcatccgcgtcctcgaatacgagaacgtgcacgccgaccccgccgactggctcgtcagctttgaggagatccgcgccgcgctcgccaccggcgccggttacctggcagcccgcaatgacgaggaaggcgtggcaaagcagatcggcgccatcgtctccgcgatgatcacctacgggtatttggcgcgcctggacgacgaagccatgtaccagatcacgccgctcgtgcccgtggtgctcgaccgcgaactggccgacacttggctcgacgtcgtggaacacggcgacggcgacacggaagatgacgatgacgagaaggaagccgaatgatgcaggcgacagacgtgcagatgatcgcggaccggtggatgctggaatcccgccgactcatcaactggggctcctatgagggctaccacgaattccgcccctccacggaccacaagctgccggtgaccctgctcgccggcgccagcgaatccggcaaatccacgctggtcgacgcgcagatctccctgctgtacccgaccggcacgccgttcaacaaggcctcgaactccggccgctccgaacgcagcgactacacctacctgcgcggcatggtcggcgtgggcagcaccgaaaccggcgacgagccgctctacctgcgcggtcgcgacgagaacggcgcgccgcaacccgtgtggggcgccatcgtggacacctatcgcaaccagaccaccggccaggtgctttcctgcgccaaattcctctacctgatgcccggcgacggccgcggcgacgtgcgccgccagtacgtggtctggggcaagcccgtggaccccaggcgcatggaccaataccgtgacgccccgttcacaccagcccagctcaaagccacctaccccgactgcctcacattccccagcgccgaagcgttccacacacacatctggagcgcaatgggcctgagcgaggccgcctgccgactgctgcacaagatccagtccgccgacgcgccctcccggctcgacgacatcttcaaacaaggcgtgctcggcgtgcccgaagccctggacctggcccgcaccacggtcgaggactacgaacgttacgacgggaacttccacgccatggacgagaaaacccgccgcatggacacgctgcgcggcatccaacaggcctacggcgaatacgccgccgcacgcggcaaggcccgcgccttcgaaccggtcaagccggccgtcgacggaacggtgccggccgtgctgcgcgactgggcattggcccgcatgcgcggcgaagtcgccgtccaactgcccgccgaccgcgccgaacaacagaacagcgaggcggaagccaagctgctgcgccgccgaaccgaagacctgcgcacccgcctcgacatgatccgaggccagatgcagggtctggacggcggcaacctgacccgactcgaactcgaactcgaccaggcccgccgcaccctcgaagacatgcaagccaaccgaacacgaatcgaacaaacgttcgcatccatcggcgagacgctgcccggcaacgaacagtcctggaacgaacgccgcatcaacgccgtgaacttcaaacgcgaatacaacaaacgagacggcgaatgcgaggaagccctcaccgccgccatcaacgcgcgggccggcgcacgcggcgacctcgaacgactgcaacgcgacttcgaccggcaacgctcccagcgcacccgcatctcccagcagatggacgaaacccgcgccatgctctgccgcgccaccggactcacccccgccgaactgccgtacgtggccgaacttatggacgtgaacgaacacgaggaagactggcgtctcgccatgaacgtcgcctacgcgcccatcgcccagaccatcctcgtcgacaagcgccacgaacagggcttcgccgccaaagtcagcaccatcgacccgcgcaccatgccccgacgcacctggcagttcgtggacaccgcacgccactacgacgacaccggcgcgcacgcgaacatactcaccggagaacaggacggcgactggctgtccggcaaactgcgctaccgcgacgactcgcccttcgccgactggctgcgctcgcagacccaggacgaacgattcgacgccctatgcgtcaccgccatcgacgacaccgaccgcaccaaccgtcaggtgcaggccgacggtcagatcaaatccggcgcacgcggccagcacggcaccaaagaccgcgcccaggtcatcggattcgtcaacgaaacctacctcaacgcgctcgcagcgcaggtcgacgccgcccgcaacgcgctcagccaagccgacaccgactacacggccgccaaaacacagtccgataacctccaccgcgaactcgaactggccaaccagctcgcctacacgtcctgggaacgcatcgacatcgccggcgcgcaacggaccatcacggacacgcaggacgccatcgcatccatcaaaaacgatcccaaactcgccgaactcgccaaacagcgcgacgaactgaacgccgaactcgaccgtgtggaacgccagcgcatcgaatccgaccaggccgcggcccgcgccggcagcgccgtcgaagcggcgctcatctggctgcgcgaccatgccgacaccggcacgacggacgccgccggtgccaccgccgacaatgacgatgacgccaccgccggcccactgccggacgaagtcacggcggcgctcgccgaatcctacgacaaccgattcgccggattggcggacgcggccatgcgcgcgcacatgatcatcggcgcgggcgtggcaggaacgcgggcgccgggggagagtttccccgaacgcaccatcgccggcatcggcaaggacatgacctcccgcatcaacctgctgaacggccaggccgacgccgcacgcaccggcgtcgaatcgaaaatgagcacctacatcgcgctctacgcggccgacgatgattcgctgaccgccagcgtggaggactaccggtactatctcgacgaactcgccagcctcacccagctggccgcggttgccgccaccgacgccgaataccggcgctgcctcgaacagctgctcaggagcttcctgaccatcaaacgcgccatcgacacggatgccagcgacatccacgaccagcttgaccgcatcaacgccatgctcaagggccaacagttcggccccaagcacggcagcctgtccctgcacgcggacgtgcgccgtcccgagcgcaccttctgggcgcagctcatccgcgtcatcggcaccctgaacgattggaaatccgccgacgtcaacgattccgacgcctcgcgcaaggctttcgcggcctgcgcgccgatggtcgggctgctgcgcgccgaactcgcacaggtcaaggacacgaacggcgtgaaaagctacggcgcccgcaacctcgacccgcgctgccgctcgtccttctacgccatcgtgcatcatgccgacggtccggacgaacgcatcacctccaccggcggccgttcgggcggcgccttgcaggagctcacctcgttcgtatacggcgcggcgctcatctacctgcttggcggcggcctgaccagcgagccctcgtacaccacgctgttcctcgacgaggcgctcatcaaggccgacggccgttacacgcagcgcgccctcacggtgctgccgcgcctcggattccaggtcatcgtctccgccccggaaagcaagaccggtgaaatcctcgaggtctccaccaaggcctacgtgacctacaaggaccccgacaccggcctcacctccctgtgcgaggccgtgctgcatcagaatgacatggacgatgaatcatcgtcggatatattgaaggatgacggggttgccgaatgagcagtcccggcgtcgccggtattaagacgattcggttcgactcgacgatgttcgaaagcaggtgatgggaactatggccggcatgaaagacatcgctgcgatcaccacatgcgtgaagaaacatatgcgttcacatatgtacgacatcgaaccggcatggccatttcccgtgccggtgggattgccggaccaagcatttttggaaaccaatgcgattgcagtgcatgacaacaacaatgagatacggcaatgggcaagcaagaatggttgcgaaatcataaccaagcatcgcaccataggcacctctgtcgagttgatctccaaagtcgtcgttcctgacgaatcaatagccatgcgtgtggttggtcgtacgctggcggcggaatatcgcgaagcgcaccgtcgcacagattccactgacaggattcagcggcaaatggctgaatgagtcaaaaaccaatcgtcgtaaggccatttgccgactgctcggtgtcgaaacgttgggtctgtcaaaacggccgaccgaactgcggttccgttatctcgatccgggccacgacgattttggtaccgatcgtactgaacgcagcgcgaagattgctatgcgggagcctaagccgacgcccggccttcaatcggcggagcgacgtctttatgaacgactgtgtgctgacaaaaccatcgcttatcggcgtatcgaacaggaacgcattcccatgcgtgatgcagttgacgaattacgcaagcttggcatccccgtggagtccattgaagattttgtcccggttcgaacatcaatcgtttgacggacgtaccggggcagaatccgttgtcccggtttgtgatttcgggtgtttttcgcgaaccgggacatgttgtgttgccccggtatgggcgtcaatcgtttgatgcgagaatcgggacaacatggcgattctgagattggctttattccgccgtttccgttcgcgttttatgtggttcgtggaaactggaatgtcctggttctcgaaaacaggccaaaatcacgaaccgggacagcgggttttgccccgatgcggatgtcaaacgattgacatgtgaaccggggcaaatcagaggaggagaggtcttcgggatagagcttgactggggctgggcgcacggttgatgtcgcgtgggccggctcttgcgtttcggtccactgatggtccggaattttgcatactatggttcggttttccggcctgacacgccatcgaacaagcgttcgaatttggtcgtgtgttcgggtatccttgggacagatttggcgcgcgcataaccgtgcgcgcgggaacggtgagatggaaggtggggtgtggctgtggcggcaacgcggactggcgcaaggcgcgcaacaaacgcaaagggcgcgaaaaccagcaagggcaagaacggtgaggtcatcgtcgaaaaggtgatgaccagcgactccttcctgagccgggaaatcaaaaaggcgccgctgatcgaacacgatggttcgctggtagctgatatctcgcacatcccgaacgatctcaagatcacgattcagggtgcgcgcgaac

SEQ ID NO: 3216 - DNA, 28018 bp, Unknown
  R53_2m  MAG No. k141_4880
atttcacgcgggccgggtacggcgacgccctggcccgtctcgtcgatcatctgcgcgccggcgacgcctacgtcgtcaacatggcgcagcgcctgcgcctggagacgtccgagagcccctatgccatctaccgttatctgcgcacccacaacccggccccgttttccgcctatctgcgcgcaccgggtctcgacgtgtgctgttcgagcatggaacggttcatggagattcgctcgagacatgtggtgacgcggcccatcaagggaacccggccacgcggcggcacgccggacgaggatcgggcgaaccgcgaggaactcgcccgcagcgagaaggaccacagcgaactgctgatggtcgtggacctcgaacgcaacgacctgtcgatcgtctgcgaaccgggttccgtcggcacggaccccgactttgccatcgagacgtatccttccgtattccatctcgtcgcgaccgtcgaggggacgctgcgcaaggatcgctgcgccgtggacgcggttcgcgccgcgttccccaccggttcgatcaccggcgccccgaaggttcgcgccatgcagatcatcgacgggctcgaacgcgcgccccggggattgtacacgggcagcatcgggtatttctccgatacgggcgattgcgacttcaacgtcgtgatccgcaccatcgtgcgggagggaggcgggacgtcgctcggcgtgggcggaggcatcaccgtggaatccgatttcgacttcgagtacgacgagacgatgcagaaggcccgggcgctgcgggaggccgcttccgttgacagggggagcgtcggcgagtacaatcgcggacaaaacgaataactatcttcagggcagggtgcgattccctaccggtggtacagcccacgagccgcaaggcatgatttggtgagattccaaagccgacagtacagtctggatgaaagaagatgaaagtacgttcatgctttgtcgtacgccctgaaatgatgccatatcatttcagggcgttttcgtgttcgcatgaaccttcttttgtatgccttggatagcgtatgggcgcaacatgcttggaggcgtacatggacgatgcgcagtacatgggactcgcgatcgagctggcgaagcgaggggccggatacgtgaaccccaatcccatggtcggcgcggtgatcgtcaaggacgatcggatcatcgggcaggggtatcacgagatgttcggcggattgcacgccgagaggaacgcgttgcggcattgcacgcagtcgcccgccggggcgacgttgtacgtcacgcttgagccgtgctgccattacggcaaaacgccgccatgcacggaggcgatcgtggaaagcggcatcgcaagggtcgtcgtcggaaccttggactgcaatcccgtggtgtccggcaagggcgtgcgcatgctcgaggaccacggcatacgggtcgatgtgggggtgctggccgacgagtgccggcatctgatacgggtgttcagcaaatacatcaccacgcatacgccgtatgtcatcatgaaatacgccatgacgatggacgggaagatagcgacccataccaatcaatcacggtggatcagcggcgaggagtcgaggcgtcgggtccatcagctccgtcgatccgtcgcggcggtcatggtgggggtgaacacggtgatcgaggacgacccgttgctgacatgccgcatggcacacggaaggaacccggttcgcgtcgtctgcgatacgcgattgaggacgcccctcacctcgcggatcgtgcagacggcgaatgacgtcaggacctatatcgccaccgcctgcgatgacgaacgcaaggcggaggactaccggcggcacggctgcgaaatactcgccgtcggaaggaagggcgaccacgtcgatctgacggacgtggtgcggcgcctgggggatatgcggatggacagcgtgctgctggaaggcgggagcgcgatgaattggagcgccctcgaacagcggatcgtcgatgagacgcacgtgtacatcgcgccgaagatattcggcggcaccgcgaaaagcccggtgagcggccaaggagtcgccctgccttccgacgccgtcatgctccggccccgcgcctgctcccgagtgggagaggattatctggtggaaagcgaggtggtgtattcatgttcacgggaatagtggaggaagtcggaacggtggcggacatacggaggagcgccgccaactgcacgctgtcggtcgatgccacgaacgtgatggaggacctccatatcggcgacagcatggcggtgaacggcatctgtctgacggtcgtcgatttcgaccggcgacgcttcaccgtcgacgtgatgaatgagacgtggcgcagaacctcgcttggcgtattgcgccacgggagcggcgtcaacctggaacgggccctgccggtgaacggaaggttcggtggccatatcgtcaccgggcacatcgacggcacgggcagcatatcctccgtgcggcgcgaaggcaatgccgtgtggtaccggatcgcggcgcggaacgagatactcgaaggcatcgtcgagaaaggctcaatcgccgtcgacggcatcagcctgacggtcgcggaggtcacgggaagggacttctcggtatcgatcatcccgcacaccttggcgcagacggtgctgggcgagaaacgggtcggcggcgtggtcaatctcgaaaacgacgtattgggaaaatacgtgcggaacatgatgacgacccggacgggactgacgcaggatctgctgtcccggtgcgggttctgagaaaggatgcatgaatcatgaaccatcagtcggtgcaagcggcgttgcaggcgctgcgggaagggaagctcgttctggtcatcgatgacgaggaccgggagaacgagggggatctcatctgtgccgcgcagtcggccaccacatggaacgtcaatttcatggcaacccacgccaagggattgatctgcatgcccatgagcgagcaactggcccacaagctgatgcttccgcccatggtcgagcacaacaccgataaccatgaaaccgcttttacggtgtccatcgattaccgtggcaccacgaccggcatctccgccgaagaacggggattgacggctcgcatgtgcgtctccgatgacgtggaacccctcgatttccgcagaccggggcatatgttccccctggtggcgaagaagggcggcgttctggaacggaacgggcacacggaggcgaccgtcgacctcatgcggttggcgggattgcgcgaatgcggcctgtgctgcgagatcatggacgacgacggccggatgatgaggacccccgacctgacccggttcgcccagaagcatcagatcccgctcctgaccatcaaggaactgcaggaatacaggaaagcgcacgatacgctcgtcgaatgcgtctcgaccgtggcgatgcccacgcgatacggggaattcacggcgcactgctatgtgaacaggttgaacggcgagcatcatgtcgcgctggtcatggggaatctgggcgatgggaccgatgtgttgtgccgggtgcattcggaatgtctgaccggtgacgtcttcggctcgttgcgttgcgattgcggtcagcagttggacgcggcgatgcggacgatcgcggagcatggctcgggcgtgctgctgtacatgcgtcaggaagggcggggcatcggtctggtcaacaagctgaaggcctaccgtctgcaggacgagggcatggacacgctcgacgccaatctcgcgttgggattccccggtgacgcgagggagtactacatcggagcgcagattctcagggatctggggatacggtccatgctcctgctgaccaacaatcccgacaaagtgtatcaattggaagactatggaatggagatccgcgacagaataccaatcgaaatcgaagccaatgcttacgacagtttctatctcaaaaccaagaaaaaccgcatgggacatatcctgaacatggaggaggaataaatgcacacgttcgaaggcgatctggtagccgaaaacatcacgataggcatcgttgtggcgaggttcaacgagttcatcacctcaaaactgctggcaggggcgctggacaccctgaaaagggagaatgtccgcgaacaggacatagcggtggcctgggtgccgggcgcctttgagatacccctgatcgcgtcgaagatggccaagagcaagcgctacgatgcgatcatctgcctgggcgcggtcattcggggcagcaccagccactacgattacgtgtgcaacgaggtctcgaagggaatcgcgcagaccagcctcgacaccggtgtgccggtgctgttcggcgtgctgacgacggattccatcgaacaggcgatcgaacgggccggcaccaaagcggggaacaagggttccgagtgcgcgcagggcgcgatcgaaatggtgaatctgatccgctccatggacctctgacggcgaaccacccggctgcgggcgggggtcttccagacgttcccgcccgcttcgcgccacacggccaagggccgatcgatcgccgcgcccgctaccgcagggtgagcgttgcggccaaagccagatggtcggtgtccggcacttcgaaggacgtcacgccggacggtctgagcccttgggtgaacagaatatggtccagttcgatgcgcggccacttgagccagcgcgggaaggtgagattcgggccggcggcttgaatcagacttgcgtccttgaatccggacttgagcaacgcgcggaagctcgggtggtcggtgctcgagttgagatcgcccataacgacgacgatattgcgattgctgacggattttgcacgggcgagttctcgcagacccagaatgccggccgaccaatccgcgcagccgcgcatcggcgatttcgggtgagccgaacaaagcgtcaccgtgcgattaccggaggttttgagggtgatggcgggaacgtcggcggcagggatggagaccacgttgggcaccgctgcgctcggctcgtagcgggaatagatcacgttgaatccgccgttatcggtctctttggcgtctccgaactgatggtaggagaggagttcgttgatgtcggcttcggtaagacgtgtgatgaggtcgtcggtgacttcctgcaaggccaatacgctgatattgcgttcgcgaatattgcgaatgatttcagcggcgtcggcgcgtccgtatcgacaattcatcgtcataaccgagaactggggcgagagtgtttcacgcgttgtttcacggtgcccatcggagattgtttcgggtccttccttcggagtgtttgaggtacccgatgtattgttgttatggctttttgacagcgtcggcgaagttgtttcacgggctgtttcacggtgggattctctgcgtttgccggctgggtcgattgacgtaccccagtagctgatgcgctgtgagctggcaatcagcgcgaccataataagcaacgacatcgcagtccattcatgttgccatgcggcgaccgcggccagaatcatcaaaggaacccacaacagcggagtcagggcaatcatgtacggaagcggcatgcgggcctcgagaccggcgggcagcgcgcttaaggccgtccataacagtgcgatgattgccaccgcgccgaggattgtcgtcatggaagttcctttcgaaatacaaattgaaccgagatataacttggctcccctctgcgaggggagccaagttgtgagatcagcggccgaacagtccgccaaggcctccgccgaggttcggcggcagttcagtgccaccgtcgacgttgcccatcatctgctcaaggccggcgggcagggccgggttctgtggcttcttggcgaaggcggaaccgccggtcgaaccggaggacttgccggccagcttgtcgcgcaatgccttttcctcggcctcgcgcttcatcggattgccggatttgccgcctttcttcttgttcttgcccttcttcttgccgccgcccatagccgggccgccgaagccgggaatgccgccgcccatgccgccacggttggtcatgcgacgcatcatctttgcggcctgctcgaaacgctgcagcaaagcgttcacctgagaaaccgtcacgccggaaccataggcgatacgggcgcggcgggaaccattgatgatcgacggatcgcggcgctcggccggggtcatcgagcgaatgatcgcctcggtgcggtcgatttccttctcatcgaactgctcgagttccttgcggtgctgggccatgcccggaatcatgccgagcagcgacttcatcgagcccagcttgcgcacctgctgcagctgatctaggaagtcgtccaggccgaaggaaccttcggagattttctcggcggccttgcgggcctcctcctcgtcgaactgcttctgcgcctgctcgatgagcgtcatgatgtcgcccatgtcgaggatgcgcgaggccatgcggtccgggtggaagacctcgaagtccttcaacccctcgccgttggatgcgaacaggatcggcttgccggtcacggacgccacggacaacgcggcaccaccgcgggcgtcgccatcgagcttggagagcaccacgccggtgaagtccacgccctcgtcaaaggccttggcggtcttgacggcgtcctggccgatcatcgcgtcgatgacgaacaggatctcattcggctgcacggcatcgcggatgtcgcgagcctgcttcatcagctcctcgtccacgcccagacgaccggcggtatcgatgatcaccgtgtcgtagagcttctgtctggcgagttcgatggaatcgcgggccaccttcaccgggtcgccggaggtctggcccggagctgcgacggcctcgccgccatcggattggacgcccttttcgggagcatagacgggcacgccggcgcgttcgccgaccacctgcagctgcgtcaccgcgttcggacgctgcaaatcggccgccaccagcagcggcgtgtggccggaatccttgagccagtagccgagcttgccggccagcgtggtcttaccggcaccctgaaggccggcgagcatgatgatcgtcggcgggttctttgcgaagttcagcggacgatcgaccccttggccgagcacgtcggtgagctcctcgttgacgatcttcaccacctgctgggcggggttgagcgcgtcggacacctcggtgcccagtgcacgctcacgcaccttgccggtgaaggaacgcaccacgtcgagcgccacgtcggcgtcgagcagcgcgcggcggatttcacggatcgtaccgtcgatatccgcctcggaaagcttgcccttgctcttgagatgcttgaacgcattcgagagtctgtctgtcaaagatgaaaaagctgccataatgggcaacagtctagccgccacgcgggaaattgcggtgttggggacgacgctttccggggaatgtgtcgcgtagtagtcagggatgttgggcattcagacggcaaatgccgtgccgtccgctcgtggcgaagccaatcgagtgcttccgataccatggaaaccgtaaagaatcctgtgttttttggaatgcttacgctgttttgaaaatcgctggacaccgcttatacgcagactgccgtgcgctccgaaccatgacgttcgggccaacgcagacatgccgtgcaataaggaaggcccactgatgcccactcaaaaactactcgaacgcaaagccctgatcgttggcatcgtcatcaacgtgctgcaggtcttagccggcgtggccgtgttcttcatgaccggcctcaaggccatgttccttgacttctccttcaccgcgatttccgtcctgtccggaatggtggcggtgtatctctcgtcgcgcacggtgcgaaccaccgagcgcttccccaatggcatgttcgcgctggaacccatctacgcgatctgcaaggccattttcaccatgtcgttgttggtgtattcgctgattgacgtgtgccgagtagcgtacgactacttcgtgttcgggtccggcgaacgcattgaaaccggcccggtggtcatctacgagatcctgaccgtaatcgtgtgcttcagcctatacacgtattaccggcgttccaaccgctccatcggcgattccagcaccatgctcaccgccgagtgcaagagcacgttggtcgacggatcgatgtcgttcggcatcggcgtggttgccatcttcctgatgctgctaccggccggcggcccgcttgacttcctgcactacaccggcgatttcttcatcaccgtggctttggtggcattgaccatcaaggaaccgttcagcgtgctcaaagaggcgttcgtggaattggtcggcggcgtgcatgatgacgatgagaccaacgcctacgtggaggccgaggcacagcgccatctgcctgccaacaccgactacgagcagacgctgatcttcaagaccggtatgaactacaccgttgacgtgtatctgagcggcatcggcgaaaccattgatgtagccgacctcatcgagtgcaagcgctcgctggagaaggagctcgccaagcgcctgcacatcgtggacgtggacttcgtgtttgactgattgatgggtttgaagcggctacttcaggctccaagtggaaccctgcgggccgtcttctatggcgatgccggcctcggtcagggcgtcgcgaatctggtcggccttggcgaagtccttggccttgcgggcctcggcgcgggcattgagctgctcggcgatcagtgcctccagcgccgcatgttcgggcgactcggccgtgccatcagcggcaccgccggcaacgccggcggacacccacggttcggccagcgggtcgagacccaaggtgtcgagcatggcacgcacggcgagcagcgcctcacgcacctcggccttggcggtttcggaatcggcgcggtcagccagctgtgaaagcaacgtgttgccggaacggatggcagtgaagattgcggcggtggctccggacacgttgacatcgtcattcatggcagccacgaaatcagcgggcaggtcgtcggcgggcactgcggtgatttcatcgcggttcggcttgagatcgcccaacgcaacgccggctcgttcgatgaagttcgagacgcggtcgtatgcggcctgcgcctcgaccagcgcctgatcggaccattcgagcatcgaccggtactgcacggagcccaaagcgtaacgcaccacccaagcggaatgctcggccagcacgctcggcacggacaggccggtgcccagcgacttcgacatcttctcgcccttggcggtcacccacgccgaatgcatccaacgcgccgcggaggggaagccggccgcacgggtctgcgccatctcattctcatggtgggggaaacgcaggtccagaccgccgccatggatgtcgaacccgtctgccagataccggtgggacatggcggagcactcgatatgccagccgggacggcccacgccgaacggcgtcgcccagcgggcgtcctcggggtcggtgtccttgggggccttccacagggcgaaatcacgcgggtcgtgcttgtcgggggagacatcggccgggtcgaccggattgtacttgtcggcaccggtggcgtccacggacgggcccatgcggtcggccacggcggcggcctcatcgacttcggaggtctgcttctggtgggtgagttcgccgtaatgcggccaggatgccacatcgaagtacacgttgccggtgggcttgccgtccgcatccgtgaccacatagccgtggccgttgtcgagaatgcgctgaatcaggtcgatcatgtccgacatgtggccggtggcgtgaggttccacggtgggcggcagtacgccgagcgtgttgtacgcctcggtgaattcgcgctcgtaataataggcgcgggcccaccaacgctggccggcggccgcggccttatcgaggatcttgtcgtcgatatcggtcacattacgcacaaaagtgactttgtagccgagcttcaaaaaccagcggcgcacgatgtcgaacgccacggcggcacggatatggccgatatgcggtgacgactgcacagtcgcgccacacacataaatgccgacttcgcccggcttgagcggcacgaaatggctgacctggtgcgaggcggtgtcatacagattcaggccttctgcggccttggcaacatgcaccggcgtcaggcttgaaggcatgacggaaatgttgaaatcctgcggttcttggctgtttcccataacgctcaagcgtagggtccgaaccagacatgccgctcctgatcgcgcaaacggggaacgctcgtgccacaatagaagtcatggccacaccacaagtgctcattttgcaacatgtcccatgggaacgtccgggacgcatattgtcgaacctcgaagacatcggtcttgagacggtgacgatgaatatcgtcgacaaaaagaaaccggacttgcctgatttcggcgaactggctggcgtggtaatcatgggtggacctatgggagcgcttgattacgacaagtatccggggctgaaggcggaagccaagttggcacgtgccgccgtggcttcaggcaagccgattctcggtgtatgcctggggcatcagattatcgccactgcgcttggtgcgcagctgcgcaagggcgatgcgccggagattgggttcgcgccgatcaagcgtgtggacaagcatgacttcttctccatgtgggataagcagctgacggtgctgcactggcataacgacgtggtgggtttgcccgagggaggccagctgctggcgcgttcgtcttccaccaaggtgcaggcattccgactgggatccgcgctgggcatgcagttccatcttgaggtgtgcggctcgctgctggacgaatggctggatgagccgagcatggtcaaggatctcaaggccgcgggtgggtccaagtcccaattgcgcgagcagttcgcccaatacgatcagctactgcatccgctcgccgagcaagtgttctccggttttgcggcccgctgcaactcctacgctcagacgctgaacaaataacgtttgtgggccgccgctgggcaagcgtggcgctacattggtgagtcatgccgacttatgacattggactggaacacgtttcgctcgctttcgccaccaaaaccatcttcactgatgtgacgcagggtgttttcgagggcgaccgcatcggcatcgtcggcaagaacggcgacggcaaatccacgttgctgcacctgttccgcggcacccaggagccggattccggccgcgtgacgaagcgcggcggactcacgttcggcatgcttgaccagcgcgatccgctcgacgacaacgccaccatccgcgaagccgcgctcgaaggccgcgccgactacgaatgggcgtccgataacacttcccgtgaaatcgtcgaggcattgctcggcggcatgagtctggatgccaaggtcggctccttgtccggcggccagcgtcgccgcgccgatttggcccgacttctgctcaaggattgggatattctcgcgcttgacgagcccactaaccaccttgatgtggtcaccatccactggctcgccgaacatctgaagaaccgctggtccaaaggccagggcgctctgttgctcgtgacccacgatcgctggttcttggacgaggtctgcgaatcgatgtgggaagtccacgatggcgtgatcgagccgttcgagggcggctattccgcatatatgctgcagcgcgtcgaacgcgaccgccaggctgatgtgcgtgaaacgaagcgccgcaatctggcccgcaaggagctcgcatggctttcccgcggtgcccgtgcccgttccaccaagcagaagttccacgtcaaggccgcacgcgaattgattgccgatgtgccgccgatgcgtaacacacttgaactgaagcaaatggccacctcacgcctcggcaaacaggtggtcgatttggtcgacgtgacgcagattttcgaaaaaccgcagggcatggccgatatcgacccggatgtggcggcgctctccgcgtccgcttcccgcgtggatgtggtcaacgccatgtacgccgagccgcagctgcacggttccgttgaggtggcggtcaccgacatgactgacctgcgcctggtggacgccggcgtgccggaagccgtcgaggccgctgaggaagcgcgtaagaaggccgaggctgagagcggcaatccgcagcttgctgacgatcgcgaggttcgtcgcatgaacacgggtggtgaaaccatcggcggtgacactgctgcaacgaattcggatgatggcactgctgcagccggtgtcacctcggctgcacgcaaggtgacggtttccggccgcgagattcttgacgatgtgacttggctgattggccccggcgatcgtttcggcatcgtcggtgcgaacggtgccggcaagtccacattgctgaagttgattgacggttcgattactccgaccgtgggccatgtgaacatcggcaaaaccgtgaagttcgccgtactctcgcagcgcctcgatgagctggagaaactgggccagtacaagatcaaggaagtgctttcccgctataagccgagctacattgtggatggcaaggaagtaacgccgggacagttgatggagcgtctcggctttgaatccgcccagttgatgacgccgattcgcgacctctccggcggacagaagcgccgcatgcagttgctgctcatcctgctcgacgagccgaacgtgctcatcatggacgagcccggcaacgatctggacactgatatgctcgccgtcatggaggatttgctcgatacttggccgggtacgttgatcgtcgtatcccacgaccggtacctgctggagcgcgtcaccgatcagcagttcgcgctgattggcggcaaggtacgccatctgcccggtggtgtgcaggattacctcgatatggttgaggctattaagaacggcaagggattgccggctgacacgcctggcttcgcgggcaccggtagcagctcggcgaagtctggtaggggtaaggcggccgccgtcaatgttgctgcatctctccctcagtccgcttcgcggacagctccctcgtcagagggagccaataacggtgaggactccacctcgaagctcaccggcaaggccttccacgaggcatccaagcgcgtgaatgccatcgagcgcaagcttgccaaactggaagagcggaagaccgaacttgaggcacagatggccgcccatgacccgagcgactacgagggtctcaacaagctcaatgaacaactcaccgccgtcaatactgaaagcgataatctcgaagccgaatggctcgaactctccgaacaattggagtagcgggagaaaccgtaacgttcacaaggcctcggtagtttgccggggcctaccgctatgcaaactcccacggattaatcaattccacgtcggtaccttcgaagtccttgatattgcgcgtggctatggccgcatcccaggaacaggcaattgccgcaatcatggcgtcttgaatactggtaggtgtgcccctgcgttcgcgttcgacaaggatatgggcataatccgcagctgcctgggtgtcaaatgcgaacgtcctgtcctctaatgtcataagcgccagcttgacggtcgtatctgtgtactttcgtcgtttgccttcaggcatgcgacatattccgaccaacaactcggcgacggtgatggcggtggttgccagattgcttgtatcttggttcctcagccaattggcaacgtgttcgtctggctgtttcttgatgatttcgctgatgacgttggtgtccagaataatcatggccgattcctattcaaaagatactggcggtcgggaatcggcggaatttcgctcggatagtgggagttcccccttgtcgagtccctcaaaatccatgttcttcatgaattcgcggatctcgtcgtagaaattggtctttcgtgtgatttcatgcgccaccgtgccggccagccattcttcaagaatggatcgcacctgagattccatggagcggttgtttttctcagccacttctttgagctgttgaatctgctcatcgggtatttttcggatggtcaatgttgccatgatgcacctccttgttgctgtcataatgctagcataaggtgctgtcattttgcttgcagcacgggtgatgaggtatgcacgcatgaaaaaggcggatatgcatcatgcacatccgccctttgagcttggactgggtctccccgcagtcgccgaatcagcgcccggtaacctcggaaccgacgaccttttcgctcagggcgcgcgggccgcgggtcacggctacggcaccggagcgcaccagctcaatcacaccgtaatgctccaaaagccccagcagcgcatcgatcttaccttcggcaccggtggcctcaatggtcagcgattccggattcacgtccaccacacgcacgcggaagaggcgcacgatctccagcacgtcggaacggttggattcgtcggcggccaccttgatgagcaccagttcgcgttccacggtggagttcgggtcgagctccacgattttcagcacgtgcagcagcttgttgagctgcttgatgatctgctccagtggcacggcctccacgtcggcggtcaccgtgacgcgtgagatgtccggacgctcggtgggggagacggacagtgagttgatgttgaacgcacgacgggcgaacaggccggcgatacgcgccagcacgcctgggcggttctccaccagcacggacagcgtatgacgctgggaaccaggctgggatgcaggatagttagccatgagtgttctcctctcctcagtgctcgctcgcagcggcagcggcggtctcgtgctcgaacacgccggtcgcatgctcgtccggaccggttcccggagccggggtgccgccggtcagcggcttgatgccgggcttgtacgtcacctcgtcgttggaagcgccggcggctaccatcggccacaccatcgcatccttccacacgcggaaatcaatcagtaccgggcggtcgttgatctggttcgccttttcgatggcggcaatcgcctcttcctcggtgaacgcgcggatacccacgcagccgtatgcctcggccaacttgatgaaatcaggcacttcgagcggcgcatcgccgtcgaccagtgccgccgcaccatcggcaccgtgcgcctcgccatcgagcaggttggtctgcgagtagtggtgctcgtagaacagcgtctgccactgacggaccatgccgtacacggagttgttcagaatcgcgatcttcaccggagcgtggtccaggaacgcggcggccagctcctcagaggtcatctggaaggaaccgtcaccatcgatcagccacaccggcttcttgccctcgaactcgcgggccgagcccacggatgcgccgatggcggctggcagaccgtagcccatcgtgccgaggcctccggaggagatccaagcgtgctggttctcgaaatcgatgaactgcgaagcccacatctggtgctgtcccacaccggtcacccagatggtggacggatcggccatctcagagagctttttgatgacccactgcggggccattgatccgtcggtcggctcatcccacgtcatcgggtattcctcgcgccagccgtcgatcgccttccaccagggggccagattcggcttgccctgaatggcctgcgtgtgctgaatctcgggaatcaagtcgtcgagcacggtagccacatcgcccacgatcggcacgtcgggctgacggttcttgccgatttcagccgggtcgatgtcaatatgaatcacgcgggcggtcggtgcgaaggcgtcgagcttgccggtcacgcggtcgtcgaaacgtgcaccgatggccacaagcaggtcagcgcgctgcacggcaccggttgcggcaatcgtaccgtgcatgcccagcatgccgaggttcttcgggtcggagtcgggaatgatgccgcgtgcgggcagggtcgtgaccacgggggcgccggtcaggtcggccagagccttgacctgtgcgccggcgttggagcgggcggcgccgccacccacatacagcaccgggcggtacgactgagagaacagcttcgccgcgtcggacagcacacggccgtgcgccttggtggtggggttgtagccgggcagaatcatgcgctgcggccatgagtagtacatgtcgccggtctgtgcggtcttggtcagatccacgaccaccgggccggggcggccggtgttggcgatgtagtacgcctcggaaagcacgcgaggaatgtcctgcgcgcgggtcacgaggaaggagtgcttggacaccgggtaggtgatgcccacgatatccgcctcctggaaggcgtcagtgccgatggcctgcacgcccacctgaccggtaatcacgaccatgggcacggagtccatattcgcgtccgcaatggccgtgaccacgttcgtggcacctgggccggaagtcacgatgcacacgcccaccttgccagtggccagtgcgtagccttcggcggcgtggccggcggcctgctcgtggcgcataagcacgaagcggaacttcgtgttgtctttgatctcgtggtagacgggcagaatcgcgccgccaggaatgccgaagacgtcctcgacgccgagatcctccagcgaacgcaccagcgcttgggcgccagtcatcttctcgccatcgacgatggtctgcttatcgggggccgcgttgattttcggcacgccgctgaatgcctgcaaaggcgtgggtaaagccatgattcctctcacctcatagattttgccgcgaacctgcccgaccttgggatggggccgggtgcccgcgtgtctgattccagtcgcttctccgagacttgtggccccggcacgactcgtcgctcatgttggtatcagtctattcgcaaatctgacagcgggcttacttagtccgcgtcttgagcgagtccagtgacttccagcccgcttcggcggccgccagctgcgccttacgcttgctggagcccttaccgatgccgatgatgtcgccgttctcgcccaatgagacgcgcgcggtgaagatctgcgcgtactccgggccggagacctccatatggtagaccggctcatccttgccgaggccgtgcgccttgacggtcagcgaggtcttccagtcaagtgccgggccctcggtggccacttcggcgagcgtgtcgtcaataagccggtgaatcaccttgcgtgcctcgtcgatgccgtgttccaggaaggtcgcgccgatgagcgattccacgatgtcgcacagaatggagttcttctccgcgccgccctgctcggtttccccgtgacccagcagaatgtaggggcccaccttgagcttggttttggcgatggcgctcagcgcgtcttcggagacggccttggcgcgcatcttggccagttgcccctcggtcatatccgggtgaatggtgaacagcgtttcagtggagaccagttcgagcaccgcgtctcccaggaattcgaggcgttcgtaattggccacgccggggtgctcatgcgagaaggagcggtgggtgagtgcctgcacgagcagatccgggctgagagtggtgcccaacgcttcaagaagctcgttggccggcgtcggctgctgtggggtttcattgctcatgattgttgtatggtccttcacgcgatggtgatgtgttgtgtgttgtgttgtgttgtttgcgatgcgatggtgtacgtaatggtgcacttatgcgaagaccccgccacccgtcgatggcagggccttcattcaagccgttatcgcaggactcacttggtgtgagccggctggatggcggagcggtaggtgcggccgcggtagttaccgcagctcgggcaagccatgtgcggcagggccggagcgccacagttcgggcagttcacggtcgcagcagcggtggccttccagttcgcgcgacgcgagtgcgtgttggcgcgcgaggtcttgtacttaggcagtgccatttgagtatcctctatttcgttcgaacaattgagcttaagcgtccgttatcttaacgcacggctcgtacaaactccgttcaggcgcgcgtcactcggcctgctcgccgttctgctcggcctcgagctgggctttgagccccgccaatccggcaaaacggatatccgtcacatcgtgatgatggtcgggatcctcgttcagatcggcaccgcactgcgagcacaggcccttgcaatccggtcggcacagtggctgcaacggcagcgattcgaccagcgtgtcgcggatcatcgcctcgatgtccgcgaatgcgccgttctccagcagcggatacgtgtcttccgactcgtcctcgccggcgatgatgtcgatctcgtcgtccttcttgttcttgccgcccttgccgttggccttgtcctgacccgactcatacgggaagaacaccgtcacatcaaccggccagtcctcgtcaatcggcttcaggcagcgcgtgcactcgctgacgaatggcgcgaccaggcggccggtgaagatcaggccgtccacaatcgaatcgaactgcccgctcacatgtacgggctcaccatccttgatgccgacgatgctgtcgccaatgccggaaggggccgggaaatcggcgtcaatcggcttggattgaccggcgcgcgaagcaatctgcgctaccggaatggcccacggggaatcttcaactcgtgccatggtatgttcttggtgcctttcgtatgttggctggagttattcgttactggcgttattcgcgttactgatgttgctggtgctgctggcgttactgggcttcgggatagtcgttcagcgtcaggtgcggcatctgttcgccggccgcacgctggcgctcttccagcacgttaagaccggcctgcacatcccgactgagtttgccgagctgctgggacagccctttcatcaccgtagtgcagtactggtccgcgccttgggtcagatggtcggctctggtctgtgcctggtcaagaatcgcgcgcgctttctgccgtgcaagctcggtgacgttctcttggccggccaggaactgtgcctgttcgttggcgtccttgatcatgtcggctgcgcggctttgtgcggaggcgacgatggcgttagactgggtctgtgccgattccagatggcgctcggcctcgcgcatgagggcggaggcgcgctccaactgcaccggcagcattttcttcaactcggaaagctggtcggtgaattcgtcgcggtcaaccttcaccatgccgggggcgaatatgctggacttcgcttcgcccagtgccgcctcgagctggtcgatgatgtcatacaccgtggtgaattcctcgcggctcttgaccgtggccgggtcgtcgtccgtggtttctcgcaggtcgggcatttcgttcatgaacgaggggcgagtgccggcggcctgagcggtctgagcttgtgcccgggtctgctgagctgcttgggcctgcgctttggcctgcatctgtgccggagtaggggtaggcgcggcgggcggcgatccggcgagaacatcggcctcttcggtgggtgccggcgcggcttgcgtagacgcgggcggttccggggcggacggctccggagtggacgatgcggcgtccgcattcggtttggtcagatcgacgtatccagtggggtggtcatcgctcatagtcattagtgcatcagtccttccgctgacgttcctcggccagggcatcggccagcatcggcacgacacaatcgggcaccatgccggtcacgtcgcctccatggcgggccacgtccttgacgatggaactggagatgtgttcaagaatcggatcggccggcaaaaacagggtttcgatgccggcgagcttgcgattgaccagcgccatgccgagctcggcttcatagtcgccgttctggcgcagacccttgacgataacggtggcgccgaccttcttgcagtagtcggtgatcaggccgtcggtggaagaaacagtgacgttcttgcaaccggctttgtcaagggcacggcggatcacgtcgactctggtggcttcggaaaacatcggtgttttcgcggcgttgacggccaccaccacatgcacctcgtcgaaaaaccgcgccgagcgctcgattacatccaagtgtccggcggtaacggggtcatacgagccggggcatactgcgatagtcatgccttatagcctaccgctagtggtgtgcttcgtgctgccgagcgtgcattgttgtcgcgtcggcgtatgaggcagtgtgtgcggtgccgtatgtggcgtcgtgtgcggcattgtatgtggcggggtggcgtgatgagcgacatgggtgtgtggaggtgtgcggattacgcgccaatgggtttcgcgggtaacgacgggaatctatgatggagtgcagtcgaatcgttgaatacgaggaaagaagtgcaccatgacttttgccgagatgttcgttgatgatgccgaaccgctgcgcaacccggaccaaggtgccggcacgtcggtgctggaacgcccggaaaccaaggagtctccggttcgtgacgatggcggcgacgcggatcgattcgcacattatgtttctaaggaccgtatcgccgaatcacgcgcgaccggtcgtccggtggtcgccctgtgcggcaaggtctgggtgcccaagcacgatccgtccaagtacccggtttgccccgattgcaagcgcatctacgaagaaatgacgcgctaaaggtggtacttggctcccctcagcgagggaagccaaaatggtcaccgagccgaaatctcgtcgatcagcttgagctcctcgtcgctgaagtgggtgttcttcagcgcgccgatgttgtcgagaatctgctgaggcttggaggctccggtcagcacggaggtcaccttaccatcgtgcagcagccatgccaggctcatctcggccagcgtctggccgcgttcggcggccagattgttcaggtccacgacctgcttgtgcagtttctcggtcagggcggaatcgttgaggaatcgcggatcgtgagccatgcggctgtcggccggaatgccgttgagatagcggttggtcagcaggccctgtgccagcgggcagaaggtgatgaggcccttgcccagcttgaaggcggtctccttcagaccgttctcctcgacggtgcggtcgaggatgttgtatttgttctggttgatgatgaacggcacgtgcaggtcggcgagaatcgcggcggccttctccatcgtcggaccatcgtagttggacagacccacgtacagggccttgccggagttcacggcctgagccagcgcgcccatcgtctcctcaagcggggtttccgggtccgggtggtgatggtagaagatgtccacataatccaggcccaggcgttcgagcgactggtcgaggctggcgagcaggtacttgcggctgccgaggtcgccataggggccggcccacatttcgtagccggccttggtggagatgacgagttcgtcgcggtggtgcctgaagtacttggcgagcagcaggccgcagttcttctcggcctggccgggttcggggccatagttgttggccagatcgaagtgggtgatgccgttgtcgaaggcggtgaagaccagggacttcatctggtcgaatggcgtgatgtcgccgaagttgtgccagaagccgagtgagacggccggcagcttgaggccggaggtgccggcgtggttgtaggtcatcgtgtcgtaacggtgcgggttgggagcgtaggtggtggttggctcgaacattgagtctccttacaatgtcatttttgttcttacgaatgctggtctgcgatgggcaaaccgacgccgatcgagtggtattcgtaagtgttcttggatactaaggttccagttcaagtgaacttgaatgcaaacggctgcgacgcttcggcgtgtcgccgcagtaaggagtcatgatgtcctacaccattcgtcaggtggccacgcagttccatatgcagccctctacgccggtgaagactggccggattggcgcgagtacaaaaaccgcgcctattccattgaatgctgaagccatcgagtgctgagctggatgccggctgggcactaagaccgatgtgcgtcgatcgtgggcgcgtctatccgagtaaggccttgctcggcagtgcgcggtcgagcagccagacaacgagcgatatcacgaagaacgctatggccagcttgccgcagctaatgccgaacccttgccagccgagtgcgtcgaggttgatgaagtcgtacggatacggactgccgccggccgccggtccggaccccggccaaatcgtcgcacgggccagcacgaagaccaagtatgcagggaagtacgccagccacgagaacatgtaatgccagcggaaacgccggtgcgggtcgaatagcacgaaatcgataaccgccataatcggggcgattttgtgcagcatcgtattggtcatgatgccaataacctgtggcacgtatgccgggtcgtccggaggcatcaggaagaacgccaccagtgcggtgactatggcgtacacagtcaggcatcccttaggccatgcaggcggctgaatacctttgagcagtgtggccgcgccggcccacagcatcacgatgcccagcacgaaaccggtctggaacgtgaaatacacccagaactgcggtttggaccatgcctcatatgtgcccacgaagcagaaaccggcgatcgcaaagcgccacaacgccacgatgaatctcatgcatcgagtctaccgcttcgccagtgggctgtatggctttgcccggactacacttaggtgcaacttcaccacttatgtaggaaaggccttgcaatggtcgattattcgccggctctgatgaccgacatgtatgaatacacgatgctcgacgccgctctgaaagacggtaccgccgaccgcaaatgcgtgttcgaggtgttcacgcgtcgcctgcccgaaggccgtcgctatggcgtggtggccggcaccggccgcattctggatgcgctggaacatttccacttggacgaagcggacctgaagttcctggccgaccgtcacgtggtaagccccgagaccatcaagtggctggagaacttccacttctccggtacgattcgcggttaccgcgaaggtgagatgttcttcccgaactccccgattttgcaggtcgaaggcacgttcggcgaatgcacgctactggagacgttgattctatccgtgctgaactacgattccgcagtggcctccgccgcctcacgtatggcgtcggcagccaaggatcgtccttgcatggatatgggcggacgccgcactaacgagtgggccgccgtggccgccgctcgagccgccgtagtgggcggattcaagggtaccgccaatctgctggccgcccagctgtatggtctgaaggccattggcaccgccgcgcattgcttcacgttggtgcatgattccgagcgtgacgccttcgaatcgcagatcgaggcattgggcaagaacaccacgctgctggtggacacctacaacatcgaggaagccgtgaaaaccgccgtcgaggtggccggtcccgaactgggtggcgtgcgcatcgactccggcgacctagccgccatggcccagcgtgtgcgcaaccagctggacgccctgggcgccacgaacaccaccattaccgtgaccaacgatttggatgagtacgcgctcgccgcattgcagaccgcgccggtcgactcctatggtgtgggcaccatgctggtcaccggctccggcgctcccacttgtgcgatggtgtacaagctcaccgaacgtgaaggcgctgacggcacgatggttccggtcatgaagaaatccaaggacaaggccacagtgcccggtcgcaaactggcattccgctcctacgaatacgcgttagccgaagccgaacacgtgatttccggctcggaggagaagctggccggtttcacgcctgaaccgacgtggaagaacctgctggtcgactttgtggatcatgggcagatcgacgctcagtggcagggccatgacgccatcatggccgctcacgactaccacgccaaggcgttgtccgaactgcccatcaccgcgcagagcctcatgaagggcgagccagtgattcctacggagactcaggttctctgaccgtatctcactggccgcatccctttggttacattggctactcttccctctgtctgtgcccctctgtctgtgttggccgcactcctgtgatcgccgccgaggcggggagatccaaccccggtcgcacccccgtgtttgcaccccctgtggctgtgtcccggggctgtattggccgcgtcccctcgggctgaactgcgtcccggttcgccggacgtggttccagctgagggtggccccccttgttttttttttgggggggggtactgttcaccggggaaatatgtatatgtgcatgctgttgcaatgtacattttgttgtcaggtgacaacgtcttgattcagatgaattggcgggaaatggccatttgtcttatccaattgatttgaagaacgttgtcagttgacaacgttttgtacatggtgcggaacgacacatattcctatcctggtcaggatgccgacgaggtggagtgaaaaaaccaaaccatttcagaggatattgcaccgagacgttgtgggattgccgtgttgtcggtgatgttacagagatggcgcagtgttgcgtgaggggtgttgcgtgaggggtgttgcgtgtgatgttgcgttgggctgattgggaggaatagtgtgccgatagaatgccgtgatgcgtgcagagcaatcgtttgcggagcaatcgttgaagaatcgtgtgaactgatgcgatacgaatcataccgtctctgaattgtgggatatgacgaatcgtatcgtcatgggattgtgggatatgatgattgcggtttgatgaaatgaccgggaaatcggccgaggcaaggtgacttcgatgagtgaaactctcaatgatgagaacgcggcgggcaacgatgacgtatcagagcggcgcgctgtagagcatcgagcgttagaacagtgcgatgtcgtgcatcacggtgtggtatctggttgccctgttaattcgtgtgcggctgtgctgaatgaagtgatgtcgcagactggttggaatgcctatgagcttgcacagcgtactggtttggatcggtctgcaattggtcgcgtattgcgtgggcaaagaggtatgttgtttgatgttttggccgaggggcttgagcgggctggttttggtcttcacctagaagccgtggccccctcgcaaacgattccggaagacgaattgcacatgttgttggcgcaactgcgtaggcctcctgatttcgatgcaatagaaagcggagcgacctggtctacgttgaagatgctctgcgtcaatctgattcatgctcggaatgttcaacatcaacgtatatcgttcgtccgagcggttgcacgggtgaacgatgcgtgctggattgcgtttctcgctggtttataccgttttctgcgttgggatatcaacccaaggaacagacgcttgacattggttcctccgtaccggtatggcttggatggatggtggtccccactgccgagcgcggcaattatgcacgtgcttcatcgatatgaagagccgttgcatgacatggactatacatatttgccgttaatcgattacgaactcaacgctatgcagcgcaagcaattcaaccaagatttcatggaatatggcattcttattccagcggacgatctttcccaatcctcatcaggtacgcaggcattgactctgtaagcgagtggtgcataagaaaatagtggcgtgcagccaagtgtcatggaatggatatgtaagcagggaatgacattgcgctggggtttgatgatggttgacgagttgctatccaggcatagagcggatggcgtatgctggggcgcatggttgaaatcaaagacatgcttggcaatcaccaaataattcgtgccgacggccgcaaggtcgacgagctgcgccccgtgcgcatcacccgccacttcaccgacgcccccgaaggctccgtgctcatcgaatgcggtaacacgcgcgtgatgtgcaccgccacttttacccccggtgtgccgcgttggcgcaaggactccggcctcggctgggtcaccgccgaatactcgatgctgccgcgtgccaccgccgaacgcaccgaccgtgaatccgtacgtggcaaaatcggtggccgtacccacgaaatcagccgactgattggccgctgcctgcgtggcgtcatcgatatgaaggcgctcggcgaaaatcagattcagcttgactgcgatgtgcttcaggccgatggcggcactcgcacggcttccgtaaccggtgcgtacgtggctttggtcgacgcagtcaattgggcggagaagcaccgccatatcaagtccgccagccgcgtgcttaaggactatgtgtccgccgtatcggtgggcgtgatcaacggcactccgatgcttgacctgccatacattgaagacagtcaggccatgaccgacatgaacgtggccatgaccggttccggcaccttcatcgagattcagggcaccgcagaacaccgtccgttcaaccgtgccgaactcggcaccctgcttgacttggccgaaaagggcaacaaggaactgcaagccgcccagcgtgccgctttgtccctagactaagccagctccccttcctttaggggaggttgtcggctggaagccgtacggtctgcaatgtccagctcccctgacaaggggagccttcttaaaggagaacccatgcaaatcgtcgtcgcaacccataacgaaggcaagcttgtggaaatccgccgcattctcgaagaggatcttggcgcggatgccgaaaacatcggactggtgtccgctggcagccttcacctgccggacccggtggaaaccggcgtcaccttccaggagaacgcgctgctcaaggcccgcgccgtggccatccgtaccggtctgcccgctgtagcggatgattcaggtctcatcgtcgatgtgatgggtaacgctccgggcattctgtctgctcgctgggcgggtgctcacggccacgacaaggccaataatgcgctgctgctcgcccaaatcgaagatattccggatggcaagcgtaccgcgcgcttccgctgcgccgccgcgctggtggtcccggacaccgaggccagtgccgacgtgaccggtggagtggctgccgacggcatcaccgttcacaccacggctgccgatgggagccctgccccggtgcatgcccggtatgccatcaagtcggagacagtggaactcggcgacatgccaggtcgtatcatccgcgaggctcgtggtgaacacggtttcggttacgatccgctgttcgtcccggacgaccagcctgccggtcgcgtcagcactgagcctgaccatgaaggcgagccgctgaccagcgccgaaatgactccggccgagaagaatgcgatttcccaccgaggcaaggcgctgaaagccttggtccccgctatcgaggcgctgctgcactaagtcgtctaggctgtctaactgcactgagccgcgactaagccacagttgagtcgcggctcagcaactcagcccctcccgaatcgggcaagtgtctagcaagcgcctatgacctagcaagggcgatacgaaagaaggccggcgcttagtgcgtcggccttcttgatgaacaagagccacccgatagaatcgaactaccgaccttcccacgaacgagggggatgctctaccactgagctaaggtggcgtggctccaagagcca

SEQ ID NO: 3217 - DNA, 53054 bp, Unknown
  R53_2m  MAG No. k141_4889
aagtaacccgcacagtggaatcatgaacgctttaccacctacccagccgacgacgaagtccggcatcgacgccggtcttgcctttcaccagcccatgctggcttcacctgatccgcaggcaacgctgccttcggaacggattgcggccacgatgggcgaccgcaatctgacgcccaaacagttcggtgcgctcggcgagcagtatgccgccgtgtggctggaggaacacggttggacgaccttgagccgcaattggcatacccgttacggcgaattggacatcgtgatgctcaatcccgagtacacggtggtgttcgtcgaagtgaaatcacgccggtccatgcattacggatatccgcaagaggccatcacgccggcgaaacagcacaatctcaggaaagccgcctgcgattggctgcttgaccggcgtaatcgtgtgccgcatacggcagtccgtttcgatgtcgtcaccatcgtgcttcgggtgggcagaccgctcgtgcatcacatcgaaaacgccttctgaattcgtcccccaaaaacagccacgttgcgaaacacattgcgaaaggagtagacatggctatcggcagcactctctcagtcggactgatcggccttaaggccttcatcgtccaagtgcaggctttcatcagccctggcttgccatacttcagcatcatcggattgccggatgcatcgttgtccgaagcccgcgagcgcgtgaaatcggcgtgtcaagccactggattcggttggccgcaaacccgcgtgaccgtgaacatgagccctgcggccatgcccaaacgtggttcgtcgcatgatctggccatcgcggccagcgccctatgcgcggcgggtgccatagggcatgattgcttggaagataccattgtgctcggcgaagtgaatcttgacggctcggtgctgccgattcatgggctgctcccgatcatgctgcatgccgaggaacgtggcgtgcgcaaaatgattgttccccatcgcaatcttgacgaggcttcgatggtggatggactggatgtagtgggtgtgaggcatgtgggtgagctcatcgaactgatgggcggcgatgccacctatacgattactgatacaccggttgccgacgagaccaccatggatcaatcgtccacaagccatcccaacgattgtggcgatatgaacgaggttctgggtcaggaacatgccaaatgggcgctgcaagtggcggcggcaggcggacataatctcatcatgaccggcccgccaggcagcggcaaaaccatgctggcctcacgtatgcccggtatcatgtgcccgttgaacgaggcggaacaactggaggtggcgtcgatacggtcgctgtgcggcatactgcctcagtacggcatcaccgacatgccgccgttcgaggcaccgcaccacaccgccagcacggcggccttggtgggtggtggcaacggcatcgccgttcccggcgcgatcacgcgcgcgcatcgaggcattctgttcctggacgaggcaccggaattcagcgcacgcgccctgcagacgttgcgcgaaccattggaatccgggtatgtggcgctttcccgttcaaaaggcagcacctattacccggcctcattccaactcatcatggcggccaacccctgcccgtgcggatactattacggcaccggcgaacgttgcgcttgccgggaaaaagaccgtatacgttatttctcgcgattgtccggaccgatattggatcgtgtggatattcagatggcggtgccaccggtctcgcgcattgccgtgcaaagcgagccaatcggcgagtccagtgccggaatacaagctcgtgtgattcgcgcccgtcaagtggccaaggaccggttcagacagtacggatgggtgtgcaacgcgcaagcttcgggaaaatggctgcacgccaatacgtcgctgaaagcgatggaattggtcaatcgggccctgtccaatcatcaactcacattgcgcggggccgatcgcgccatgcgtctgtcttggacgctcgccgatctggccggccgcgtgtcccccaccgagcaggacgtccatcagggcatcgaaatgagaacgaggatgacatgagtaacgctactgatatccgacaatctggcggcaccgcaggcagtgtggatcacaccgatacgggcctcgctgtttcgcgcaccattcccatgcctcccacggatacgttataccgcgccgcgctcacgttctgtcttgatggggcggatgtgatgatgtacgccacgctcaaaggcgcggaaagcgccgaatccctctggcacgcgttggcgcaatcccatccaagccagccatctgaaatctgcggcccggcgctgtcacgtattgaccgcatgttcgtggatggcctcacccgatggggccgcaaggcgtcggcgaacgcgatgcgctccttccgcaatgcactggccggctggcataaccgcatgatggacctgccctcgcaagacatcatccaactggccgactggttcactatggatggcacgcaatggattatcggccccggccatccatgttggccctcgcagttggccgacctgtccattcgctccgattgggcgccaccgctgtgtttgtggatcaaaggcgatccacgcgcattgaccagttgcgccaaaccggtcggcatcgtcggttcacgggacgtgaccgaatacggccggtatgtggcacacaccgtagccgaacaggcagtcgttgccgggcatctggtcgtgtccggaggcgcaatgggcacggatgcggcggcacattggggagcgttgaatgcgctgcacggcagaatgcccgccaatgtgggcagaaccgttgccgtattcgccggcgggctcaaccatatcggaccgatgcgtaaccgcacgctgttcgaacgtatcgaggcgcagggtggtgcactgatcagtgaactgtgcccagggacgattcccgaagcccgtcgttttctactccgcaaccgcattatcgcggccatgtcttccacattgattgtgacgcaagcccggttgcgttccggagcgctcaacaccgcgggatgggcatgcgaattgctgcgcgaagtgtatgcggttcccggtgacatcaatcagccttgcaacgccgggtgcaataagatgatcggcgaccaccgggcgatgattctgtgtgccgccacatccactgaggatatatgccatgaacggcataagcccgttatggcggtatgcccaggcataccgaaatccacaggtcaggactcgtccgaaaacgaggaggccatggaagtgccggcaacgactccgttatcgccagcatcctcggaatcatcggcgtcacaggagtcgtcacaagattcaggtcattcgaaacgtcttaggaccaagcatactcagcctacactcgttcaatccaaggatgggccggcgagcgcaactgccgaggccggtgccaacaagagcaagggtgaagagccgccctcgtcgcatcagatgccggatcttcgtgtcaagccgaagctcgatcccgagaaggaagcccaacaacgtatcattatcgccaagctgccggaaatggaacgcacattagtggcattgattcgtgaatgccgtaaacgacatctcatcgtcaccccggacgcactattgcgtgtggcgcgagagacggtacccgacgagattcccaatatcggcaccatacttgagctactcggcgcattggagctgaagggagtgatcgagcgggatgccggcatactcaagctgagcagccgtgtcggctaatcggctttcatgacacggctcgaagactgttcggcgggtgtgcgagaatcgaacccatgagtccgaaacgtttggaagatatgtatgatgcggtgatcgtcggcgccggagcggccggcctgtcggcggcgttgggactgctgcgctcccccaaaatcaccgagctcaaggaacaaggcgtggacccgaagatcctcgtggtctccaaactgcagccgctgcgttcgcacaccggttcggccgagggcggcatcgccgcgagcctgggcaatgtggagtccgatgactggcactggcattactacgacaccatcaagggcggcgactggctcgtcgaccaggacgcggccaaactgctcgccgaatacgcgccgcagaccgtgatcaacctggagcgtcagggcgtggccttctcccgtaccgatgacgggcatatcgcccagcgccggttcggcggccacacgcgcgagttcggcggtgccccggtcaagcgcgccgcctatgcggccgaccgcatcggccaccagattctgcacaccttgtggcagcagtgcgtggccgccggcgtcgagttcgccgaggaatggtatgtgaccgacctggtgctcgccgacgacggcaagcaggcggccggcatcgtggcatttgacacgcattcgggcaagattcaggccatccacgcgcgcaacgtgcttcttgccaccggtggcgcgggccgactgttccataccacatcgaattcctgggacctgaccggcgacggcatggcattggccttggccgccggcctgcagctggaggacatcgaatttgtgcagttccaccccaccgggctcgcgcacaccggcatcctgctgtccgaggcggcccgcgccgagggcggcattctgaggaacgccgacggtgagccgtttatggaacgctacgctccggagcataaggatctggccgcacgagacgtggtctcccgctccatcatggcggagatcgacgccggtcgcggcgtcgccgacccgaaggacccggatggtccgaaggactgcgtctggctggatatgaccggcatcgaccccgaacgtatgaaggaagtgctgccgcaggtggtcgaaaccatcgagcagtacgcgaacctcgatccggccaaggacctagtacccatcaagcccactgcacactacacgatgggcggcatccccatcaccaccgacggcgaggtgtaccgttgggccgacggtgccgtgcaggtagtcgatggactgttcgccgctggcgaatgctcttgtgtctccgtacatggtgcgaatcgtctgggcggcaattctctgctcgacgcctgcctgttcggtacacgtgctggtcagacgatggccgcacgcatcgtcgagaacccggttgactcccccatggccgatgattcgaccgatgacatgctgaccgatgccgccgatcaggctgccgattcccgcaaggcagagcttgacgaactgctcgccggaccgatggacgattcagacgatggcgggcccaccgccaatccttatcagctcatggcccaactcggatcagtgatggagcaggctctggccgtacgttgcaccgctcagaccatcgatacggcgttgactcagatcaacaacgacatcacaccggttgccgatatcttgcgggcccatgacaagaccgccgctttcaatcaggaggtcaccgccatctgggaagtccgtcatctaatcgaactggccgaggccatgctgcacgcttccgaatcccgtcaggaatcccgcggatccatgcaacgacttgatttccccgaacgcgacgatgagcatttccttgctcactcgatggtcgccgatgatggtccggcaagtttcaagccggtgcacatcaccgactatccacccaagaagcgcgagtactgatccgctggtggtaataccaagccgcctagggcttgtggcacaataggttggctgatattggacttgacatcccactgtttcatggaggcagaacatggctgaggcgagcaacacgacggttaccctgcaagtgcatcgtttcacgccgcgacccgagcgcgccgaacgtgcacgcggcggcagcccgttcgccaagaaaagctccccattcggcggcggctcggattcggcggcacgccgtcgtccgcgcggcaagcagtgggtgcaggaatacacgattcccgcgcgcccctcggacaccgtgctcgactgcctgctgaccatcaaacgcaccgtcgacccgacgctggccttccgctattcgtgcggtcacggcatgtgcggttcggacgccgtggccatcaacggcacccccaccctgctgtgcacggccaccatccgcgattgggccaagcagcccggcgccatccccgaagtcgatgacgaagggttccggcacaccggcaccgagtccgaagaatccgacgattccgcggaaaacggcgcaaacgcggcagccgaccaggactcggccgcaaacggctcgctgggagtcatcgaactggcatccctgcccggcttcccgccgcagcgcgacctcatcgccgacatcgaaccgatgctcaaccaaataaggaagctcaccccatatcttcaggcggacggcgtgctcaccaccaccgccgaaggcaaggtggacgtgttcgaatacctgcagaaccccgaacaactcgccaaatacgagctgctgagcaactgcatcgcctgcggcgtgtgcgaaggcgcctgcccggtgtacgccggcggcgacgctttcatcggcccggcctcgctgatttgggcctcccgtttcgtcaacgattcgcgcgacaccaaggccatggagcgtatggacgccatcgacaccgccgacggcgtggccgcctgccagtccgtgcgcgcctgctcccgccactgcccgcgcggcatcgatgtgggcgaggagatgtggcagatcgtggccaaggtccgcgagcgctgagccgcgccacgaccagctacggcaatcgctgcaacacgtagtcgatacatccaccgggtgcccgcacgagagaagacataaaggaacgaattatggacagaacgcagtacaccaacctcgccaaggcatgggaattcaccgaggaacacgcgcgcgaacgtgaatccaatgcgttgaccgacgcccgtacggccgccgacaagtccggccagttgcagggttcggccgcgcaggcccgtctgctgggcatgctggtgcgcatcaccgacgccgcttcggtcatcgccgtaggcaccggctcgctggtggagaccttgcagctcgcccatgcgctggataacaagggcctgctgactgcggtcgattccaccgctcagggcatcgcgctgattcgcaaggcgttcgccgaactgcaggatgagaccgacaccacgttgcgtgcggtgaacgccccggccagcgtgtttctgccgcgcctcaacgccaatgattacgatctgatcgtggtggcgggcgacgccgagaactatgccgccacgttcgcccaggcctcccgtctgctgcgcgcgcacggcgtgatcgtgttcaccgatgtgctggcgttggaggacggtcagggcggcatgattaatccggccgaccgcagcgacaaggccatcgccatgcgtgagctgctcaccaccgtcgaagatgacgaaggtttcgagtccacgcttacccctgacggcacaggcctgctcatcgcctacaaaaagtaactctgcccttggctcccctcggagaggggagccactctatctcgcttacctcacaattgcactgacggccacctccacggcttcgtcggcgtcatcggtcacggtgaccagtttcgggtcgattgccgaaatcatgccgtgctcggccaccggaccgttgagccagtcaaagagcccctgccagtattccttgccgtagagcaccaccggaatattcgccaccttgtgggtctggaccaaggtcagcagctcgaacatctcatccagtgtgccgaagccgcccgggcacacgatcacgccggaggaatacttgacgaacatggttttccgcacaaagaagtaccggaagctcatgccgaggttcacccactggttcaacccctgctcgtgcggcaattcgatgccgagtcccacggatttgccgccagccagtgccgctcccctattcgcggcttccatgatgccgggaccaccgccggtgatgacggcgatgttgcgcttggctatctggctacccatgcgccgggccgccttgtagatcgattcggtgcgctgggtgcgtgcggagccgaaaatagagaccgcaggtccgagctcggcgagcgccccgaaaccgtccacgaattccgattggatgcgcagcacacgccatgggtccatgtgcagccagtcggtgtcctggtcgggtttcagcagattggcggtggtattgtccgagggaatcatctggccgcgtagaatcaccgggccgcgatgataggtgtcgcccagcggcgagacgtcctccaagtcgaccgggttcaccggcgttgcggcagcctcggttgccgtctcggcctccaacgttgccgcatcattcgcggctgtggcttccaatggttccatatcgtccacgactgtggacttggatgcggcctcggctagattctttgcttcagcggcctttttgccgtcgttcttcttggatttcttctgcttctttgccatccaatatcctcctgtacggtgctatcgactcttcgcattctagcgcctgaagctctgcatacgttttccgcgaaatcatccttgacttcgtgaagaacgtacggtgagtgacactcagcgtacggttttcacgaaataaagcctcatctcgtgaagaacgtacggtgagcgcgcctcagcgtacggttttcacgaaacaaggccaacaatggagtagggatcgtctaagccatcagtggcggaagtcaatctccacactggcggtgccgtcggcgagggtgccggggtgttccgtgggcgtggtggactttgtggtgcgaccggtctgaccagcgccatcgccatcaatcgattcgtcatcctccgcatcggccgctgctgcggctgcggccttctcgaatctcttggactgacggctcagcagcacaccggaaatcgcggcggcgatcagggaggccaccagcacgccgaagcgcgcctcagcggaaagttccgcattcttgtacgccagcgaggcgatgaggaaggacacagtgaagccaatgccgcaggcgacggcagcgggaatcatgtcacgtacgcgcagccccttggccatcttgagcccgcccacatgcgtggccagccatgcggtggtgatgatgcccaaaggtttgccgaccaccaaagccacaatcagtgcgataaccaacggcgaagccaacaacagcgggctcatcgactcgaagtgcacgccggtggcgaacagggcgaagatgggcagggccagcagtgcggagaatggctgaagcttgttggcatagcgttcggcacgcggtgagagttcgccgtgcatttcacgggagggggtcagcaggccaaccagcacgccggccagtgtggggtgcacgcctgcctcgaacatcatgatccaagcgaggataccgacgatgccgaccgcgatccacggcacttttttcagtcgtacgaggtatgcccagatggcggcgcatacggcgatgccgatgaaccaataccaggcgttgatcgaggagaagaatacggcgatcagaataatggccagcaagtcatcgacggtggcaagcgtcatcaggaacgcgcggatcgaaccgggcagggccttggcaaacagggcgagcacggccagtgagaacgcgatatccgtggcggtgggcactgcccagccgtgcgacatctccgagaacggaatgctgctgccggtggtggtcagaatcagcgtgccgggttcaccaggcccgatctgagagaacaatgccgtgacggccaggaacaggatgggcggggcgatcatgccgcccaccgcgcacagcatcggcacggcggccgctttcggattggcgagcgagccggtggtgagttcctgcttcagttcgaggcccacggtcaggaagaagatggtaagcagaccatcctgggcccaatggccaatcggcaggtcgagattggtgtaggggatgaacagatgcgtttccgctacggtctcgaacgcatgcgcggtggcgggcaggttcgcgagcaccaggccggtgagcgcgaagccgagcatgatgagtccggaaatacggtctgaggcggcgattcgcctgatggtggaccaaagtcccttcttcgcgccggcggtcgtggccatcgcgtctccttgctgtactctcttggatgaaccgtatgtaatagtacggaatatctcaggacgttccgctccaggctgagtcgcgaagggcaaccttaccccccctgtgtggccgactcaaacgggccaatacaattggaaaagcctcggaagcatttcgctttcgaggcttactgtgcgccagacaggattcgaacctgcgacctgctgatccgtagtcagctgctctaatccgctgggctactggcgcataccactgttgcccccgtggttcgggagtgcgccagacaggattcgaacctgcgacctgctgatccgtagtcagctgctctaatccgctgggctactggcgcatgttgtcttttcagacaactcgatatataatacacgccgttcagatgaatgcaactcggcgtgttgcggcgagtcgcaccatcctaatcgccaccgcaacggcgtatttactggcctcacgccgcatgtgtacggactcggtcaagcaaaaccgactacgcaactttgaggcgtccctgcggcacatccacggcttcgcgcaagagtttgggcgtactggaaccctctacggacgccttgtccacaatcacctgcttcacatcatccaaactcggcaactggaacatcgtgtcctgcaacgtacgttcgataatcgaacgcaacccgcgcgcgccggtcccctgcttgatggcgatatcagcaatcgcccgaatggcctgttcggtgaactgcaggtcgacgccgtcgacggcgaacagcttacggtactgcttgatcagcgcgttggctggctgggtgagaatcgccgtcagatcgtctacggtaagttccttcagcacactggtgaccggcaaacgtccgatgaactcaggcaacagcccgaactcggccagatcatcggcattgacctgttcgagcaattcctcgtctttcatgtcggcgtcgtgccaattcgcgccgaagccggtctctcgacggcccaatcgcttgcgaacaatatccgtcagtcccacgaacgcaccgccgcagatgaataggatgccgcgtgtgtccatctgcgcagtgtcctgctccttatgcttgcgcgtgccctccaacggcacggaggcgatggtgccttccaaaatcttcagcaacgcctgctgaacgccctcaccggacacgtcacgggtgatggaggtgttctcacctgatttgcgcgcgatcttatcgatttcgtcaatgtagatgatgccgtgctgggctcggcttacgtcgccatccgcggcttggagaagacgttggagcacggtttccacatcgtcgcctacatagccggcctcggtcagggtggtggcgtcggtgatgacgaacggcacgttcattacgcgggccaacgcctgtgcaagataggttttgcccacaccggtggggccgagcaacagaatgtttgatttggcgacctcaacgtcagccaaagggtcactgttgcggcgggtagcacgcgtctgggcgggagcggattgcttggcttgtttgccggtctggccaccgtgcccgttattcccgtcaagctgctcagcggactcctgaagctccatattgacgcgtttgtaatgattgtatacagccacggacaatgcgcgcttggcgttctcctgaccgatgacgtagcggttgagataatcgaagatctgagcgggcttgggcaggctcagcgaattgacctcggcatctttgacacgctcctcggagatgatgtccacgcacagggcgatgcattcatcgcagatggaggcgttgggaccggccaccagttttcgtacctgatgttcggttttgccgcagaacgtgcaacggggtacgtcctcgttgtagctcaccacacgtcccatgattctcctttgccgactgcgccgcaccgtcgaaccgccacgctgcgcattatcattgtcatccttgaaatacaatacccccggtcgttgccgaccgagggtattgcaatgtccggaagttttactggcggtgttccaacacctcgtccacgatgccgtattccttggcttcaggagcggtcaggaaagtgtccacttcgatgtcgcggcgaatcttctcgacgtcctggccggtgtgcttggcgagggtctcctccagccattcgcgcatacgcagcatttccttggcctgaatctcgatctccgtggccttgccgaagccttggtcgatggccggctggtggatgagcacacgggcgttcggcagcatcaggcgcttgcccttggtgccggaggccagcagaatggcggcggcggaggcggcctggccgagacacacggtctgcacgtcgggcttgatgtactgcatggtgtcgtagatggcggtcatggccgtcatcgaaccgccgggtgagttgatgtacatcatcacgtcacggttcggatcttgggattcgaggaccagcagctgggccatcacgtcgtcggcggaggcgtcgtccacctgcacgccgaggaagatgatgcgatcctcgaacaggcgggagtaggcgtcctgggtcttcatgccatacggggtcttctccacgaactgcggcatgatgtaacggttggtcggcgcgggctgggctgcgcgggcggaggccggcatgaaaccggctacgccctgacggccggccaagcggtcggcacgggcggcgaactttgcttcttcacttgccatgagtctcactccccctgctggttgttgccgatggtgtccggcgtggtcacgagcttgtccacgaagccatagtcgagggcttcctgggcggtgaaccagtggtcgtattcgttgtcgcggtagatttcctcgagggtgtggccggtctgctcagcggtcagctcgctcatggtcttcttcatgtccatgatgagctcggcgttgatgcgcacgtcagtggcagtgccgccgatgccgccggaaggctggtgcatgagcacacgggcgtgcgaggtcaggtaacgcttgcccttggtgccggagctcagcaggaactggcccatggaagcacacatgcccaggcccacggtcgccacgtcaggctcgatgagctgcatggtgtcgtagatggccatgccggcggtgatggagccgcccggcgagttgatgtacagccagatgtccttcttcgggtcttcggcggccagcatcagcagctgagcgcagatgcggttggccatatcgtccttgacctcttcacccatccagatgatgcggtctttgagcagacggttgaaaatcgggtcgacggggccggccgggacgtcatcgcccgccatgaccggcaaggtcgcaaaggtattgctcaccttgattctccttctaattactcgaacattgttcagactaccgccttgaagcgactgaaggcggcttttcgcgtgctttttggcgggcagcgtagggatttcggttattccaaggtatcgaggacgtcgtcaatgaggaggcgggtctgggaggcggcatcgtcgcccagacgcgggaagcgacgggcggcattggcggggctggcaccggcggctcgcgctacgttggacttgctggccccatgggccacggctttttccgcgagccgatcgaccagtgaatcggcgacttggcgcatctgttcggccacccataattgggccatatccgcagataagtcgtagtcttcggccacatcgctggctgcctcctgaatggcggcccataacaccatgaatggctttcgatagtagtcaatctgctcagtgagcggctcggcggcaagcaattcaagtgccgagcgaatttctgtattttctgacatagctttctttacctcggctccccctctctgaggggagctgtcgccataggcggctgaggggagtttcgaccggggcagctcccctcagagaggggagccagaatatatgtatttacttacttacgactcagcaaccactttgatatcagtgacgacgtggccacggccatgccgaccggcacaaagaaggtaatcggcgcttcagagagctccatcaccaagcacatggccataagcggtgcctgctgtgaggccgaaagcaacgaagccgcaccgatcaaggcacacgcggttaccgaatcggtcggaaacatcagtatccatacgaggccgagcatcgcacccagcgtggaacctaatgcgatgccgggctgcagcacaccgcccgacgcaccggagcgaatggtcatcagcgtcaccagcgctttggcaacaaaggtgagtgccaacacacccagcaacatccagatattggactgggacagcgggaaaccggcgttcatcacggatccagaagggccgctcccaccctgaagcatggcccagaacgatgccattccagagcccgctcccccgccagaggccgaaccggatacattaccgccgcccgtcagcaagttccatggagaggcggccgctgaagatgccgactgcatggcaccagcagtgccggcggtttcaggaatgaatgtactgaatccaagttgcgctgcggcacggccgttgcccatcacctgcggcacaacaatcgccaccaaaccggtgatgagaccagccagcggcatctgccacagaatggccttgccggtcggcttgtgcgcttccgcccattgcgaaccttttcggaacaatgcgccgcccactccacatgccgcaccgcagatcagagcgaacagcattaacgttggcgtggattccggttgcatggcggtgatgtcgtagaacaggcaatgccctttgatcgcaaccgccacgaatgcggcaatggcagacacgcccagtccaaacgcaaccttttcgatcgtcacatccaccaacaggatttcgacggcgaagaacatgccggccagcggcgcgtcatagacgcctcctagaccggcaccggcagccactgccaccaccatgcgccggtcgataccatcaacgccctcgatatggaacaggtcgcaaaaacgttgcgcgatcatggcgccgagttcgcgtggggcgacttctcggccgatcgaggcaccggagccgacgatgaaaatctgcaacaccacatgcacaatggtttgccagaaaggcattcgctttcccgccacggccttcttgactgagggcaccacagtcgttttgtgtcgtagcagataccagataatgcccgcgatgccgagtcccacggtcaccgatatcacacggcgtgcagcgggcacgccgaatggaccagacaattctgggccttcgacgtagccgagcagcacatgttcaacgccgtagagcaacagggtcagcagacctgctcccacaccgatgagcacgccgagcacaatggtcgccgcagcgagccaaccaaggcgtttgatagtaaccgttggctgcatgtcaacctccgcacgctatgcaacgagtatgccttgggaactcccctcagtctcgctacgcccgacagctccccccaaaggggagccaaagaaatagtccttttaccagaataggaagagcccggaaccgtgaaacacgattccgggctcaaacaatcacgctaacgcgatgaggctatgctcactcagcgtccttggcgtcatccttggcggacagttcgtcggccacggcggcagcagcggaagcggcctcgacggactcggactcttcgtcctcagcggcctcgcccaggaagccggagaggtccacaacctcgccatcagcggtgaacttgacggcgcgcatgccggcgagcagacccttggaacggccgacttcctgcacagcggagccaagctggccattcttgatgatggcctggatgaagttgttcgggtccatgccgtactgctgggcgatggaagcgaggaagttgaacacgtcggactgggacacctgaacgtccagcttctcggccagagcgtcgagcaccatctgatcgcgcagatccttctccacggtctcctcggcctgagccttctgctccttggtggccttctccgggtccggggtcatgcccttgagctgctcttcgaccatgttggccttgacacccttcggcaccgggatctcgaggccttcctgcagcttggcgatgaaggcatcgcgagcctcggtggcctgacgaccttcggcgtcctgagcggcagccttgcggatgtcagccttgagctcgtccagagtgtcgaactcggaagcttcggaagcgaactcatcgttcagctccggcagttcctcagccttgacggagttgaccttgaccttcacggtggccttctggccctcgtgctcgccggcttccagcgtgccttcgaaggtggtctcctcgccggcggacaggccgtcaagagcctcgtccagaccgtcgagcatggtgttggagccgagctcgtagctcacgccttcctgggagtcgacggtctcgccgtcaatctcagcagtcaggtcgatgttggcgaagtcgcccttggcggccgggcggtccacgccgaccaaggtgccgaagcgctgacgcagggtctcgaggcgcttgtcgacgtcctcatccttgacttccggcttggagatggcgatctcaagaccgtcgatttccggcagttcgatgtcaggacgacgctcgacggtggcggtgaacttcagcttggtctcgtcgttggcggactgcggaacatcctgcacgtcgaactccggctgagccatcggacgaatcttcttctcatccagggccttggagtacagctccgggaccgcgtcgttcacggcctcaccggcgacggcggcgaaaccgatgcgctggtcgatgatcttgccgggaacgtggcccttacggaagccgggaacgttcacctgcttggcgatttccttacgggccgcatccagatacgggttgagctcttccggttcaacagtgacggtgagcttcaccttggtgggctcgaggttacgaacgctgatcttcacgctaatgactcctcaaaagtcgttatttcttacagttctgccgtaaggcaacctctacatgataacgccacttacggacggtgcaatgagtttcacctgccagtttcttgcgccctgctcgatcaggaacgtctcgacgtccacttccaccgggtcttccacccagcacaggttgcgtaggatctgtggcttgatgatcatctcggccggcgtgcgggtgtcttcggcgatgcggttgatcacacgccgtacccgctgcagacggtcataacgctccggatggcgctgttgccacagtcgcatggatcggggcgcgttcaccacaccgttttcgtcctgttcgggggcgggcatggtaggccattgggtgggcttcagggccatggcgcggtcgatggcctgcttccagaccttcggcttgaccgtacgctgaatcggcgcgtaccgctcgaacattttgtcctgctcggtgccggtatgaatgcgcacacgctcgttcagggatcggagtgcgcggaattgggcggcattgtgcggcttgttggtcgcggcctcgataattgacgaatcggtcaataacaggctgggagcgatgtcgtatcgccgggcgagccggtcgcgctcctcccatagggatttggcgatggccaagcccctcggatcacgactcagctgggtgatgcgcgagatacgcagccaaggaatcggatgaggtttgcgcggggcaaggcccgcaaccaaagcgtgagaaaactcttcagcggcccactcgtccttgcctgcggctttcaggtcacgacgcatcaaggtttcgagttcgataagcacctccacgtcgagcgccgcatagttgcgccagtcgcgcggcagcggacggtaggaccaatcggcggcggaatgctctttggccagcgtgatgccgaggtagtgttcggtgacggcggccagaccgaagcggtgcaggccgagcaaccgcgccgctatttccgtgtcgaacagggctttgggtttgagcccgatttcggcgaatccgggcaagtccatcagagaatcatgcagaatccacgtggcgtcgcccacggcgtcattgaattcattccaatcagctccggcccgggtcagggcgacgggatcaagcaaggcgatgcctgcaccctcacgtttgaactgaatcagccaatcctcgtgcccatagcggaagccggacgcccgttcggcgtcggcggccagcgagcccgtcgcctcggccagcgcatcgcaggcacgatgatagccatccagcgacgaagtgacatcgggcactcccccgcgaggctctttcagcagtcggggttcggtgtcacggacgtcactcaactggcgtcatcctcctcaaaacggatggtggatctgatgaatgcggcccacgagcggatttgtgcgccggcgtccatagtaccgtccggtccggtcccgtcaagcggggtccatgagacgcgaatctcacacccggcgctggtggagccggccatcgaaccaaaagccgtgttttgggtcacggtgactgtgccggataccgaatccggctcgatgccgtcgaaatagtcgcacatgtcatcccagtacatgccgggggtcagagaatcgttttcggcggtttccagcggcagccgcgcgaacgccacgcaacgccagttggaatcccggtcaatgcgcagctcatgagcataaagcatcatgatccagcctgtggcgattcgtgattcggcatcgttgccaagaccggcggaaaaggcatcgccgagggcacgctctcccgcttcgaattccacgccgataccataatcggccaaggtggaaggcacgggaatctcccgatagcgcacgtcatggatgcgcttcatggtgctgacggattcgacagctgcccatacttcatccggcacaccctgagggcgtacggggcgtccgtcgttggacgctcccataggaaatgcgtagatgtcggccatatctctagggtatgggcgaacgggccgaatcgtggtatttacgcgcggttcggccctgcaatttaaaacacggtgaagccgtggtccttgaactggttggccacccgcgaacgggtggcggcgttgggtcccttctggttctccagcgggtatgggatgcgcagttcgtgccacttcgggcggccaagctggtggaatcccagcacgtcgatgtgttcgacggcatcaccgaaggactcgcagatcttcgccacgttttcgacgttctcttcggagtcggtcaggcccggcacgagcacaaatcgtacccagatcttcttgccggccttggccagtcgctggccaaaatcgatggtgggctgcaaggtgccgccggtgaccttgtgataggtctcctcgtcgccggatttgacgtcgagcagacacaggtcgatgtcctcgagcatctcgtcggtgtagctcgtgttgaggaagccggacgtatcgaggcaggtgtgcacgcccatctccttggcggcatggaacacacgcgagacgaaggcgggctgcatcatggattcgccgccggagaaggtgataccgccatgcgtggccttgaacaggtccttgtaacgatcgaccttcttgatcatggcgtcaaggtagacgggcttgccgtcgcgcatcttccaagtgtccgggttctggcagtactggcagcgcagcgggcagccggacatgaacacggtcatgcgggtgcccggtccatccacggaggtgttgatgtcccaagagtgaacgaagccgatatcgccggatttcagggcggaaaggcggtcacgtcggtcgagtccgattggggattcaaagccggaaaggccgcccatcaaagtctgcgaggcataggtcttcgattccttgagcatatgcctggtcgtggtgcggaacgtgggtgttgcgggcatagttgtcctcctgttccaaatgatgcgaaagtctgtggaaaataaggaaggggtggagccgtgccccaccccttcagttagtcattgccgcggttcgcggggttggtcatcagtcgacgacggcgccctggtggaaggtacgggagatgacgtcgagctgctgctccttggtgagcttgacgaagttcaccgcgtagccggagacgcgcacggtcaggtgcgggtacttttcggggtgctcgacggcatcctccatggtctcgcggcgcagaacgttgatgttcgcgtggtagaggccgtggccgttgcccgcgtccaggatgccgaccaggttgccgatgcgctcggcctcatcgcggcccaggccatcgggggtgatggtgttggtcagcgagatgccgtcgagggcgtcgttgtagtcgatcttgccgacggagaacatggacggcagcatgccgtgcgagtccatgccgttctccgggttggcgcccggagcgtacggggtgcccttcttgtggcgggacgggaaggaaccggtgttcttgccgtactccacgttggaggtgatggtcaggatggactgggtcgggacggcgccacggtagacgggcaggcgcttgacctggcccatcacggtggagacgacccacttggcgatgtcgtcggcgcggtcgtcgtcgttgccgtagaccgggaactcgccctcggtgcggtagccgacgaccagatcgtcatcggcgccttcaacgtactcgtactcgtggccttcgaggttcttggcttccttgttggtgatcgggtacaccttggcgtacttgatggcggacagggagtcggcggcgatggacagaccggacatgccgcaaccgagggtgcggtacacctccttgtcgtgtagggccatctcgatggactcgtaggcgtacttatcgtgcatgtagtggatgatgttcagcgcttcgacgtaggtttcggacagccactcgagcgccttctcgtagttgttcttgaccttctcgtagtccaaggtgccgtcggcctccggggcgatcgggtcgatgacgcccttgtcgatgacctgcatgccggtcatctcatcgcggccgccgttgatggcgtacagcagggccttggcggagttcacgcgagcggcgaagaactgcatctgcttgcccacgcgcatcggggagacgcagcatgcgatggcggcgtcgtcgccccagtgggaacggatttccttgtcggactcgtactggatggccgaggtgtcgatggagatcttggcgcagaagcgcttgtagccttccggcagcttcggatcccagaagatggtgatgttcggctcagggccaggtccgaggtgctcaagggtcagggtgttgagcagacggaaggaggtcttggtgaccatcggacggccatcgtcgccgaagccggcgtcggaccaggtcgcccagtacgggtcgccggagaagatgttgtcgtagtccttggtgcgcaggaagcggacgatacgcagcttcatgacgatgttgtcgatgagctcctgggcgtcggtctcggtgatcttgccggcctcgaggtcgcgctcgatgaagcagtcgaggaaggcggagttacggccgaaggacatggcggcgccgtcctgggacttgatggaggccaggtagcccatgtaggtccactgcacggcttcctgggcggtctgagcagggcgggacaggtccaggccgtactcgttgccgaggttgatgagctgcttcagagccttgatctgctcgtcgtgctcctcgcggaagcggatccagtgctcgatctccggctcggtgaagtcgttgcggtacgggatggagtccttgtcgcgcttcttgaaggcgatcagcttgttgacaccgtacagggcaacacgacggtagtcgccgatgatgcggccacggccgtaggcatccggcagaccggtgaggatcttgttgtggcgggcgaccttgatgttcttggtgtagacgccgaacacgccgtcattgtgggtcttgcggtacttggtgaagatcttcttgatctccggatccggctccttgccggcttccttgatggcctgctcgaccatacgccagccgccgttcggcatcatggcgcgcttgcagggcacgtcggtctgcaagccgacgatcacgttgtcgacttccggggagtcgatgtagccggccgggaaggcatcgatgccagccggggtgtgggtgtccacgtcgtagacgcgctgcttgcgctccacggccaggtagttgtcgtcgaggtacttccacaggtgcttggtcttctcggtggcaggagccaggaatgtctcgtcgccctcgtacggggtgtagttcttctggatgaagtcgcggacgtcaatatccttctgccagttgccctcggtgaagccagcccacgccttggcgtcgagctcctcctgggagacagctgcattttctactgcggtcatgtcactccttaaatggggttgtaggtttcgcatcttcacggaacccttggttcaacagtgtagttggcacttgcttgggaaaagccgaaattgggagtgagctatctcacattgttttttgtgaacgctaccattccaatggtttctaggtattgatggggctattgcacgtctccagatatgggaaaccgctcatactgtgatgttcgtatgagcggcttggtgagcggttcggtcttgagattgacagcagaaccgtatccgtctgttttggccgtcagtcttcatcgttcgcttgcgcggatttcacaccgtagttcttccagcgccagttctcctcctcccatctggcgttgcggtccaccacgatgtcccaggcgtgttcggcatcttccttggtcttgtacggacccatgcgctgttcaatcggtgagaccatgcccagctcggcctgcttcttgacggtgttgaaataccactgcttcttgttatcgtctgtcattggtacctcctcaacggtattacttgctcccgctggcgggagcaatatatgtttattccctgaacgcgttggtgacgggcagtcggcggtcgcggccgaacgcgagggccgtgaccttcggtcccaacgggtattggcggcgcttccattcggcgcggtccaccaatcgcatcacagtgtccacggtggcctggtcgaagccgtcggccaacaggtcggcgcggccgtgcgcgtgctcgatgtatgcggcgagcaccttgtcgagcagcgcgtattcgggcagggagtcggagtccttctgcccggggcgcaactcggccgagggtgccttctcgatggaggagaccggaatcatcacgccgtccttcaacgggatgccggtgttgccgtcctcgttgcccacgatcttgagaccgccgatgccgacgcctgcggccgcggccttgttacgccaacggctgatctcccagacacgggtcttgagcaggtccttgatgggtgcgtagccgcctaccgcatcgccgtagatggtcgagtagccgcaggcgagctctgacttgttgccggtggccacggcgagcagaccgcgcgaattggagctggccatcacgatcacaccgcggatgcgggcctgcaggttctcggcggagacgccatcaaggtcaagttgctgttggtaggcgttgaacaatggctcaatgggctggacctcgtaatgggcgccaatgttggaggccaaatcggcggcgtcgtctttggaaccgtcggaggagtacatggagggcatggagatgccccagacgttctcgccgccgcatgcgtcggccgccatggcggctaccagtgcggagtcgatgcctcctgagaggcccagcgtcacgccggtgaagtggttcttggccatgtagtccttgaggccgagcacgcaggcagtgtatacctcttcgtccgggtcgagttccggaacgatctcggccttggcctgatgttcggcggcggaatcgaagtcccagaacgtcaggttttccatgaatatcgggctgcgttcgataagcgtgccgtcggcgtcgaccacgaagctgccgccgtcgaagacgaggtcgtcctgaccgccgacctgattcaggtagatgaccggggcgttaacctcggcggcacgacgctgggcgagctcgaaacgggtgttggtcttgccttcctcatacggcgagccgttgatggtgagcagcaggtcgatgttcttggtggccaggtcggccaccgggccgccgtcctgccagatgtcctcgcagatggccacgccaatggtggcgccgtccacgtcgagggtcacggagcggtcgccggcggagaagatgcggaattcgtcgaacacgccgtagttgggcaggaagtgcttgtcgtagccggcccagaccacgccctggtgcaagaccaccagtcggttgcgcggcttggaggtcttgcggtcggtgcccacggtgccgaccaccacgaacagatcgccgaggccgtcgtcgttgagctgggtggcgagttcgttggccttgtcccatgcggcttggcggaaggtgcggcgcagggccagatcctcgatggggtatccggtgagggtcatttccgggaaaacaaccacttgggcgtttcctgcggcggctttacgggagtagtcgagcaccttggcggcgttggcgtcaagcgcgccgacgcaggtgtcgatctgggcgagtgcgaagcgaagctgtgtcatagattcttagtgtagccgcgtatgacgtcggattgcctgttcttccggcttggcgtcattcattaggtcgtttttgcgttcattaggtcactgcaatgcgatatcagtcgttgcaatggcgcgattccaacaaccagtatcgccgttcaccgacctaatggacgatgaatcgacctaatgaacgaatgccactccccctcagtcagcttcgctgatagctcgtcctgcacttatggacgggcgaggcccgcgcatatctggttcggctgtcgcctcactttcggctgcagacagcccattgggctgtctgcctaacgcctcagcctccagaggggagccaaaaaaggatttacctcagctcgttgagcacgcgcagggcggcgttgacgtagaagttgacgaaggtgggaatggattcgtcgagacccacgaaatgcgggctatgccagtcggcgcaaccttcctggccgtttgacccgacgaacgcgaacaccggcaacgtcaccttggcgaattcgcagaagtcctcccccgccatcgactgacgtatcggttcgagctgcgcgtagtcgttgacatccgccgccacggccttggcgagacctggatcggagaccagcgggtcttgaaagtcatcccagaccacgtcggcgctgatgccgtatgcctcggcggtgtgttccaccacttccttgaatcggcggccgaccagattgccatccgacttgtggaaatagcgcacagtcccttggaatccggcttcggcgggcaccacgttccacacatggccgccgtgcacttcggtaacggacagcaccagcgggtggaagggcgtgacgttgcggctcacgatggtctgcaggctcagaataatactggcgagcgcttcgatgggcccggtgcccttgtacgggtagccggcgtgggtgccttgggcgtggagggtcacgcggaatttcacgcagccggccatcatcggctcgacgccgatggccagctggccggacgcatagttggggttgttgtgcgtgccgataatggcttcgacgtcatccacgagtccggcgtcgatcatggcgcgagcgccttggccggtctcctcactcggctggaacagaatcttgattgagccggcgaacttgtcacggtgctcggcgagccagaaggcggcaccgagcagaccggtcatgtgcaggtcgtggccgcagccgtgcatcacgccttcattgacggagctgaactccagtccggagtcttccacgatgggcaggccgtcgatgtcggcgcgcagcccgatacgcggcccgggaccggcctcgccctgaatgagccccacaacaccagtctccagcgggttgtgcaggatctcgatgccgtgcgccttgagctggtcggtcagatagatgctggtgtcgaattcacggaaactacgctccggatgggcgtgcaggtagtggcggatggtgatgagttcgtggtcgatgtcgatatgttcactcatggttcccgattctagtagcgcgaagaatatattgcggccctcgcttcatattggcgagggccgcgatctatggggtcagtatgccttgttattgctggcgtttgagcagtcgtttggcgatggcgttggcgatgccctgcaccacctggaccagtacgatcatgatgatcacggccgtccaggtgacggtctggtcgaacttctggtagccgtaggcgatggcgaagttaccgagaccgccaccgccgatgtagccggccatggcagacatgtcgagcacgccaatgaacaggaaggcgtaggccaggatcagcggtgccagggcttcggggatgagcacggtgcggatgatggtgagcttgccggcacccatcgaacgcgcggcctcgattactcccgggtcgaccggcacgagattctgttcgaccagacgcgaggtggcgaaggtgcacatcaccaccatcgggaagatggcggccacggtgccgatggacgtgccgaccacgacgatggtgagcggctgcatggctgccaggaagatgatgaacggaatcgggcgcacgatgttgacgatgatgtcaaggatgcggtagacgaccgcgttctcgaacaggttgccggggcgggtgccatagagcaccacgccgaggatcaggccgaggaatccgccgatgacgagggtgacgagcaccatggtcagggtctggccaatggattcgaacagtagtggacgcagcacgttccagtcgctacgcgggttggcgaggatgatcatgcgttggctccttcatgtgcggcggcggacgcgacgggcgcggtggcagtatcggccgccagtgggtcatgggcgcggtcttcggcgtaggaggcatgtccggcgactgcgtcggcgtaggccacaggctttgcggcggtgccgaagtcgatgacgtcgctattggcggcgagctcgcgcaggaattcgtccacatgccagccgggcccgttgaattcgtaggtgatggcaccgatggcggtccccttgaccgtgtcgatgccgccgtagagcaggctggattcgacgccgtatttggcgatgagttcggagatattctgtccggatgccttgagttcatggccttgggtgccggaaacgtccttttgccggataagcacggtgacaatgcggcccgaccattcgtgatgcaatcgctcgacccggtcttcctcgggcaggccagacaatgcggtggcaatgaatcgcttggtcaccggctgctggggtgcagcgaacacatcgtatacgtcgccggattcgaccacgcgtccggcgctcattacggccacgcggccggcaatctgctggaccacgttcatctgatgggtgataagcacaatggtgatgccgaattcctcgttcacacgcttgagcaaggccagcacttcggtggtggtttccgggtcgagcgcgctggtggcttcgtcggcgagcagaatctccggattagtggccagtgcgcgggcgatgccgacgcgctgcttctggccgccggacagctgcgaagggtatttgtttgcgtgctcactgaggcccacgaattcaaggagttcgttgacacgacgatcctgatagtccttgcgccagtgatcgagttgcagtgggtaggcgatgttctgggccacggttttggtggagaacaggttgaactgctggaaaatcatgccgattttctggcggatgggccgcagcttggtctcactcagagaggtgatatcagtaccaagcacggtcacagtgccggaggtgggtcgttcgagcgcgttgataagccggaccagtgtggatttgcctgcaccggaatagccgatgatgccgaagatgtcaccgcgatcgatggtcaggctgacgtcatccacggctcgtgcgatgttcgcgccgcgtccgcgtgttttgaattccttcacgacatggtcgaaggtgatgatggggtcgctcatagtgctccctgatgctggttgttggtgtccggtcacggaagcggagcgaatcccgattgttggctcgggtactcgctccgcttggtggtaatggctatggacaggctagtcgtgcgctcgtatcagccgcggctcactgctgggccttggcatccttctcaatgtcggacaggaagccttgcagctcgctggcgctgaacttgtcggcgaacaccgcggtaccgccggagttctcctgcagggcgtcgagcacatccttctgctggtagatggaaacgagcttcttgtaggtctcgttgttcacgtccgccttgcgggccacccacacgttgatgtaggggcgagcttcttcggattcggcgtcatcctggtagatggcgtccttcgggtcgagaccggcgtcggccacgtagtcgttgttgatcacaccagcggcgatggtcgggtccttcagggtggtggccacctgttcggccttgagcggggtgaccttgaccttgctcttggcttcgtcgatgtcggccggggtggagaaggcggtccagtcgtccttgagcgtcacgagaccggcggccttgagcacgccgatagcgcgggcctggttggtttcgtcgttcggaatggtgacggtgtcgccctgcttcaggtccttgatgtccttgaccttggtggagtacacgccgagcgggtagatggcggtgccgccgatgggctgcaggtccttcttgttgctcacgttgtagttggccaagtagagcaggtgctggaattcgttgaggtccagctcgccggagtcaagggccgggttttcggaggtgtagtcctggaagtcgacgatgtcgacgtagatgccggccttctcggcgtcctgcttgaacttgacccattcggggttggtagcgccgaccacgccgatcttgaccgggttgcccttgctgcccttggcggacgactcgttggcaccggcaaacgcgcggtagccgaagaacgcggccacggcgataatcgccacgaccacgatggtgatgatgacgttgcggacggtgtggttcacacgcaccggctcgttattgttaggagcggccggagttgccgactgggttgctgctgtcattggatttcctctctccaaaattgatgtcgggtaacaccataacgcgcttgaaccgcgaaagtgacggaaaatggccgattgccgtataggtgtcttttatggcgcgcatgcaatggccgggattcgtgcgtttgataacccgctataggcgtgccgaacacgccggaaagcacgtcgagaggggctttgacaatggaagctatgactaccgatactgccaatgccgatatccgagccgtattcttcgatatcgatggcacgctcaccagtttcacgacccatacggtgccggattccacaatcgaggcgattcaccggctgcaggccgcaggcgtcaaggtgctgatttgcacgggccgcgcgccttcacagatgcacgtggtgctggataccatgccggtgacgttcgatggcgtggtggcgttcaatgggcagtattgctttgatgacaccggcttctttgcctcgcaggccttggatactgctgatattgaggtgattctcgactggctggaccgtcaccccgatgtggtgtgcaatttcggcgagaaggattacgtgtacttcaaccagtccaatgatctgcttcgcgccacgtggagcaaactgggcaaaaccgcaccgacccggtattttgaggacccgcgcacccgcgcgctggatcatgagactttccagatcagtccctttgtcggacccgagttggaggccgaactggtgggactgtgcagcaatgtgcgcggggtgcgttggcatccggatttcacggatctgattccggccgatggcggcaagccgcgcggcatccagcggttcatggcgcattacggcatcacgcgcgggcagaccatggccttcggcgatggcggcaatgacacggatatgctcgcctacgccggcatcggggtcgcgatgggcaatgcgaccgccgagccaaaggccgccgccgattacatcaccgacgacgtggaccacgacggtgtgcgcaatgccctactgcatttcggggtgctacgcgattattgatgccgtagcgcctcgaccgggtcgagctttgccgcgcgtctagctggatagtagccgaaaatcacgccgacagcgatgcagatgcccactgccagtccgatggactgcacggaaactgctggcgcgatactcatgccaccggcgatgccggacaccaatccagcggcgcccaacgacagcaagtagccgatcaacgtgccgataagacctccaagcactgtgattgcaatggattcggcgaggaactgcgcggtcacgtcacgccgagtggcacccaatgcccggcgcaggccaatttcgcggatgcgttcggtaacgttggtgagcatcatgttcataatgccgatgccgcccaccagcaacgagaccccggccaccgaacccgccagcacctggaatgcgctcatgaagctggaaagctggtcgatggaggattgggcgcttacgaccgacagattctggtcgatctgttcggttgggatacgcatgatgcgagcgacaacggtcttcgtctgttccgtgagctggtcgatatcaaccccgtccttggccagtccgtagatctgcatgtatcccatgttcgaggacgcaaaccgcagcgccacagtggtggcaggcatatagatattcacgctgtcgccgcccatgccgcccatcaatccagacgactcgaccacacccacaacggttgcttcattgccgtcaagcgtgacggttctgccgatggcgtcaatgtccgcgctgccgaacagcttctgcacgccctgcccgtcgagaatcaccaccattgcaccactcgttgcttcactcgatgtgaaggcccgtccacgaccaatcgtcactccggatacatcgaagaaatgttcgtcgacaccggtgatgctcgccgacaccttgtcggtggtaccgggcgcggcgattgacgaggcggcaccatagttcgtcggcgagaagtactcgtagtcggtcagttcctcgcgcatcgcagtgatctgttcgtcgtcaagggtgccgacgtccgtgtaaatcgaaatcgtgcgcgccgcgttcatacccagttcgccgaccagagagtctcgaatgccaccgatcagtgaggtcatggtaatcaccgcggcaatgccgatgacgatgccgagaatggtcagtgcgcttttgcctttgttcgccctcagtgcggagccggtttccgccagcagatcccgtgttctcatcggtacatcccttcacgcagtacgccgtcacgcatgtgcaggcatcggtcggcgcgttcggccacttcggggctgtgggtgatgagcacgatggttttgccttgctgcttgagctgttcgaacgtgtgcatcaccgcatcgccggttttggagtccaggttgccggtcggctcgtcgccgagaatcagcggcgggtcctgtaccaacgctctggcgatggccacgcgctgcatctgaccaccggagagttcattggttttgcggtcgaacagttccggactcaacgccactgattggagtgctttgatggcacgcccttcccgttcacgcaccgggcagtcggaataggccaggggcagcatcacgttgcgcagcacgctggtgcgcggcagcagattgaaggattggaacacgaagccgatgagccacccgcgcagttcggagcgttcgtcatcactcagattctgcacgtccatgccgcacaggcggtaggtgccggatgatgggcggtcgagcaggcccagcgtgttcatcagcgtggatttgccggaaccggatggtcccatgatggcgaggaactcgccttggcgcacattcatggtgatgcctttgagcacatgggtgtaggtgtcgcctgtctcgaagatgcggttgatgttttcaacctcgatgacgttggctgtggcggtgggcacggcaatggtctcattacgttgtttgccgcgatttgcccggctcgcgtcggaacgaaacgggaacatatcagcgtgccctttcgtccgaagccgcggtttgcgaggtggaagaagcagcatcgccagtattgtcggcagccgaagcgccatcaagcatgatgacatcgcccttgctcacattgccttccacaacggctttggtgttgttcttggctttgaccgtgactcgcacccgcttgaactcatgggtttcggcgttggtctcgagcatgaccgcgctgctctccttaccctcatccacgatggcggcgagcggcaccatcaaagcgttgtcaatgctctgcatggtgattttcacactggccgtcatgcccggcttcagtttcggatcaggggcgggaatgatgagacgcacggcgtatcccacgccgccgttgccactctgcccgcctgccgaggaatcagccaactgcgacgtggtgctggcgatggtatccaccttggcatcgagcgtcagccccggcaccgcggagaacgtgactttggcgctctggtccttggccactttagtgatatccagctcattgatgttgacattgaccttcatctgactcaggtcggcgatctgacacaatggtttaccgtctgcgccggcggaagtggatgagccatcggaggaagctccgatggcggcaccgggcaccgcgctcatggtcagcaccgtgcccgagaccggagcagtgaccgtacgcttgttggcttgggcgaccgcctcgtcataggtggcttgtgcttgctgaacggcgacctgcgcgctctccacgccgctttgtgcagcgggcagctgtccggccgcatcatcggcagcggcttggccttcctcaccatcctgattacgtgcctgacctatggtcgcattgatttggttcacctgctgctgggcggcattaaggtttgagttcgctgctcgcagagccagatcggcctgattcacgtcgctatcgagcttgtcgttgttgatggtaaacagtacgtcgccggcgttgacggttgcgccttcctgcaccttgacttcgccgatggtgccgtcgatctgcggggcgacgacggtggagttgatgggttctatggaaccggtggagctgacttggtcgacgaaatggccacgttccaccgttgccgtggataccggagacacgcccccatctgacggggtaataatcgcgtgcaccaccataaagccgataatcagtaccgccacgacggcgacggcgatgatgcgatgcaccacgcgctttttcttgcgcgtctcacgttcgcgcattaatcggttgaattcggcgacttccgcgttctccgcctcgccttgggcaagggcgtcgacacttgattccacggtgtcggtagcgtccaacggttgtatgattgcggtctgctgctgatccttctgcatgtgctctcccccatggctggctccgagcctcgcgcccggatactggttccaagcctatggaggaatggcgtggtttccatcatgcgcaggattgaattgatggggagttgtcatccttaaggattaattggggtggggaatttatgggctgttttcagtcttggctctcgccttcgcttccgcttttctctcccccagtcatgcttcgcatgacagcctcctcgtcagagggggcttatgaataagcaaagggctcgggacgaatcccgagccctttggcgttagcgaactaacaacaccgtggaggtgttatcactcgttatcgccagcggtagcggcggtagcggtgacggcacccttcttgtcggtgttcacgccggagtacacccagtcggtgtagtccgggtggtcgtagcccttgtcgacggcgaactggaaggcctcatcacggaacttctcgagctcgtcgatcttgtcggcgtacttgtcggcgtcgatcatgcgcagggcctcagcggtcagctcgtagcggtcgatgcggttgacacgaaccatgtcgtacggggtggtggtggagccctcctcctcgtagccgtggacgttgaagttgtcgtggttcggacggtcgtagatcaggccgcgcacgtcgtgagcgtaggagtggtacgcgaacagcaccggcttgtcggcggtgaagatgtcggcgaactcctcgtcggtcagagcctcgtcgttctccttggcggactgcagggagagcaggtcggcaacgttcacaaccttgaacttgacgcccagttccttcagcttgtcggaagcagccatgatctcctgagtcgggacatcgccggcggcggcaagcacgacctcggcctcatcgttgttcttggcggtggaagcccaatcccaagcggcggcacccttctcgagctcggcacgagcctcgtccagagtcagccaggtggcagcaggctgcttgccggcgatgatggcgttgatcttgttggtggacttgtagcacttctcggcgatggccagcagcatgttcgcatcggtggcgaagtagatgccgatgacgtggtcattgtggaagcacttgttcagcaggacggaggtgacacccgggtcctggtgggagaagccgttgtggtcctgacgccaaacgtgggaggagaccagcaggttcatggaggcgatcggcttgcgccacggaatctcgcggacggtagcctcaagccacttggcgtgctggttcagcatggagtcgatcacgtggacgaaggactcgtaggagctccagatgccgtgacgaccggtcagcaggtaggcctcgaggaagccttccatctggtgctcggacagctgctcaacgacctggccggagacgtgcatgtgctcgtcgacctcgtcggagatgtagccggcatcccactgcttgttggtgacttcgtaggaagcctgcagacggttggaagcggtctcatccggtccgaagatgcggaagtcgcgcgggttgttcttgatgatgtcgcgagtgtagacacccagacgacgggtggcctcgagctggccccagccgtggccgtactcagccacttccttgacctcgtagtcttcaaggttcggcagcttcaggtcgtcgcggatcacaccaccgttggcgttcgggttggcaccgatacgcagctcgcccttcggcatgaaggcaaggacgtcgtccttgacagcgccgttggcgtcgaacagctcttccggcttgtaggactcgagccagttcttgaggacctcgaagtgggcctcggtgtcgcgggcggaagccagcggcacctggtgagcgcgccaggagccctcggtcttcttgccgtcgatgtacttcgggcaggtccagcccttcggggtgcggaagatcagcatcgggtagaacggacagtgcacgttgtcggtctgagcggcggccttgatgtcgcagatctcgtcccagatggtctcccacagctcggcgaagcgacggtggatggacatgtggtcctcatcatcgaagccagcgacgaactcgtagggctcgtaacccatgccgtggaagaactcgtggagctcttcgtcggagatgcgggacaggatggtcgggttggcgatcttgtagccgttgaggtgcaggatcggcagcacgataccgtcggtgcgcgggttcacgagcttgttggactgccaaccggtagccagcgggccggtctcggcctcgccgtcgccgacgatggccgggacgaacaggctcgggttgtccatgatggcgccgtaagcgtgggacagagcgtaacccagctcaccaccctcgtggatggagcccggggtctccggagcgaagtgggacggaataccgcccgggtaagagaactgacggaagaacttctgcagaccagcttcgtccttggtgatcttcgggaaggtctcagtgtaggtgccgtccaggtaggactgggaggtaccggccgggccaccgtggcccgggcccatgatgatcacggtgttctggccgtggtcagcaatgaaacggttgatgtggccgatgaggaagttcaggccaggggtagtgccccagtggcccaccagacggtgcttcacatcttcgcgggtgaagggctccttcatcagcgggttggaacgcagataaatctggccgatggaaaggtagttggcaacgcgccagtacttgtcaacgtcttcgagggcttcctcggaaaccggagcgttgagcttcttccaaggggtgccaataacaggactcgtcatgtgtactcctgtactcctgcacgtgatcgtgcgattgattatttctgttcggtcacggttcctgacccttgcggtgccaaggttttccgttcccaatcaatcgtcatggtacgaggacaacgcgacttttgaacgatttcttgcgggtgtgttcgaaattgttgcggaaatttcagtatttgtgcggttcacctgaccgtttgtcaacattagttttttcaacatactttttcagaacggcggaagcatgcggaaatctagcatctggctagaacagcgcacgttcgatttcccatgttcgaaatcggcgtgttgtccgactacaggcatgtagtttgttcgatttgcgcacatagtccctgcgtgtcggccttgtcgccttgaccagtgataatcaggggtgttcagcccacgtaaaattccaatgaacgttaggggaatatcaatggcaaacggtcctgtgcttgtcgtcgacttcggcgcccagtacgcccagctcatcgcccgccgcgtgcgcgaagcaggcgtgtactccgagctggtccctcattccatgccggtcgacgagatcctggccaaggatccgaaggcgattattctgtccggcggcccggcctccgtgttcgagcccggcgcgccgaccatagatactaaggtattcgaatccggtgttccggtgcttggtatctgctacggcttccaggtcatggcctatgagctcggcggcaaggtggataaggccgctctcggcgaatacggcaagacctcagccaccatcgacgacgccgacggcatcctcgccgactcccccgccgagcagaccacgtggatgagccacggtgtggcggtcgaacaggccccggccggcttcgaagtgctggcccacaccgaaggcgcgcccgtggccgccatggcggacgaatcccgcaagctctacggtgtgcagtggcacccggaagtcaagcactccccgcttggccagaagcttatcgaaaacttcctgcaccgttgcgccgcgctgcccaacgactgggacgcctcctcgattatcgaggatcaagtcaagaagatccgcgagaaggtcggcgacgccgaggtgatctgcggcctgtccggcggcgtggactccgccgtggccgccgctctggtgcacaaggccatcggtgaccagctcacctgcgtgttcgtggaccacggcctgctgcgcaagggcgaggtcgagcaggtcaagcacgacttcgttgccgccaccggcatcaagctcatcaccgtggacgcggccgacgacttccttgaggccctgaagggagtctccgagccggagcgcaagcgcaagatcatcggtgagaagttcatccgcacgttcgagaaggcccagcgccaagtgcttgaagaggccggcgcgcgcggcaaggaagtcaagttcctcgtgcagggcaccctctaccccgacgtcgtcgaatccggcggcggcgacggtgccgccaacatcaagtctcaccacaacgtcggcggcctgcccaaggacatcaagttccagctcatcgaaccgctgcgcactctgttcaaggatgaggtgcgcgccatcggcaccgagctcggtctgcccgacgaaatcgtctggcgtcagcctttcccgggcccgggtctgggcatccgcatcatcggcgagatcaccaaggagcgcctcgacctgctgcgcgaggccgacgccatcgcccgcgaggagctctccaaggccggtctcgaccgtgacatctggcagtgcccggtcgtgctgctcgccgacgttcactcggtgggcgtccagggcgacgagcgcacctacggctcccccatcgtgctgcgtccggtgagctcggaggacgccatgaccgccgactggtctcgcgtgccctacgacgtgctcgccacgatctccacgcgcatcaccaacgaatgccgacagatcaaccgcgtcgttctcgactgcacgtccaagccgccggccacaattgaatgggagtaattgctctctgtgacgaatgggattctccatcggggaatcccatttttgttgccgacgatgcccggtataattttttcgcttacgacgtcggccggaaagggatgccgacctctttgcgccagggattcgacaacgaaaaatacatcgaactgcaagccgccaacatctcaacagcgtgaaccgacgcttgcactcggatgaaacgctgattgcattgtcaatcaccagcgccaccagtcctgtggccgctcgcgtcatcgacgggctcaaacagttgcagggctgcgacgcctttttctccgttatcatctcatccacggacgaggcgttgtatcgcaaactcggcatcaacgtgtgctgcgaaccgaagtacgaacgggtgagtctgtatcaccggtaaacgccaccgataagcgcggtatgccgcgaatcgtcaagccggtaatcatgcagcatgcggcctgacgattcgctgctgtcgcattgtctctcccctcgaccatgctgggcttgttttccgtttgttggagagaacgggggatgccatcagcactacggtgagagaaggattatccgtgaatcggttcgtgggtctagacggtattaagggactggcgctgatagccattgtgctgtaccactgcatgcagcaactgctgccaggcggattctacggagtcgacgtgttcttcaccgtctctggattcctgattgccgtcagtttgattcgttctctggcgaaaaccggatcgctgaatctcgtgcgatatatccccaagcgtgcagtacgtctctatccggcgctgtttctgctgattccggtcaccgtctccgtcggctggctgctcgatcacgacattctggtttccatccgcgatcaggtcatcaccgtgctgctgggctgctacaactggtacgccattgccggaggccaaagctatttcgaccaaatgaacccgcaggtgtttcgccatctgtggttcattggcgtgctcatgcagttctacgtcatcgtgccgttcatcgtctggctgatgtggaagctccgccagacgaaactgccctcactcatcccactgggactcgcggcgttcagcagtatcgccatgtgggtgatgtacgtgcccaagggcgaccccacccgcgtctacttcggcaccgatacccacagcatgggcctgatgctgggtgtggctctcgcctggtgggtcaccgctcctcagttgggccacgctcgtcagggagctgtgccgatgccccgcaccattagatcgagcgcttcggccgccacgtaccgggctccgttacctcagattcctgtaaagcatcgcatctggaatgcgacggcaccggtattggcattcctcagcctgattgccttggtcaccatgacggttatcggcaaacaggatgcattcgccttccgcggcggcatcatattgtccagcctgttgtccgtgctgctgattgccggtaccatctccgacgattcctggatgcaaagcctcatggtgttcaagccattggccgccctcggcaagtattcgtacggcatttacctgtggcactggccgttgtggattctttccagcgcccttgccccgaagatcttcaaggcagcagggccttggcctctcatcatgaccgcgttgctcaccgccattgcggtgatgatttcctggctgatggtggagaaaccggcggcaatgcactcggtgatatccgtcgtggtgccccttcgcacgaacaagaagaatcatgcggcccgggttattgccgttgacgttatcctggcgctgtcgttggtcggctgcgcgcagggcattactcatgcacctgcgaaaaccgccatgcagatccagctggagcaacaggccgcacaactggaacgcatacagaaaaccgaacacgtgctgctgcgccatgccgtgccggcaccgcccaagcccaagcatgagatgcccaccggcgatcagattaccgccataggcgattcggtgatgctggcctcatcacagggcctttcggaagtcttccccggcattcagaccgacgcgagcgtttcccgctccatcatggtcgcccccgaactcatcggcaatgatctgtccgccggcagtctgcggcaatgggtgctgatcggccttggcaccaattcggcaatcacccctgatcagctggaccagattcgtaatatgatcggccccgaccgcgtgctggtactggtcaatgcccacggagaccgtacgtggattccacctaccaaccaggtgcttgccgactatgcggccgcacatccggacaatgtggtgctggtggattggaatgccacagccaacgcgaacgcgcaggtgctcggctccgacggcatccacccgagcatggatagcgatatctatgcaaaggcggtcaaacaggccatcgaacaatggatcgcaagcggcaggtgaacggcaggcaacgctgagttgtccaaccggtcgtgaagaacggctatgctgaagactgcatcaacgagaccacacgttgggagacatggtgagcgcaatccttgaagggaagcccgataagaatcttattctcgttacgggaaggattcatccgaaattggctgaggatgtcgccgagcagctcggcatcgacgtccttgaaaccaccgcatacgatttcgccaacggcgagatgtacgtgcgctacaccgaatcggtgcgtggcgccgatgtgttcgtgctgcaaagccactacaaacccatcaacaaggcgatcatggagcagctcatcatgatcgacgcattgaagcgcgcctcggcccgttccattactgcggtctgcccgttgctcggctactcccgtcaggacaagaagcaccgcggccgcgagcccatctcctgccgtctggtgttcgacctgctgaagaccgccggtgccgaccgcatcatgtcggtcgatctgcatgccgcgcagtcccaaggcttcttcgacggcccggtcgatcatctggtggccatgccggtgctggtcgactacatccgtgatcgtttccaaggccatctcgacaacgtcgccgtcgtctcccccgacgccggccgcattcgcgtggccgagcagtgggcgcagcgtctcggcggcggtccgctcgctttcgtgcacaagactcgcgacatcacccgcccgaaccaggcggtcgccaaccgtgtggtcggcgacgtcgccggcaaggactgcgtgcttgtcgatgacctgatcgacaccgccggtaccatcgcgggcgcatgccacgtgctgcaggacgcgggagccaagtcggtgaccgtggtcgccacgcatggcgtgctctccggcccggccatcgagcggctcaagaactgcggtgcgcgcgaggtcgtgctgaccgacaccgtgccgattcccgaggaaaagcgctgggatggcttgaccgtcctgtcgatcgccccgctgctggccagcgccatccgcgccgtattcgaggacggctcggtcgccgaactgttcgacacctaccccgagcaccacggtcaaggcttcctgttcgcctgatcacgtgcgtgtttgttcaaggaaagcacatgatgcgagacgcgacatggcgtagtctttcggtaaataccgacagtatggtataaatgaacacttgtgggccgaaagcccacgactcccccatggtgtaatggcagcacacgggtctttggaaccctttgtcttggttcgagtccaggtgggggaacggctgacggccgctcgacatccgggcggccgtctattgttttgaggtgtttccaccctcaatagacattccgatcgaagggaatacgtcagttatggcattatccgcagccatcgtcctcgccgccggcgagggtacccgcatgcgttccaacaagccgaaggtgctgcatacttttgcaggcaagaccttcctgaacagggtcatggattcggtgaccgccctgaaccccgacacgctggccgtggtcgtgcacttccaggccgagcgcgtcgccgaagccgcccgctcctatgacgagcaggtcaccatcgtgaaccaggacgacattcccggtaccggtcgcgccgtgcagtgtgcaatggcacagctcaccgaggctggcaaggtcgatggcccggtgctgatcgccgcctccgacatgccgctgctcgacagcgagacgctgcaccgcctggtcgaattccacaccgcctccggcaacggcgccaccgtgctcaccaccatcctcgatgacccgaccggctacggccgcatcatccgcgatcgcgaaggcaacgtgctgcgcatcgtcgagcagaaggacgccaaccgcagcgaactcgccgtgcaggaagtgaacacctcggtctacgtgttcgaggcttccgtgcttaccgaggcaatcgccggactgaagtcgaacaacgcgcagggtgagttctatctgaccgacgcgctggaaaccgccaaggccgctggcaaggtcggcgcgttcgccgctccggatccgctcaccgtcgaaggcgtgaacgaccgcgtgcagctggccgcgctgtccaagacctacaaccgccgcgtctgcgagcgctggatgcgcgacggcgtgaccattcttgacccggaaaccacttggatcgaggacgatgtccagatcggccgcgacgccaccatcctgcccggttccttcctgcaaggccacacggtggtcggcgaggacgccatcgtcggcccgtacaccaccctcattgacgcaaccgtggacgaaggtgccgtggtcgagcgttcccgcgtgcaggaatcgcacatcggcgcacgcacgaacatcggcccgtggacctacctgcgcccgggcaacgagttcggcgaggatgccaaggccggcgcgttcgtcgaaatgaagaaggcgcacatcggcaacggcaccaaggtgccgcacctgagctacgtgggcgacgcccagctcggcgaccacaccaacatcggcggcggcaccatcaccgccaactatgacggtgtgcacaagaatcgcaccaccatcggctccggctgccatgtgggcgccggcaacctgttcgtggccccggtcgaggtcggcgacaacgtgaccaccggtgccggctccgtggtgcgccacgccgtgccgagcgacacgatggtctactccgagaacacgcagcacaacgtcgagggctggaagcccgcctgggagcgctgaaccatgcccgcacttcaggattccatcaacgccgtccgcgtggccgccgaggccgcagaccgtatcaaggccaccgacatcgtggccttcgacgtagccgacctgctcggcatcaccgacatcatgatgatcgccggcgcctccaacgagcgtcaggtactggccgtggccgaggaaatcgaaaaggacctgttccttaagtgctccggccgtcagccgcgctctcgcgagggcctgaccgagggccagtgggtgctgcttgactacggtgatttcgtgattcatgtcatgcacgaggaatcgcgcgaattctacgggctcgaacgactctggcgcgactgcccggccatcgatcttgaactcgcacacccggaaacggcggagcatgcggacgctgctgccgtcaccaccgcgtaacgtgcgaatcacataacgctgatattcgctgatactcgctgatactcgtgtgtcgggctgcctgttgccgaacgtcattgacggcaccaggcagccctcccttttccctgtttcctcactggaatcgaaaggatcgtcactatggccaatcatgttcgttccattttccttatccgtcatggacgcacttcctataacgccgctcacaagctccaaggccaggtcgacattccgctggacgccgtgggtgaatggcaggtcaagcagaccgccgcggccttgaaaagcctgtacgtcgatcgtcggccggaaatcaaccaccggttcattgtctgctccgatttgaagcgtgcgcacgccaccgcgcaggctttcgccgacgtattgggtggaatcgagcccgtcgatgatcatcgcgtccgtgaacgcagcttcggcgactgggatggccatgccgtggctgaactggccgaacgctaccctgaggacttccgttcctggatggagtctcggggcggtgaactgaagtatggtgccgaacccaaggaagccgtagtcaaacgcggtgtggaggctcttgaggactggtccacgcgtgccggagacgacacggacctgttcgtgttctcgcacggcgcatggatcgcgcagacattgcagaccctgttgggcatttccgcgatcgatccgaccttctccacggtggtctcattgcgcaatgcgcactgggtgcgcttggtgccgatggacaatcccgatggcactgtgcgctggcgtctgctggactacaatcacggtccggccatcgccgacaccgacgaatgggaacgcgaacgctgatcatgttcccgactcccctgctaatccaataggtccggtgcattcggaaccgttcaagcaataactgaatgactcaatgcctgaataatggcggaaacaagccaaaaagtgtcaccaaatcacacttttgtcatttggcgacacgccggcttttgccagaatcgacatctcgtcgtaatgtatacgaggtccgaacaacgggccaacaattgaaaacggggctatagcgcagctggtagcgcatctccatggcatggagagggtcgggggttcgaatccccctagctccacgacgaagccatcaaatcgggtgatatggtggtttctccgctggttcgtggcgggtcttgtgactcccatgaatcagatagcttcactcggggctatagcgcagctggtagcgcatctccatggcatggagagggtcgggggttcgaatccccctagctccacaatcaaggccggtgcttcacacaccggcctttttcgttttctatcctatcgggcgacttttgcgcaccattcccgggaatgcgtcgcaaaacagggactggaatgcatgcagtgcgatactttccccggaaagtatcgccaaggggacgctcttccgattggcgcgacaccggcgtgagagataacagtaatcgccactacaatgaggtgtggtccctatcgtgttgatcatcaaaggagacaaaaacatcgtgaccgtcacccgtgtatatatcgccagccctgaaggcgccaatggccgcaacgtcgtcgcttacggcgtgctcaacgcattgacttccaagtacaagaccatggtgttccgccctgctgtgtccaaccatgacgaattcaccccgatcctgctcgccgcctccaatgcgggactcggcgtggccctgtccaccggcctcgacgtgcataaggtgcgcgccgacaaggacaccgcccgcggagacatcgtcggcgagttcaactacgccatggaggtctcccgcgcgaacgccgccctgatcgtcggcaccgacaaatcccacgtcaacgacccgaccacctacgagttcaacgcggacgtcgccgccgatctgaaggccggggtgttcctggccgtgtgcaccatggaccgatggccgcacgagctcgacgagaccgtcaagctgtccatcgagggcatgcgcgccgcgggcaatacggtgctcggcatcttcgtgaccggctgcgagccgcgccacgccttctccgtcaaggagaccctcgccaaatacggcctgccggtctggaccctgccgcaggtgcccttcaccgacgaatccaccaaggatctggcccttgagaccttccgcaagcacgctcccatcgacgaggtgctcgccgcgctcgacgtggacgtcaccgcgccggtcacgccgtacgccttccaattcgacctgctcggcaaggccaagagcaacaagaagaccatcgtgctgcccgaaggcgaggaggaccgcatcatcaaggcggccgactacctgcttgagcgcgagatcgtgaacctcatcatcgtgggcgacaaggacgccatcctggcccgcggcagggaactggggctgaacagtctggggcgcgcccgcttccaggccatggacgacgagaacgtgttgaagcccatggtcgccaagctgtgcgagttgcgtgccaagaagggcatgaccgaggagcaggcccgcaagcaactgaccgacgccagctacttcggcaccatgctggtggtgctcggctatgccgacggcctggtttcgggttccgtgcattccaccgccaacaccgtgcgccccgccctgcaggtcatcaagaccaagccgggccagaaactggtctcgggcgcgttcctcatgtgcttcaaggaccatgtggccgtgttcgccgactgcgccatcaacctcaacccggacgccgagcagctttccgagatcgcgctgcagtccgccgagaccgcccgcgccttcggcatcgacccgaaggtcggtatgctctcctactccaccctcggctccggcaagggcccggacgtggacgtggtcgaggaagccaccaagctgctcaaggagaaggctccggatctgccggtggtcggttccatccagttcgacgccgcctggtcccccaccgtggccgccaccaaggccaagggcaacgatgtggccggacacgtcaacgtgttcgtcttcccggacctgtgcgccggcaacatcggctacaaagccgtgcagcgctcctccggcgccttggccatcggcccggtgctgcagggtctcaacaggccggtaaacgacctgtcccgtggtgcgatggtgcaggacatcatcaacaccatcgccctcaccgccatcgaagcgcagtgagcccggcttgactcccgccagcgggagccactgtaatgcttattttgtagcaagcaacgagtaatctaatcaacggtaacccgtgtctcacgggaacattcaatcacaatggaggatgcccacaatggcgaaaaccgtccttgtcatcaattccggctccagctcgatcaagtaccagctggttgatctcgaatccggcgaaggcctcgcttccggcctcgtcgagaagatcggtgaaccggtcgacggccactacaagcacgagtacaacggcgaaaagcacgagcttgaagagccgattcacgaccacgagcagggtctgaagcgcgtgctcggtttcttcgaggagtacggcccgaacctgtctgaggctggcattgtcgccgtcggccaccgtgtggtgcagggcggctccatcttcccgaagccggccctcgtgaccaacaagaccatcaaccaggtcaaggatctggctgtgctcgccccgctgcacaacggcccggaggccaagggtgccgaagtcatgcgctccctgctgccggacgttccgcagatcttcgtcttcgattcctccttcttcttccagctgccgaaggccgccagcacctacgcgctgaacaaggaaatcgccgatcagtaccacatccgccgctacggcgcccacggcacctcccacgagtacatctcctccgtggtgccggacgtcatcggcaagccggctgaaggcctgaagcagatcgttctgcacatcggcaacggcgcttccgcttccgctgaggtctccggcaagccggttgagacctccatgggtctgaccccgcttgagggcctgatgatgggtggccgtaccggtgacatcgacccggctgtggtcttccacctgatccgcaacgcccacatgaacgtggacgagctcgatgccctgttcaacaagcgttccggcatgatgggcatgaccggctacggcgatctgcgtgaggttcaccgtctggtgtccgaaggcaacgaggacgccaagctggctctggatgtctacgtgcaccgcatcgtcagctacatcggcaactacacctaccagatgggtggctgcgacgtgatcaccttcaccgctggtgtgggcgagaacgacgacgtggtccgcaagatggtgtgcgacaagctcgctccgttcggtgtcaagctggacgaggagaagaacgccacccgctccaaggaaccgcgcatcatctccactccggactcctccgtgatcatcgccgtgatcccgacgaacgaagaactggccatcgcccgcaagtccgccgcaatcgccgaggctggcaccgatacctacggcaacaccttcgccaagtaagtaaccgccgttaggcatctcactaatctctagttgcaacactatgggggctgattccgattggaatcagcccccattcgtatatggtcatgagaccactacccctgcgtcatactcccctcagtcgcctccggcggacagctcccctcagagaggggatccaggccctataacttggctcccttctctgaggggagctgtccgcgtagcggactgaggggagttccaccagaacacaggaccccttactgcctcagcatgccactccacataccgacgaaatcaggcaaggtcttgcgcgtggtggccacgttgatgacctcgatatcgggaatacgcagccccagcatcgcggcgaacgtggccatacggtgatcagcataggtttccatcacggcaccgtgcaacgtctccgccggcaccggttcgatacgcaatccatcaggcaattcctcagccgctcccccaacacgacgaatctcgttgaccaatgcctccagacgattcgtttcgtggccgcgcaggtgaccaataccaaccatgtctgtcgacttatcagcaaccaccagaatcgccgccaacgagggcgcaatctccccggccgccgtcaaatcgaacgtacccagcccacgcacggtgccgtcaccggtcacctcgcaatagcgcacgccgccgatggtcgggaacgatacttcggcacccatctgctccagatatccgggcaacaggccgcccggctgggtggtggtttcaggccaatgaggcacccggaccgtgccgccggcgatcaatgccgcgccgaggaatggcgccgcgttcgacagatcgggctcaacggtcaccttgctcggcagttgcattgcgcgcggtccaaccgtccatgtgcgggcggattcgtcgtcctcaaccgcaccgccggcaccggtcacatcggccacggtcatgcgaatgtgcggcaggctcggggtcttctcccccgtgtgcgcgaggtgcagaccgccaggcagtttggaactaatcagcaacaggccggagatgaactgggaagaaccggacgaatcgatgctgacctgcgcctgggcagccggcaaggttgcaggcggcgtaatagtgaacggcagacggccaacctcgccgtggtaatcaaccgttgcacccagctgttccaaaccgtcaagcaccggcttcatcggacgtgcataagcctgttcgtcgccatcaaaattcactgggccatctgcaaacagggcaaggccgggcacgaaacgcatcaccgtgccggccagtccgcagaacacattgacgttgccatggaatcggccggatacaggaggagtaaccgttacggtggtgtcggttgcggaatccacgtcgcagcggacaccgagggcttcgagtgcgcccatcataaggtccgtgtcgcgcgaacgcagcaggccaatcagagtaacgggcttgctgccgagggcggcgagaatcaggtagcggttggatagggacttgctgcccggcaccgttaccgtagcgttcaacggctgtgcggcgagcggggcaggccagagattcgtgagtcgttcagtcataaggccaaatctatcaaacaaattattcaccggtcggcagcgatgcgggattcgatctgctgatcaggtgcggaagacggctgctcaaaaccgccttcgatggcctgcgcgtgcaacaactgagcggccgcgcgatcggcctcgatggcggcgatctggcgcgagaacacgatgaaccagccgaggaacgccagaccagccaacgcctccacattggtgagggtgttgtgacccatcatcatattgacccagaatgcagcgcatacgagcgcggtcaggtcggaggccaccatcactgctttggacaggcgtggcgcaagccacggcaggagcacgaacagcagcagcatgacgaacggcaggcctttggcgcatatattgtgcaagagattgtgtggcgtgtaccgaaacacgccgatgccgatgaatgccaggccggccaccatcagcaggaaggacagaatggagatgcgcagcatgaaatgtgggatttcgtagccgcgattcggatctctgttggtgcggtcgtgccagaggcgctgtagccgttcggtggtcaccagttcggagatggcgaagtagctgacgatgatgatgcatgtgccggcaagaatcagcgtggagttgaacatacgggccgcaaacgtggttctgtcgccgagctgcgaaaagttgttgtgataccagtatgggtcgtcggtggtcatgccggcggtgaccacgccggagatgacgaagaacggcaacagactggcaatagttttggcgttcatcatctccgcctgtacaaaggtcatgtaccccaccacgccggcgaaggcggcgcagacgctggagatatagccggagaagatggcattgcccatcatgtcgttggccgcaccgatgagtgcaaaagacgacaggaaaatggtcgaggcatacactaccgaaagggcgacgatttcgaaaatgcgacgaatcggtgcaaaccaaccatgtttgaggttcaatgaacgtgatttgcgcgcatagccaataatgaaggaaatgacgccgcatgccgccacgatgcccgaacataccatgaatcggcgttgcgtcagctgccagatggccggcgcgtattccatgtacaggttcatcgataccgcgccaacgatggcgcaaatcaagaaggagatgagtccggaggtttctgcacgctgatgacgtcccatgccgggcctcccctatctattcgatgccgcgttatctttcaacaacaaacaaaactccccccgaggacaacgctttactagcaagccagcgggatttggctgtcgccattctactgaaaatctgaaacactacaaaaaaaaacgattatgtacgggcttcttagcctttgcgactatcgttaccgccttgccgagtaccgttgttcatgcagaaagaaagcagtattggacacaatcgaatgagcgtgtcggtatcgttgaaaaagtaatgaatgacggttctatcggttcaacctttaagggacgaaccagccgcggcaccatggcgctgatgcatgactatgccgagctcatcaatgaattacgtccgacagcagagcaattcaccgagatcgagcaataccgggtcaaacgaattcaggcgttcttcaccagcaaaccattcaagctggagtccgacaactcgctttccgttgatgcggccgtggaacatctgctgcggcagacagcgcagcggcgaagggagaatccgggcaccatgtacgtcggcaccgtcctgcagcatctcgtcgcggcaaagctcaccatcgttgctccggaagtggaaatcaacggcgcgtccgttgctgatgatccgagtccgcggcttccaacggtgaggccgcggaccgtctcacaaaaccgtccgtggctccgccctcctgtttcgtcgcaactgactacaccgacgggttcgggcgcttcgtcacgaaaacgccattacgatgcaccgtatacgcgccgccgtcactgccccgttccgcccggaacaggacgatcggctcccctgcgatgtcgcgcagttcgacatccgatctgccacgtgtcagatagaagtcgaatatggcgtcgtcggattgacgcacggtgtgcagaacgtcagaggtcacgccgctggcgggcgaccgcaggttggcttccggctgccggccatcctgcggctgcgcggcaagccagcctcccacgaatcgcgtcagatcgctcacgcccagatcgcagccgaggaaatacgcctccccttcgccgtacgtgttgcgggtgatcgcggccatgccgtcaagctcccactcatccgcttcttcgccggcatacgaggcaagcacctgcacatgcggtccggcgacggtcacgtcaccgagcttgtcgatgacgcgatcgagccagtcgaaatcccaatggtcttcgatgggctggaggcgatctcagctgaagatggcaagggccacggtgttgacgccggcctggcccatcaggcggatgtcgtcatcccagatttcctccggccattggtcgggactatagtcgccaccgaaagcgatgccgcgtccgtccgcggtcagcagttttggccatgcgaagtcacgtcatgcacgcacggttatctcctttggcaggcggcgcagggccacggccca

SEQ ID NO: 3218 - DNA, 9222 bp, Unknown
  R53_2m  MAG No. k141_5023
tgatcgtgagtggggcgtgatcggaccagcgtttgtcatacgtgggagccttgtcgatgacgaatccgcgtgcggtctccgccaactcgggcgtggcgaactggtagtcgattctccagccgacattgttgtcgaaagcgcgccctcgctggctccaccaggtgtatggcccctgaatgtcgccggccaacgaacgcatcacatccacgaactcgtattcgtccagccatttgtccacgtaggcacgttcttcgggcaggaatccggcgtgcttctcattggccttggcgttcttgatatcgagcggcgtgtgtgcgatgttgaaatcgccgcataatacagcctgcttgccgccatgtgcggcttcatcacgaagcgcgcccatgcgggccagcatagtgtccagaaaacggtacttctgttccattttggtcggatcatcggtgttgccggcatgtatgtacacggatgccacggtgatcgtatagccctcaggcgttttgagatcggtttcgatccaacgccccgaatccacatcctcgctcagacctggcagaccatatcgcttgtcaagcacttccaagtcggtgagcagcccgactcccgcgcggcctttcacccggcagacctcgttcatggcatggaggttggccggtgcctcgattttgccggcggtggcgtattcgaaaccaaattcatcgaaaatagaatcgacatcgtcctgaggcgcgcgaacctcctgtatgcaccagacatccggcgcatgcttgccggcccaatcctcgatgcccttgcgcttggccgcacgaatgccgttgacgttagacgtggtaatggtgatggtcatgcggccatactattttggcctccctacgaatcgaaccggacatcggcggccgcgatgctcagctttctctaagcctgagtgctagtgttagcaaggttgcaaccgttatacgaaacgaggaatcatgggactgttcggattcggcaagaagaagagcaagaaggaagccgagccggccattgagcctgtcgatgaggacaaggtggccgccgcagaagcgaacgctgccgcaaaggccgagagcgcggagaccgtgctcgccgagccggccagcgaataccagggccgcggcgaagagcgaggcccgtgggatgtcaacgatgaggacgtgcccgattatgacgattatctggatctcggcgcctactatctgcccttcctccagggcatccagctgcgcatcaaggccaaccgcgccacccagcaagtgcttggctccaccatcaccttcggctcctccagcctggagatcgaagcctttgccgcacccaagaccctgggactgtgggatgacgttcgcggtgacctgcttgaagccaacaaggccgcttctgaagtggacggtgtgttcggcaccgaactgaagctgccggtcaatgtcaagggcggcaaaaccgtgaacacgcgcatcgttggtgtggacggcccgcgctggatgctgcgtggcatcttctccggcaaggctgctatcgatccggacagcccggagaccgaggcgctgaacaagttcttcgccgacatcgtcgtcgagcgtggcgaggagcctttggcgccgcgcgatctgatcccgatgcatccgccggtcgcccccgctgagcgtaaggccgccaaggccgcggccgaagccggcgaggagaacggcaaggaacacttcaaggacattccggacaacaagccgaagggtccgctgagccaggaccagcagaccgaagtgaagaccacgctgtctcgcggcccgatgttctccgaagttcgctgatttataggaagagacttggcagacaacaaacgcaccggcctgtccgctctagccgacgccggcaatgaaggcgaggatttctccgtcatcgacgccatcggtggcccgcgtggcgtcatcgaatccatgctgcctggcgtggtgttcgtcgtactgttcgtggccacgagcaatctgaatctcaccattgcggtttcggccgtgttggcggtattgcaggttattgtgcgactgattcagcgccagtcggtaatgggcgcggtctctggtctggtggcggtaggcatctgcctgatttgggcatggcagactcatgaggcccgcaattactacatcttcggattcattaccaatgctggctatgccgcgttgcttgccgtgtcgctgattgcgcgcgtgcccggactgggtttggtcgtcgaattcatccgtagcctgcccaccgagcatttcaaggcatggttccatgactggatggacgacaaggccctgaaacgcgcctatatgattgtcaccggcctgtgggtcggtctgttcctgctgcggctggtggtgcaggtgccgctgtatctgaccaaccatgtggctgcactcggcgtgacccgcctgctcatgggcattccgttctgggcattggcgatttgggtgagttacctcattattgccacgccgatgcaccggcataaggtcgcggctaggaagatacagactgaagtcgctgttgatgccgaacttgaaccgagcgcaaccggaaaggacgatgatgcaagctgaagttcgtatcgaacgatacgccgaccaaggccgctgcgtggcccatatcgacggtcgtgtggtgttcgtccgcttcgccttgcccgacgaactcgtgcgagtcgaacttgacgagccccacgaccgggacgaccggttctggaccggcgaagtcgtcgaggttctcgagccgtccgaagaccgagtcaccccggcatggccacttgccggtcccttggcgatgggcgggggagtgggcggcgcggatctcgtgcacgtctctttgcccggccagctcaagtggaaggccatcaccgtctccgaacagatgagccgactcggccatatcgacgtggccgttcccatcgagcgcatgcccggcgacaaggcagccggcggcctcaattggcgtacccgcatcgaaatgattgccgacgacaacggcatgccatccatgcgccggcgcggcacacacaaccgcgtggccatcgacaccatgccgcttgccacgcgcacgctgctggacgtcgccaagcgcgaacacgtgtgggaaggcggctttgaacccggctcccagattcgtctttccgtgcccgaaccgcgcggcgagatcgtcgataccgcggcagcaggcgacaattacgccgtacttgtggacggcgaactgcgcgccggctcccagctgctcaccgaacaggtgaccatcaacggcacgaccttcgactatcaggttgacgccaacggtttctggcaagtgcatcgccaagcgccgatcgccctcggtacgcacgtgatcaacctggtcaacgggcagctgcagtcagcggcggacgccgtaatctgggatttgtattccggttccggcctgttcaccctgccgctggccacaatgaccggtgaacgcacccgcatgctcagcgttgaaggcgcgcgtgtggccgtcaagaacgcccagcgcaatctgcgcgccatgaacctgaacgacgtggacgcccgcgcgggtgacgtctcgcgcacgctggaccatgtgccggcgcatctggccaagccgaatgtcgtagtgcttgatccgccgcgtgccggtgctcgtgccaaggtctgccgccagattgccgcggccggcgcatccagcgtggtctacatcgcctgtgatcccaccagcctcgcacgcgacaccgcgacactcatcggcgaaggctacgagctcaaagacatccgtgccttcgatatctacccgatgacccaccatgttgagacggtggccctgtttacccgctgacaggtgagcatatgacacgacgaattctcggattgctggcctgcatggcggctgtgttgtccctggccgcctgcacgccggccggtagggcggtcggcgatacccaagacagcatgccggaagtcgcccacgattccacacatcccacggatgtcacagtcggctttgtggggtcgactgacaccgccgcagacgagtccgccatcaatgcgctgtctgatgacaaactcaatgtctactatgcctcgctcgaaacatccgcaagctcggcaaacgcaactgatggtgtatccggtgaaaccgaatcttctgacgccggcactaccagcgaaaacggtgccgatagtatggatgctcatactggcgtcgacaagaatgcggccaccgcacagcagggtgttgccgatttcgtagctcgcgcggtcaaaatcgtggttatcagcggcatcgacgttaccgacgccaaccgggagagctggaaccagacgttgaccaatgcgcgtgaagccggtattccagtcgctctcattgatccaaagcatgcgcccgaagatgaactgctgtacgccgtcatccttcacctcaacaccaacagtgccgattctggcgacactgccgataccaggccaatgactattactgacgccgtgctcaccatcacgcgcgatgaaccccacgaacgcgagatcaaagtcaccgtttcctgagccgaatcaggcccttgaagctgagaaagcaccctgaatcatccctgagccttagtggattgcgaaacaagacgcggtaggctggggaatatgagtgcaacaacagccgtggaaatgcctgaaatcggagcaaccggtcttacctccaaagaagtggtgcagcgtatcgaaagtggccaatcgaatgcggtgaaaacatccacctcgcgttcggttcaagatatcgtgcgagccaacgtgttcacgctgttcaacggcatcatcttcgccgcgatggtactggtgctgatcaccggttcctggagggacgcggtgttcggtttcgtcatcatcatcaacacgggcatcggcatcgtcaccgaactcagggccaagcgcacgttggataagctttccatccttgtggcctccgaattcctcgtgcatcgtgacggcagggacgtggaggtgccccacaacgagatcgtgctcgacgacctgctgtggatccgtgccggcgaacaggtgccggccgacgggcagatcatccagacctggggactggaactcgacgaatccatgctcaccggcgaatctcgtaccgtgcgccacaaggtgggggagcaggtgtattccggtgccaccgcggtctccggcatggcattggtcaaggtcaatgcggtcggcagccattcctacgccgccacgctcaccgcgcaggccaaggtatacaagaaaaccgtgtccgacctgaacaagggcatcaacacgattctgaaattcatgaccttcctcgtggtaccgctgtgtattctgctgattctttcgcagattcatacggtcggcggttggggcacggcactctccaccggcgaatggcggcaagccgtggtttccgcggtcgccggcgtagtaggcatgattcccgaaggcttggtgctgctgacttcgctgaacttcgcggtggccgccatgcgtctcgcccgtcacaatacgctggtgcaggagcttgaatccgtggagacactggctcgcgtggacgcgctgaacctcgataaaaccggcacgatcaccgatggcggtatcgccttcaaccggctcgtgatgctcgattccgccaatgcggctgcggaacaggcagccacgcaggccctctacgactgctgcaacgaagagcagcccaacggcaccggccaagccgtactcgccgggctcaaggcccaaggatatggggcaggtgcggttgagtctcgtgtcccgttctcttcggcgcgcaaatggagtgcggtgcgtaaatccggcgagacctggtacatgggagcgccggaggtgattatttctgcgcttgagggtgactattcgtcggtgttgcagcaggttaacgagtatgccaatgacggcaaccgtgtgttgctggttgcgcggtctacagctcccctcagtccgcgaagcggactgagggacgcagttgagggatccaatgtctcggacgacccgcaactggatgtgcaggctgagccggtggcgttggtgttgtgctctgagaagattcgcgaggacgccgagcggacgctcgcttggttccgtgagcagggtgtgcgctgtcgtgtgatttccggtgacaatccagtgaccgtgggtgccatcgcccgcagggtcaaactcaccggcgaccatgagccggtggcgatggacgcgcgcgaactgcccgaggacgtgaacgaactggcccgcgtgctcgaaaacgtcgatgtgctcggccgcgtgctgcctgaccagaagaaggccatcgtgcaggcgttgcacacgcagaaccacgtggtggccatgaccggcgatggcgtcaacgacgcgctcgccatcaaggaggcggacctcggcatcgccatgggcaacgcggcacccgccaccaaagccgtggcccaggtggtgctggtggattccaagttctcgcacctgccggacgtcgtggcgcggggccgtcaggtcatggccaatatggagcgcgtggccagcctgttcctcgtcaaaaccgtgtactcagcgctgatctcgctcggcgtagtgctgacgcaaatcccatacccatacctgccgcgccatatcacgtatatcggcgcccttaccatcggcatgcccgcgttcattctggcgctcgcgccgaacacgcgccgctatattccgggattcctcaagcgcgtggtcacgttcgcgctgccgggcggcatcgccactgcgctgtcggtgctgctggccgcttgggtgctgccgccggtcatgggctggaacgtgaccggcgatgccgcggacctgtccgccctgcgcgccaccagcgccatcatcctgttcgcgatgggcgtgttcgtgctggcccgcgtggccagaccactcaacggttggcgtggcgtgctggtggcggtgttcgcggcggcgggcgtgatcggcgcgttcgtcccgttcgtggcgaacttcttcgccctgattctgccgaccggcgccacgatggtggccacgctgatcgcgttggccggttccgcgctgatcttcgcgctgtgcctgtggctggcgccgttcgtgcgcggactgacgggcaagctctcgcgtcggcattgagacggcggcgcgattgtctcatacttcaagccgacacgccagagcctcggtaacgtgcccgtaccatgtgtagcggataatcagcggcatcataagccgattcatgatttcggaggaagcatgtccttacgcgacgaccagctggctaccctcaaggtagccggcaaggacttcgattactacaacatcgccaatctcgacggcatcgatcatctgccgtactcgctgaaggtactggtcgagaatctggtgcgcaacatcgacggtgccaacatcaccgacgagcacgtcaagaccctgctcgactgggatccgaacgccgaacccagccacgaaatccagttcacgccgtcccgcgtgatcatgcaggacttcaccggcgtgccctgcatcgtggacctcgccaccatgcgtgacgcggtcaaggacctcggcggcgacccggaggtcatcaacccgcaggtccagtccgatatggtcatcgaccactccgtgcagatcgacaagtacggcatcgccgacgcggtccagcaaaacatggacatcgagtaccagcgcaacggcgaacgctaccagttcctgcgctggggtcagcatgcattcaagaacttccgcgtggtgccgccgggaaccggcattatccaccaggtcaacatcgaatacttggccaaggtggtcatgagcaaggccgaggccaacggcaacacgctcgcctacctcgactcctgcgtgggcaccgactcgcacaccaccaccgaaaatggtctgggcgtgctcggctggggcgtcggcggcattgaagccgaggccgccatgctcggccagccgatctccatgctcgtgccgcgcgtggtcggcttcaagctcaccggctccatcccggagggcgttaccgccaccgatgtggtcctgaccatcaccgacatgctccgcaagcacggcgtggtcggtaagttcgtggaattctacggcgaaggcatcgcctccgtgccgctggccaaccgcgccaccatcggcaacatgggccccgagttcggctccacctgcggcatcttcccgattgacaatgtcacgctcgactacctgcgcctgaccggccgctccgaagagcaggtcgccctggtcgaagcctacgccaaggccaacaagctgtggggcgacgcttccgacccggattacgtggaaccgcagtactccgaatacgaggaactcgacctcggtaccgtggtgccgtccatcgctggcccgaagcgcccgcaggaccgcattctgctgtccgaagccaagagcatgttcgagaagaccgcccccgcctacgagaccgagaagaccgtcaaggatccggtggccgtgtccaccgacttccgtggcgatttcgacatcgaaaacggcgacgtggccatcgcctcgatcacctcatgcaccaacacctccaacccgtccgtgatgatcgccgccggcctgatcgcccgcaacgcacatgccaggggccttaagcccaagccctgggtcaagacctcgctggctcccggctcgcaggtcgtggccgactacctcaaggccgcggggctgcaggacgacctcgatgcactcggctaccagcttgtcggcttcggctgcgccacctgcatcggcaactccggcccgctgctgcccgagatttccgaggcgatcaacgccaacgacctgaccgtcaccgccgtgctttccggcaaccgcaacttcgaaggccgcatcagcccggacgtcaagatgaactacctggcctccccgccgctggtcatcgcctacgcgctcgccggcacgatggacttcgacttcgagacccagccgctcggcaccgacgcggacggcaacgacgtgtacttgaaggacatctggcccaccaatgccgaggtcgccgccgtggtcgacggcagcgtgagccgcgagatgttcctcaaggactacgcctccgtgttcgacggcgaccaccgctggaagggcctcgacgtgccggaaggcgagctgttcgcgtggaacgacaagtccacctatgtgcgcaagcagaccttcttcgacggca

SEQ ID NO: 3219 - DNA, 32555 bp, Unknown
  R53_2m  MAG No. k141_5485
acccactgaccggtggtgtggctggagcggtcggagagcaggaatgccgcttcattaccgatctcttcggtggtggtcatacgatgttccagcggaatcttgtcggtgatcaccgacaggcgcgcctgctgggccgcttcatcgccaaaggtcttgatccaatcggcatagagcggggtccagcactcggagacgactatggcgttgacacgcacgctatcgtgcaccaatgcggcggcccattcacgggtcaggcccaggatcgcgcccttggcggccgcataggcgctggtcttgccttggccggtaagcgcggtcttggacgagatgttcacgatggatccgcggctttccttgagatacggcacggccgcgtggaccagctcgtaatagtgagtcaggttgccgtgaagcgattcctcgaactcacgccaagtagtggtctcgagatccttgttgtcgttctttccggcgttattcacaatgccatcgatatggccgtacttcttgtatgttgcttcgacgacgccggcgatcttgtcggtgtcgttgaggtcaagcaagtgcacatcataggtggtggtgtactgctcgatatccttcttgaactcgtcgagagcgctgtcgggtcgattaatcaccaccgggatggccccctcctgggccagttgcagcgtgatgcctttgccgatgcctttgaaaccgccggtgatgatgatgactttgccttcgagatgcagatccatgggaactccttcgtccatccttattctgcgtttcatgggtgttccatgtcacgcccggccggggcttcggcaccccagccggagtagttgtgtgttgttgtgttaagttgtgttgttcggttatgaatttccagttgcggtcagccgcgatacaggtacttctcggccgtctccagcgtcatttcggtaccgttgcccggagcggtcggagcgacgtagttgccgtccttgatctcggtcgggtggacgaaatgttcatgctggttatcgacgtattcgatcatgcggccgtccatcgtgccggacacggccacgtaatcgaacatcgcgaagtgacacacggcctcgcacagacccacgccgccggcgtgcgggcagacgggcttgttgaacttctttgccagcaggtattcgagcacaatctcctgcggaccggccactcgggtggcgtcaatctgcatgatgccgaaggcgttggcctgcaggtactgcttgtacaggatgcggctctgcatctgttcgccggtggcgaccttgatgggattgatggcgcgcgcaatcgtggcgtggccgatcacgtcatccgggctggtcggctcctcgacccacgccagatcgaagtcgtggaacttgttgatccagtcgatggcggtgggaacatcccacacctggttggcgtccacggcgaggcgcacgtcggggccgatggcttcgcgggccttggccaggcgacgcagatcgtcgtcgatgttctggccgaccttgagcttgatctgcttgaatcccttgacctgcgtctcctccttggcgagcgcgaccatcttctcatccgagtagccgagccaaccgggagcggttgaatagccggggtaaccgacctccagcagatgcttgatacgctcggccttgcccttctgaccctctttgagaatcgcaacggcttcctcagggcgcagggcgtcggtcatgtagcggaaatcgagcgtggagaccagctcctccggctccatctcgcccagcagcagccacaacggcttgcccgcacgcttggccttgatatcccacaacgcggagagcaccgcgccgatggccatatgctccacgcccttttcagggccaagccaacgcagctgggaatcatgcacgaacaggtcccatgcaatgcgcatgttgtcgagcagttcctcggtgttgcgcccaatcagcacctgcgacatcgattcgatggccttgcaaaccacgtcgttgccacggccgatggtgaacacgaatcccacacccgtgatgccgtcgtcggcgctggtggaaatctccacgtacgcagaggaataatccggatcggggttcattgcatccgagccggaaagcgtcgttgaagtggggaatcggaagtcatacgtcttgactttggtgatggtactcatgtgttcgggctccttcgccttggtgaaccaacggctatatcgtacgtccgaataaagaaatttgcaagcctatttgcgaaaatttttattcaaggccggacaaagggcaagaaaacacggaattgttacggcacaatgcgtcataatggtgggaacaacgacgaaatcgtctcagtaattgaacggcgaatatccaagagggaagcaccgatggttaacgatacatccacccacaagctcaaggtcggcgagctcgcaaaaatcgccggcgtatccgcatccactgtttccaaagtcatcaatggcaggtcaggcatttccgacgagacgcggagacaagtcgagcaaatcctcaaagatcacggttactcaaggcctctggtcaacaccaaactctcccccaccatagagctcgtcgtcgaatacattgagcacaacggcacgatggaactcatcaaatacgcctcatactgggcgcagcaggcgggcctcgccatcacggtcacccagaccaaccatggcgatgccacggaagactgtttccgcggcatcatcgatagaaatccccaaggtgtgattatgcagcagatgggcggtctgaccactcaagcgaagtctttgttgaaatcgcgcagtattcccgtggtcatcatcgacccaatcgataccgtcgattcggatgtgatgagcgtgtccatcgataactggaccgcaggataccaggccggcaaacacctgctgtcgctcggccatcgacgcatcgccgttatccgggggccggcgaacctacagaccagcatcgcgcgctatagcggattcaccgccgctctgcaacaggccggggtggatctgccggagtcctatatcgaacagggcgactacttccccgccgaaacaagctatgaagcagcctgccggctgctggaactcaccgaccgacccaccgcgattttttgctgcaacgacttatctgcagtaagcacgtatcgtgccgcacgagagcataagatcgcgttgccaaagcaattgtccgtcatggggttcgacgacattttccccgccggccaactcatgccctccctgaccagcgtgcatcagccgttcagcgaaatagcccaacgcgccgtgcagatgatcatcgacagccgcaagggcaatcagggtgatatgcacgtcatcctccccaccagtgtcgtcacccgggaaagtaccgtaccgcctcagtcatcggcccgataatcggccagattcaagctggcggccacccgattggacgcgaacgcacccaccgaaaccagcgcatagcacagcgcaagcccgccgaagaagctggccagcgtggccggttcggtcatcgaagcggcgaacagaggggccataagcagcatggaacagccgccggccacgatcaccacgatgttgagcggggtgagtacctcgatgaatcgcgcacggttcaaggtcttgacatcagtgccctccaacaccagcatgcgatattcgccggcctgatcgtacacgctgccggcctgcatcacaccggagctgaccgcggcaagcacagcggcgaacactagcgtcaggatgccgccggtgccgatgtcgcgaatgaacacggtggacgggtcgttggcgtcaccgaccacggcggccgagccaaagaatccgcagatcgaggtgatgccggcgatgaacacggccagtgcaatgccggacacattgcgccaggcgcgcttcggattgtcgagaatacggcgcatggcaatcatcgtggccgcatccttggggcgcttggccttggccttggcgcgagcggtgaccacccaggagcccacgaggttcaccagcgcgaagcacagcagcatgaaaccgatgatcacgccgtacatcactacttcaccggcctgagccagcaccatcggattcttgaacagaagaacggcaatcaccatgatgacggcgaacaccaccacacgccagccggacggcagcgtagtcgcaacgcgtgaagtgacgccgagtggcgtgatggccacgcgccgaagcgtgaccagcgaagagatcagcgccaacacggtcacgccaacaagcgtaatgatcaaggcaatcggccccacccacagttgctcgaacgtaaacgtctgattctggaaatgcagcaacatgattagggggatcaacacgcagtaccccgcgatgccaatcagcgcccccaccaaggcctgcccagccgcatcaagcgccgtaaggcgaataacttgccccgtggtcgcgcctgccaagcgcagggatgcgagccgagcgtcacgacgggacgcagccaatcgcgcggcggaaccggcaagcgccacgaacggcacaatcagcagcaggcaggcaaagaacgccagcacgacgtatgccgtggcgtattgatccaggctgtggggattggcgatacgctgcttccagatttccgctgttccgggtttgcaagcgtcgagattgattgcgcatccaatggtgtggtcggcggaggcgcgccacatgaacccatgcacgccgcccaaaacggtgagaaagatagtggtggctgcggcaaaagcaatgatggccaacaccgaagtatgacccgcactgccacgcgagccggggcgatggaacaatcgccacaatgcgaaagcgctcatcgtacgcctcccagctggccgtcctgcatggtcacggtgcgcgagcagaacgaagcgacgttggggtcgtgggtgacgacgaccacagcggaaccgttgtcccgcgcggcggctatgagaatgcccatgacctcgcggccggtggcttggtcgagcgcgccggtcggctcgtcggcgaagaccacggcaggtttgacggcgagcgcacgggcgatggcgatgcgctgcatctgtccgccgctcatctcccccggccggtgcgtggcgagcgcgcgcaatcccatgcgttccagccacaggatcgccgtgtcggtggcggtgcggtagggcatgccgtcgagcatcatcggcagggcgatgttttcgaccgccggcagttcgggcagcagctggccggattggaagatgaagccgaaggcgttgcggcgcagtttggtgcgctcggcgtcgctcatgcggttcaggtcggcaccacggaagatgacggtgccggcggtcggcttaatgatgccggcgagtgcgtgcagcaaagtggatttgccggagccggacgggcccatcacggctactgtttcaccctcccggagcgtgaagttcacgtggttcagggcgagcgtgtgcatggtcggcatggcgaagccgggctgggctggctggccggcctgaatggcacccggtccggccgcagcgggattcgccgacgcataaccggctcccgtgccggctggcatcacgccggtgacgccgtgccctgcctgtgcgcgggccatgctggcggtgtagtccatgaccaggtcgtgcgcctcgatgaccggggcccactgctgggtgtgcgatgccggctgctggaactgttggggttgctgagactgctgaggctgagccgccggtcccgacgccggctgaggctgctgcaattgcgatgctgctgtgttcatactcccgagcgtacggagcgaacgcccagccgaccatcgggctgcggtatgaacctttctggatcaccggcccgctcctcatccgcaaggattagagatacgcagtcgacgcgacaatccatatatcagatgttcattgctcgagaagacgaggaacagtggaagaccggttcggaagctggaaccacaacagaccaagcaaaggagcccacatggccatcgcaatcgacatcccgcacacaccaatcgtgtccgtacaaaagtcgtacaacaggagtacgactacagagaataacaagaacagtcgttttgaaatgagactcacctaagagcaacgttccagaatcgaccaagcggccgagtccaaaggcatgacttcgttgcaatgggcattatcgaatctgctcgccgccgcagatcgggacatccatgaagctcatatcattcggctcaacagtaaagcgtggaatgatttcaccgcagcattaaacgaacctatgggcctacgtctgaatgaattgttggagcgtgatcccatatggacgtgaccaacttcactgagcctcggcacctgactgcgagcgaggatatttctggtttcgactgcggcctgccattggtcaatgattggctggtttccacacactaagtgcatacagcattgagcattcggaagctcccggttggctgaggcgaaatagtccgaaccccattcccgtaattttgctaggcatgatgggcgtggtggatatcagatttcaaaccatgcacgtcgacagtcagttactccgagatgcggtatttcattctctgaacgatatgattttcggcatatccctgaatcatctagaatgtttactccgctcaatgtccacaatcaccaatgattaatggctggagaccgctatttgacgccgaccattgtctgaatcgcattcagacacaacactcctcattgcgcgcagaccagcgagttccgccgagtcggcgatgtgtctcttcggcggttgatttaggattttccgcatgcgacagctgaccacaccgctaaaaatgccattttcgcactgacttggggcggaggtcgtggcgaaacgcacgagggaacgtgtgtcatccgatatggtcatgcccgccagacattgaagcgtcctgtctatgcgcggttgatgtcccggtggcggggtcaatcgatcgacatacgaaccgggacagattcggctgtcccggttcgggatttcggcctcttttggcgaaccgggacaggcccttccatgaacacccgatatatgcaaatccaaaaccccggaattccgccattccccgacggcgaccatcgcacgatagggcgtcaggtgaatgagattctgtcccggttgcccaaaaagaggcaaaatgacgaaccgggacagcgaaatctgtcccggttgtcccaaaagagacgaaatgacgaaccggggcagcagaatccgtcccggtccacacgcggttcacacggcattacccaagtgaactcatcggcaaaacattggcccagccaacaccactaccgatgtccagcacaggccagctcgtccaggcgggcggcgaagcggggccagtcggtcttcatggcggtgaggagcttgcggttgggcacgtcgtcaatcgggacccagcagatttccatgctttcgtcgtcgtttgccttgggctcgacggtgtggccgggcttttcaaaggcaaacacggtggtgtaggcccacgggccatggtcctcgcggtaggagccgaccacctcgatgtcttcgggggtgatgttggcttcctcgtagctttcgcgcagcgcgccttcgatggacgattcgccgtccgcagtggcaccgccggggataccccacgtgccaccttcggcgctccacgcggcacggtgctgcatgaccacgtgagtcaccttgccgctcgccgggtcacggcgagccagcagaatgccggacgcaccgttggtgccccaatgcttgcggccgcaggcgcagtccacccagccatcgccgggctgatgcacgttttcgaccggcggcagaatgccagcgtgctggttgcccgaggccttgctttccggctccagttcgccacggccgacattccacaggtcggtccacgtgatgcccagttcgccggccagatgccgggccagcggcaggctgaggccgatgataccgtgcggatcgccctcgatgctgtcgatgaacgcgccgccgaagccttccagcgtgaacgatccggcgacttccagcggctcgccggtgacgatgtaccgttcgatgtcgtcatcggtgaattcgccgaaatggactttggcgtggcttgcgccgcgcacggtacgtccggtcgcgaaatcgatcaggcagtggccggtccacagttcgccggtcgcgccgctcatgcgcttcagtcgttcgcgggccacggcttcgctgtgcggcttgccgtagcattcgccgtccaggaggaacatcgaatcacagccgagaatcagcgggccgaccgtcgcctcggtcagtcccggctgtccggcaatagcggtggcgatgggttcggtgatggtcggcatgtcgatgccggagaagtcgcgcgtggtggcgatttccgccttggaatagtcaataggcttgccggcggcggctttgcgcaggtcttcgacggcagcttcgcgttccgaatccttgatctccttggccttgagcgggtaggcgatcacgcggtcaccggtcgcggcggcggcagtatcggccacatcacgatacgcacggtgaacggcctcggccttggccacggccagaatcatcacgcgctgcttgatgctcagatcatcgactgtgacgccttcctcacgagcggccgcttccagcgcagcaggctcatccacgtgcgagacgcgaattgtggggcagatacccgccgaatacagcacgtcacggcgaggcttggacttggaagcaagaattagcggaatggacatgacttaagtccttatgctcccgctggcgggagctgtcgaacgaagtgagactgagggtggtctctgccggtatggcggaccactctcagaccgcctgcggcggccagctcccgccagcgggagccttctcctcgacttagcgacgctcgatttcgacgccggcggtgttgatgggcaggtgaagcacacgccagtggccggaagcaagctgctccgatgcgatctggtcgatggcttcgcgggcgttgccgtagtgcagcacgagcacgcaggggccggcaccggagacggcggcggcatagcccttggagcggaagagcgcaatgagctcggtggacggcggcatcagggtaccgcgatacggctggtgcaacttgtcctgcgtggcggtgaacagtagcgcgttggactgggcctgagcggccgcaagctcgtcagcgaacggcgattcacgggttccgccagcgcaagcgcacgtatcggcatcctgagccggggcagcggcgacgccggacttgccctgctgggcggcctgggccagcaccatgggattcatcgcagcgggcagcagacccacgcgagacacgttgtagacggcgtccttgtatggcagttccctaggcagcgcctgacgggccttctcagtggacagctcatagtcgggcacgaacacggcggcggtgatggacgggtccaccgggtagttgacggcgtggaatccaccgtgcagcggttcaccaccaggaacggcgaccgagccgacgccttccgcggtttcgaagtcccaagagacggtcaggccaccgaacacagccggggccacattgtccgggtggccttcgatctgggcggccatatcgaagatggccggacggttgaggtcaccggtctgggcgaaggccgcggcggcggcgatgccggccacgatggcctcggcggaagagcccatgccacgagcctgagggatgttgttggtcgcttccagcgtgaagccgagtcggccgaggccgaacgtggcacaggcacggcggaaggtggagaccacgaggtgggtttcgtcgcgtgggagggtgtcggcaccctcgccgtggatgatcacgtgggcaatgccgtcgttcgggtcgtcgttgagcgtgaaagtgagctcgtcatggtagtcgagcgccagacccacggtatcgaagccggagccgaggttggcggacgtggcgggcacgcgcacgtgaacgctattgcagattgggttcatggttgttccttaaaaaggagctccccttgtcaggggagcttgggtattcagctttcaactcacgggcagccgttcgaccgcctcatcagagggagcctagacggtgtcagtccagcacgcgcaggatggacgggtcaccggtgacgaagtcgagcgcctgcacggccttgacggtgttacgcagggtttcctcgtcggtcaggtgggtcacgatgcgcaactgctgaatctcgccgtcgtagccggggtcggtcatggtgggcttcagatcctggttcacaccgttgatggagacaccgttcttggcgaactcggcggcgatggcggccagcacgcccggcttgtcgtggatcaggaagcgcacggcgaatgcagccttggaggcggtaatcggagccttcggcagattcttgtacagcgggatggacgggccggtgcagccagcagcaatgtggcgggcttcggtcaccacgtcgcccacgacggcggaggcggtcggagcgccgccggcgccacggccgtagaacatgaggtcgtcggcggcctcggccttgacgaacacggcgttgaaggagccgtgcacggaggccagcgggtggttctcgtcgatcagggccgggtagacgcgggcggagacgccggcctcgccgttctcgaccacggcgagcagcttgatgaccttgtgctcggcggcggcggcggcgatgtcgtcggcggtgatcttggtgatgacttcgacggacacgtcgtcgatggtcacggaggtgtggaagccgagggtggccatgatggcggccttgttggcagcatcgtagccttcgatgtcgccggtcgggtcggcttcggcgtagcccttggcctgggcgtccttgagcacgtcgtcgaactggagacccttggtggtcatctcgtcgagaatgtagttggtggtgccgttgacgatgccgagcatgctggtcaccttgtcgccgaccagggactcgcgcagcgggcgcaggaacggaatcgcaccacctacagcggcctcgaagtagatgtcgacgcccttggcctcggcggcggagtagatctccgggccgtacttggccagcagcgccttgttggcggtgaccacggaagcaccggattcgatggcggcaagcacgaacttgcgggccacggtggtgccgccgatgagctcgatgacgatgtccgagttggtggccacgctcaaagtatcggtggtgacgatggactggtcgatccacgggaacttctcggtttccttcgggtcgaggcaggcgacgccggtcagttcgatcgggcggccgatacgagcggacagttcgtccttctgctcgacaatcaggcgggcggtctgggagccgacggtgccggcaccaagcaggcctacgcgaatcggggtttcgctgttgtgagccaattcagggtccttccaaaaagttttctatatcccacgcctattttacggattatttccgacagcagaccgaaagtactcatcaagctgacggcccttttcgtattatgacggttttggccgcacattacagactgtcaggcgctcacctctgcacgctgattactcgctgacgtcgaggttgagtaggtcgtctacggtctggcggcggagcatgacgtgcgcgccggactcgctgacagcaaccaccgccggaatcagcgcctggttgtagttgctggccatggtgcggccgtatgcgccggtaaccggcacggcgagaatgtcaccgcgcttcaaatcggcgggcaactgcacctcgtgaaccacaatgtcgccggattcgcagtgcatgccacacacacgggtaagcatcgtttcagcggaaccggtgcgattcgccagacgcgcggtgtagtcggcaccgtagagtgccgggcgaatgttgtcggacatgccgccatccacagacacatacacgcgctcggcaatcgggttgccggcactgtctttgacatcggacaagtgcacgtgcttgatggtgcccacgcggtacagggttacgccggcgggtgccacgatgtaacggcccggctcgaagctgatggccggggcgggcatgccgagcgcacggttggtgctgttgaccgcatccgccaagcgagtgagttccacgtcaatgtccattgaatcttcgccatcggtgtaggccacggagtagccgccgccgaggtcgatttcgggcaggatgtaggcgtcggtggcccacagggtcttgcgcagcagcatcatgcgcttggccgcgtgaatgaaggcgtccgcatcgtggatgttggagccgatgtgcgagtgggctccgaccagttcgagtacgtcctggttggcgaggatggtcttgagcacggcgatggacggaccgtccgcaatggcttccatcgcggcggccagcgccttgtctgtgtcggagacttcctcgtggctcaggtcgtacggatacttgacgtcgtagtgcagctcgcgctctgatttctcggtcttttccgcgccattttccggggaatgcgtcgcagagatacgcgcgttggtagcggcaggcgtcacgtctttgaggtcgttcagcacatcgagcacggcggcgtcggccccggcggccagcagcggcacgccgaacttctggtcctcgtgagcagtggagatgtactcgtggccgccggcgtggacaccgacggtgacgcgcagcatcacacgggcgcgtttgccgagcctgcgggcgatggcggcgacgcgctccggctcgtcgggctcgtcgatcacgattttggcgaagccctgttcgatggccagcgcgatttcctcatcggacttgttgttgccgtgcagtaccagacgacgtccgggaacgccagcggcgagggcgattttcatctcgcccatcgtgcaagtgtccacaaacatgccggcctcggtgaccaatcgcacgacttctttggacaggaacgccttgccggcaaagctcacgtgcgtagtggatgtgttgaatgcttcggcggcagcgcgcacgaagtgcctggcacgtgcgactacttcatcagtgtcgatgagatagagcggcgagccgaactcgtcaagcagcgattcggcggtacgaccgtggaatgtaatggcaccgtcgacattcacagccgtagcggccggccaaattggagaaataggcataatcacatcttctcgggggcggtgacgccgaggaggtcgaggccgttggcgatgacctgctggacggcgtcattgagcttcaggcgggcggcggcacgggccggctccgggttcttggcgatctccaaggccttgcgagcctcatcgtcgccacgggtttccggatcggtcagggccatcggcaccacgcgctctacgttgtaccacttgtgataggtggcggccagctcttcgagataacgggccaccttgtgcggctggcggtcgtcggccgcagtggcgagcacgctcgggaactgggcgagggcggcaagtacctcgccgtcggcctcggtgtcgagcagggccaggtcggcaccctcgtagctgatgccggcggcggctgcgttgcggtccacgttcttggagcgggcgtgcgcgtactgcacgtagtacaccgggttgtcgttggtgtgcgaggcgagcagggccaggtcgatgtcgaagttctggttgtagtcggagcgggccagcgagtagcgggcggcgtccacgccgaccacggagaccagatcgtcgatggtcacgacgttgccggcgcgcttggacatgcgcacgggcttgccgtccttcatcacgttgaccagctggccgatgagaatctgcatgttcttgccgggctcgtcgccgaaggccgcgcacatggccatcatgcggccgatgtagccgtggtggtcggcgccaagcatgtagatggccacgtcagccgggttttcggcgcgatggcgcttgtcccagtagtaggcgatgtcggcggcgaagtaggcgaactcaccattggacttgatgatcacacgatccttgtcgtcgccgtgcttggtggattcaaaccaagtggcgccgtccttgtcgaagatgtcgccgcgggacttgagctcttcgattgcggcgtcgaccttgccgtcggcgtacaggctgttctcatggaaccagacgtcgaagttcacgcggaagtccttcatggacttctgaatctcgtcgaacatcatcggtacagcgcgcttgcggaattcctcgcgcacttcggtgtcggcctcgccgagcggttcgccgtcgtcgttcaggccttgatcctggtgggccagtgcggtcaggtccacgccgtcggactcggcttcggcctgaacacgggcggcgatctcgttgatgtaggcacccttgtagccgtcgcacggggtttcggtctggtagccggcctcaccgaggttgttggcctcagcccaagcggcgaccagcgacttggcgaagcggttgatctgctcgccgtggtcgttgaagtagtattcgcgcaccaccttggcgccgttggcctcaagcacgcgggccatggcgtcgcccaccgcggcccaacgggtgccgccgatgtgaatcggaccagtggggttggcggaaacgaactcgaggttcagggtctggccgcccagatgggcattacggccgtattcgttgaccttgttgaggtgcttgtcgccatcaactgctggggctgcggcaagcacggcatccaccacggctgcagccgaggcggaatcaagggtgatgttgatgaagccggggccggccacctcgaccgtggcgatgccgtcggcttcagcgagcgcggcggcgaacggctcagccagatcacgcggcttcatgccggccttcttggccagctgcatggcgatgttggaggcccagtcgccatgcgcgcggtccttcgggcgcatcacggcgagcttgtcgacgggcggaatcagctcgtcggtcaacgcgccggcctggccggcggcgacgaggttgtgggcaatgctggaaatcagttcacttaaggcttcagggctcattcttctaaggataccggcgacggcgacaccatgccgcgtccggtcattgtcggcggccataatggaacgacgcgcgaaagaggtgcatatggccgggctcaacccccaatcattggtcacattgtggcaaatcgaacagtatggctcgttctccgccacggccaaggccacgggttggtcgcagccggccatcagccaacagatcaaaaagctggaggcacagtgcggttcgactctggtgcaacgcacctcgcatggtgtggaactcaccgccaccggttcgatgctcgcccgccacggcgaggccatcgccgatcggctggagcgggcggcccgtgaggtcgaggattatcggcatcatcggtttgctcacctgcatttggtggccccaccgtcaatctgctctactatcgcggcccgtaccgtggtcaagctcagtatgttcacggacatcgagctgagcctgattcagatggagccgccggaggcgatcggtctgatttcccaaggcaaggccgatgccgccgccgtgttccggtacagcagcatcccgaacttcctgcacatcggcgacgatctgaccttccagtcgctgggttacgatccgatgcgattgttggtccgccgctccagcgacatcgccaaacgattcgaggagaccggcgaacccgtgccgctgtccgccgccaaagacgagcattggatcgccggctgccccacctgccgcgcaaatttggtgaaactgtccacccgtgccggattcaagccggatatccgccactgcacggatgattactgggccacgcagaacctggtcgaggttggcatgggcgtctcgctggtgccggcgctcgatacgcatatcaacttgcagggtgatctggtggcctgtcccatcgccgacgattttgcggcgcgcgaggtcggcatcgtgactcgtgccggcgatcatcgtcccgcgctcggttcattgctcgaagagctcgagcgcacgtcactcaaatatttgagtgccaagtagtcgcacagcgataagcaagcttgcgaacgccatcacgatttcggggagccagaccgttgagcagcccttctgtaccaggaacaatgacatgttatgagcatgaacaacgtttcccagtcaacgactttgagcagcgcaaccgccggtgcctcttgctttgatgccaatcacatcgacgtgacgaccatcgaagatctgaagcaggtcggttcggacaaatggacccgctaccccggctgcatcggcgcattcatcgccgagatggattacggtctggcgccgtgcgtggccgaagccatcgaagaggccaccgaacgtggcgcgctcggctacattcccgacccgtggaagaaggaggtcgcccgctcgtgcgccgcatggcagcgtcgatacggctgggatgtggatccgacgtgcatccgtccggtgccggacgtgctggaggcgttcgaagtgttcctgcgcgagattgtgcgcgccggcaactccatcgtggtgccgactccggcctatatgccgttcctgagcgtgccgcgcctgtatggcgtagaggttcttgagattccgatgctgtgcgagggcgccggcgagagcagcgggcgcaatgatgaatggctgttcgatttcgacgccattgagcaggcgttcgcgaacggctgccatgccttcgtgctgtgcaacccgcacaacccgatcggcaaggtattgacgcgcgaagaaatgctgcgattgtccgacctggccgccaagtacgacgtgcgtatattctccgatgagattcacgcgccgttcgtctaccaaggccacacgcatgtgccattcgcctcaatcaaccggcagacggccatgcaggctttcacctccacttcagcctcgaagtcgttcaacattcccggcaccaagtgcgcgcaggtgattctcaccaatccggacgatctggaactatggatgagaaacgcggaatggtccgagcaccagacggccaccatcggtgccatagccaccactgcggcctatgacggcggcgcggcatggttcgagggcgtgatggcatatatcgagcgcaatatcgcgctggtcaacgagcagatgcgcacgagattcgccaaggtgcgctatgtggagccgcagggcacgtatatcgcgtggctggatttctcgtcactgggcatcgatgacccggccgactatttcttcaagaaggccaacgtggcgttgacagacggccgtgaatgcggcgaggtcgggcgcggttgcgtgcgtatgaacttcgccatgccctacccgctactggaggaatgcttcgaccgcatggccgccgcgctcgaggcggacgggctgttgtagaacaaaatcgcggctcccctcaaagaggggagccgaggaacggccgaattagtcgaagtcggcgccgagggcttcgagtttgccgcggaagtcggcgtagcctcggtcgatcaggctgatgccgtgcacgtccgaggggccggacgcggccaaggccgcgatcagatggctgaacccaccacgcaggtccggcacgtcgatgtcgcgtccggtcagcggggtcggtccgaagatcacggcggaatgcttgtagttgcgctgccggaaacggcacggcagcgagcccaggcactcgcggtacaactggatggtggcacccatctcgaccagcggcttggtgaagccgaaacggttctcgtacacggtctcgtgcacaatcgacaggccattggcctgggtcagggccaccacgagcggctgctgccagtcggtcatgaagccagggtgcacgtcggtctcgatagccacgggcttgaggtcgccgcccggatgccagaagcggatgcccttgtccgtcacctcgaacttgccgcccaccttgcggaacacgttcaggaacgtgatcatctccggctgggtcgcgcccttgacgaagatgtcgccgtgcgtggcaagcgcggcggacgcccaggacgcggcctcgatacggtcggtcagcgacgtgtgcgtgtagccttgcagctccttgacgccttcaatgcggaaggtgcggtccacgtccacggaaataatcgcgcccatcttctgcagcacgcataccaaatccatgatctccggctcggtggccgcgcccgacagttcggtcttgccctcggccagcacggccgccagcagcgtctgctcggtggcgcccaccgacgggtagggcaggtggatcttcgcgccatgcaggccgttgggcgcggtgatgtggatgccgtccttgtgctccttgtccaccgtggcgcccagcttgcgcagcgtctccaaatggaagtcgatcggacgtccgccaatcgcgcagccgcccaacgcgggaatgaacgcttcacccaaacggtgcacgagcgggccggagaacaggatcgggatgcgcgacgaaccggacagtgtatccacgtcggccacatcggccagctgcacacgcgaggcgtcgatggtcacaatgccgttcgcaccgtccacatccacgtccacgccgtgcagacgtagcaaatcggacaccacatgcacgtcacgaatctccggcacgttcttcagcaccgacttgcccggtgccagcaacgcggcgaccatcgccttgctcacgaagttcttcgcgccacgcaccttgatcgcgccattcaaaggcttgccgccctcgacatgcaacacgtcatccggattctcagccacgccactctcctcaatcaatcaagattcaaaaaatgctaccgtccagtttgccataagccatgtgccgactccgtgaaatgcaccccagccgaactttgatcaccgtgcacaacggatcccataccccccccccgtcgaatcaaaccgataacgtgatcttcctcacatttgccgccacagtgttctccatacttctacgctacgattcagggcaatggcatcagatgccatggccacaagcaaaggagcattcatgaccacagtcgccgtcatcggctgcacgcacgccggcacgttcgccaccacctcgattctcgccgagcaccccgattggaccgtccatgttttcgagcgcaacggtacgctgtccttcctctcctgcggcatcgccctgtgggtgggcgaccacgtatccgacccgaagaaaatgttctactcctcccctgccgctctggccgaagccggcgcgaccatgcatatgcgcaccgacgtgacgtccgtggacctcgacgccagaaccctcacctaccgcgcgctggacgaggccggagaccccgccgaacagaccctcgctttcgacaaactggtcgtgaccaccggctcgcgcccggtcatcccgccgatccccggcatcgacagcccgcatgtgctgctgtgcaagaactgggatcacgccatcgccatcaaggaaaaggcgaaaaccgccaagtcggcagtggtgatcgggtcgggctatatcggcgcggaaatcgccgagcagttcagcgtcaccggcgtcaagaccacgctggtcgacggccttgatcgcccgctggccaataatttcgataagaccatcaccgatcaggtggcggccgcgttcgaggagcacggcgtcacgctcgcgctcggccagaaggtggtcgagttccgcgacaatgacgacgacaccgtcactgtggtcaccgaaaagggcgagtacacggccgaaatggcgattctggccgtcggcttcctgccgaacaccgacctgctcaagggcaaggtggacatgctgccgaacggcgcgatcgtggtcgacgattacatgcaggcgtccgcgccgggcgtgtacgccgccggcgactccgccaccgtgttctacaaccccaccggccagcacgattacattccgctggccaccaacgcggtgcgccagggcctgctggtgggccgcaacatcgagacgccgaccgtgaagtacatgggcacgcaggccacgtccgccgtgcagctgtacgatctctcgctcgccgcctccggcctgacccgcgccggtgccgaacgccgcgggctcacggtccgcgagacctcgctcaccgaggattatcgcccggacttcatgctcaccaccaccccagtcacgtcgattctgacctgggacccggaaacccgcaaggtcaagggcggccagttctgttccaaggccgatatctccggcgcggcaaacgtgatttccatggcgattcaggccggcttcaccatcgaccagctcgccaacgtggacttcctgttccagccgaacttcgacaagccggtctactacgtcggcgccgtggccatgaaggcggcggccgagtaagacggctgtacccaccgcaaaaaagaaaccccggcgtgatgggcaccggggagagaaaggagagaagaagaaagaggttaagttatgcagcttgttcggccgtgattacatataacagcaacagtttcaatgcaacatgggcactgtctgggaatcgtctgggaatcacggcccgtacaggctgttgcttgtttttggagccgatttaccggctggccttgatcttgtgggccagttcggcgtcccacatcgcgccggtggcggacatcaccgagtccgcgccggcgtcacggtacgcctggtagtcggcgggcgagaccacgccgccgacgccgttgatcgcgaaatcgagcccgagcttttcacgaatcgcggccagacgggcgaccatgtcgaggccggcgccacgaatcgcattgccgcacacgcctgagcgatcgcggccagcgccgggcagggcctgattgccattggcatcgaccagtttggcggaaatcgtattgatggtgctgaagccctgcacggtgccgtggcccacggtggaacgcaccataagctccagagcgtcgtcgctggggatgtaggcgagcttgaccatcagcgggatgtcgccgatctcctgcttcacggcctcggtgatgcggcccacgagcagcggattgtggcatagcaggcggttgtggccctcgttggggcagctggtgttcatcaccatgagcttggcaccggtctccttgaccaggcgggcggtagtggcatggtcggcgatgtattcctcctcgctcatgccctccacacgcgagccttggaagctcgggaccagcacttgaccgggaccggcggcctcgatggcggcgcgcatgtccggctgccagacgtcagggctctgcgagggcacaccgaagctgttggagatggaaatcggctgttcatagttggtgtcggccagcacgccttcgtccagttcggcgctgcccggcgtcagtgaaccgtccgccgacttggggtgtacggcgagcacgttcgggaacgggttgcagccccaggcgcgcgaacgcacggttttgtaggtcgccagatcgaaacccatgtggaaagcggccgtggtgaaacggctgttgagcagcgggcctgcgggaatgccgaaaggcaggttgaccggctggcccaaaaaggtggccaaggcaccctcgctggtggttccggcggcatcggcaccgttgccatccttcagcgcctcggcgaacgcgccgaacggcccttgctcatagttgtcttcgtaactgcggctgacatcgtaaaacggctcaaaatcactcatgcttcaacgataagccaacctgcatgcgcacacgcacactcaacccatcatcgcgccgacaaacgaaataatggcgaaagcggcattggctaccacaaagatgatgaacgtcggagctgcccagccaaagtacgtgtctggaatactacgattcgtacggtgatattggcgcatctctttgccgtatatcacgaatatgataatcgatccgatcacgccgattacagatagcgacaatgagaatatcaaatatgcgttgtcatcaagatagttgccggcaagggtatcgatggcgccggaaagaatcgcattgttgaagatgtgcagtgcaatcgaccaaaccaacgagtattccatggccacgaatcccagaatcaggccaaagaggaacgcgaatgtgccttgcactacgtcgtcatggaacaggccgaacaccattgccgaggtgacgatggcgaagttcttgcccaacggcttgagctccttcatcagtacgccgcggaacagtacttcctcgcaaatcggagcgaccagcccaacgtacagccacatgcttacggtgacgctggattcggcgatgctgtctgacgtgggagaggcaagatcggtgcccagcctggaaaaagcgacctgcaccaacataacgatgccttgcacgcccatgcccagcacgatgaacatcaacgcccagagaggctgcatgcgcccgccgccatattggctgatgtggccaagctgattgggctccccgtacgagtcgcgatgctggccaccaagccagaattcgcaggtgaagatgtcacggtggcgcatgagcagcagaaatccgaacgcgacgaacaccgatatcaggctgatgatgccatcccactgcacgccggacaaatcgctcgcggttattacgccgacgataatggtggcgaccattgcgcccaagagcatcatgccttcataggcgagagtcagtcccattacacgattgaccaccttgcgacgccacgtgcgccatacacggcgaggatcgatcggcatgaccacgggcattgctgcgggcatcgtggcaggcattgcgttgggcattgcgttgggcattgtgactggcattgccggagccgtttgcacgaatggttgcggcgcagcggaatagggttgtggcgcgtagcccactggttgagcgtagtacggatgagcgaggggctgtggagccgactgttgcgccgggtatggggaataggcggattgcgccggatacgtcggctgcgtgggatacatcggctgggcaggatacgtaggttggacgggatatgtcgggtatacgagctgcgcggcgtattgtgcaggctgcacagcaggtattgcggcttgcggcacaggttgtgaaacaccttgtgaaacaatccgtggaacaccccgtgaaacatcttgtggaggtagcggttgtgcccatgcctccggctgacccgcatattgcggctgcatgctcggcccaggctgaacatactgtggcgtctgtggcatcggcgtctgtgactgtgccgcagactgcggtgccggtcgaggtggcaacggttgcgctgacagcgattgcgccggagccgtatcggaatcgttcgacggattcatgtcattcatggtcatgatgctcaacctaaccgtcattactggatgaatcgtgattatgtccacaaatgtgtacgaattcaggcacagtatttcgaacgctaggacggagttcatgagtgttgaggaaagcgccgccacgccggtgttggtggctgcggtggataacgaccgtatggcgttgttggcactgaagggaatattgccgcaactcctgcccgccgcgcaatggatgtggggcgcgggcaccagtgatacctttgtttgatgcgatgcgagcgacccaataatctcaatcagacacagagccaacggccctgggcctgcaattatggactcgcctttcggcgaggctcaatgctggcctcgctgctgtcgcagctcggcacagggcctgctgaaagcccaccgggctttcagcaggccgatcgcggctaaataatgccgcgatcggccaacggccctgtccagtctgcgtcctcaggctcgcgggcggactcgattctttcttcggcccagtgtttggcggggatggtcttgggcttgaaggggaacttttcggcgcgcatcttttcgtaggcggcgatgtcgtcctcgtgctgcagcgtcagatcgatatcgtcgtagccgttcatcagacgccaacgcacgtaatcgttgacctcgaacggcagggtcacgtcgccgcaagtgacagtgcgggtctccagcgagacagtcatctcacgaccaggctcttcctccagtagcttccacaggagttcgacggactcctgcggcataatcgcggccagcacgccgttcttggcggtgttgccgtagaagatgtcggcgaagctcggcgcgataaccacgcggaaaccgtaatcgtgcagcgcccacacggcgtgctcgcgggaggagccgatgccgaattcggggccggcgaccagaatctggcccttaccggcgtattccggcttgttgagcacgaagttcgggtctcggcgccatgcgtagaacagggcgtcatcgaagccggacttggtcacgcgcttcaagaacacagcgggaatgatctggtcggtatcgacgttggagcggcgcagcggcacgcccacgccggtcagtgtggtgagtttttccataacaattttcctttcggggatctctcccccagtcagtcttcgactgacagcccctcgtcagagggggctcacgtgtattgactcagagatcggcgggagacgagattgtgccgcggatggcggtggcggcggctacggccggcgacgccagatgcgtgcgcgagcccttgccttggcggccctcgaagttacggttcgaagtggaaatcgagcgctcgttcggcaccagcttgtccgggttcatgcccaggcacatcgagcagccggcgttacgccattcggcgccaaagtccttgaacaccttatcgaggccttccttctccgcctgcaaacgcacgcgggaggaggccggcaccaccagcacgcggtggatgttctcggccttgcggtggcccttcataatcgcggcggcctggcgcaaatcgtcgatacgaccgttggtgcacgaaccaatgaacacggtgtccacggcgatgtccttgatcggcatgcctggcttcaaacccatgtatgtaatcgcacgttcggcggcggcgcgcttggtggcgtcggcgatcttgcccggctccggcacggaggcggtgatcggcagaccttggccggggttggtgccccacgtcacatatggaccgagcttggtggcgtcaatatccaccaccttgtcgaatacggcatcgtcatcggtcttcagcgtcttccagtacgccacggcctgatcccacagctcgccttccggcgcgtgcggacggcccttcaggtactcgaacgtggtctcgtccggcgcgatcatgccggcacgcgcaccggcctcgatggacatgttgcacacggtcatacgttcgtccatggtgaggttgcgaatcgcctcgccacggtattcgatcacgtaaccctggccgccgccggtgccgatcttggcgatgatcgccagaatgatgtccttggccgtcgcgtccgcgggcagcttgccgttgacgttgacggccatggtcttgaacggcttcagagacagcgtctgtgtggccatcacgtgttcgacttcggaagtgccgatgccgaacgccagcgcgccgaacgcgccgtgcgtcgacgtatgcgaatcaccgcacacgatggtcatgcccggctgggtcaggcccagaatcggggcgaacgcgtggacgatgccctgatcggcgtcgcccagcgggtgcaggcgcacgccgaactccttgcagttcttctccaaagtcgtcaactgcaacgcgctcgtctcatccgggttcgggcgatcgatatcaacggtcggcgtgttgtgatcctcggtggcaatgagctgatccacgtgacgcggcttgcggccggccaagcgcaggccctcaaacgcctgcgggctggtgacctcatgcatgagcatcagatcgatgtacagcaaatcaggagctccgtcgctgcccttgcgcaccagatgatcggcccagaccttctcggccagtgtcgttcccatagtgattcctccaaaaaattccgcgcgaggtattgtgttcgcgccttgttcgtggtattagcctatgtgcttgcgatgggcccggccatgagcatgccggatattgagatacggtcaaatgatggcctcaatatgactcggacccgactcgaacatgacctagtcatgactcggttccgctccagacatgtctcttcggcatccacgaacgccctttcaacttcatggccaccctgtgagacacttccccaatttgccatttcactatgtgagatggcataatcgcccttattatgactgattcccgggaagaaccattgaacaacagcttgaccgagtccgagccggttgaagacaccaccgccaaggacgatggggaaatccattccggcgttggcgtccttgataaaaccgtaaagattcttgacgcactggaatccggcccgtctacgctgggccagcttgtggccgccaccggtctcgctcgaccgaccgcacatcgtttggctattgcactggaacgccaccgtttcgtactgcgcgaccagcatggccgattcgtactcggctcccgtttcgccgaacttgccgccgcagcaggcgaggatcgtctgctgaccgccgccggcccgatcctgcagaccctgctcgatcgcactggcgagtctgcgcagatttaccgccgccaaggcgatcagcgcgtgtgcatcgccgctgtggaacgcacctccggcctacgtgattccattccggtgggtgccatgctgtcgatggaagccggttccgccgcccagattcttctggcttgggaggattccgaccgtctgcaccagggattgcgccacgccaagttcaccgccaccaagctggccgccgtacgcaagcgcggctggtccgagtccgtgaacgaacgcgaagagggcgtgtgctcgatttccgccccgatccgcaacgcctccggccaggtcatcgccgccatctcgatttccggcccgaccggccgcatgggtgccgcccccggacgccgctatgcgccgctggtgatggccgccggcaagtacctcaccgaggcactggtcaaagccgttcgctagtcatcacatacattgcccccgctggcgggggcagttttgttatgcgctacctaaacaggccggacagttggctccatagcgacggcttgcgcagcaaatcatcaccctcgccctcgccaggcgcggtttggttcaccgcataggtgtaggcgcgtttggaactgggcttgcccaccagttcgccaaactccagcaattgcgtacgcggctcgtaagggtgacggatatcaaattcgatcaatcgcgtggcacgtttggccggagccggtccgtacgtattgaatccgcaggttggcgtagcgataagcaacagaccctcatgttcgccgacgaaaccgttgcgatgatcatgaccagctacgacgccgaaatacccctcgcgcagcgcctcaaactcgtccgactcatccgggcaggaaatgccttcccccagatacccgccggcttgagtgcgatcctcgtccagcacataataggtatccgcatgcttgcggtagccctgcatggcgaaagccgcattggcggccaccggtttgagtacctggtaatactccggcagcggcatgtgctggaacaccattgatttggctccgatatgttcgggcaaagccttgaggaaggccaatgtctcgggcgaaggcgtgccgaaaccgcctccatgcgcatagtcaccggaattcaccagtaccagtcccagtacgttgcgcgtgcaatccacatccatcaccggcaatgcaaaagtgccgggaatggtggacgcggaaatcggcgcatcggtttcttcaccattggttgccgcaggcgagccgtccttatgacacatatatacggtctgcttggccagcgcatcgctcggcggattgatgcaaccgggaaactcgcggtagattccgtcgagttcggcattgctcaaaccgcactggaaatcgtggttgccgtaggtcaccgcccacggtatgccccgtgacgccaaaggagaggtaaattgaccgatggccttgcgcaccaattcacgcgtatggttcaacgcagattcaggaatcgcctcttcgcaccaacggcgtttgcggaagctcttggcaaaggccggatcgtagccggcgatctggttgccggagaaaatcatcagatcaggccgtgcggcatcaaggctggcctcaatcagggcgatggtgtctttggagactttcggcccatcctgaatgtcggcaatctgcagcacgcggaacttgccggaatagtggaattgcagtcgtccgagacgcgcagagatagagaccgggcggccgtcttcggcatcggccggcttgatacggggtttcgacgacatcccctctggcgtacgctgtgtttccgtcatgccctccactgtacacacaaacgaaaaggcccgccggagcgggccttttctacaagttcaactactggagcagaatctctgcacaacatcatcgtcgtaacggtaagtctttccaatgcccgtccaacgtaacagtcctcgtgaccatacactatttgtgggctctgctctgttcagttgttcttgtacctcataatctattcatcactcccgtttctcgcaacctgcagagagtcgttgtgcgttttttatcacaactgttcaatcgcactttctggctatcggaaaacgagctgaaccgttcacatcgaacccgtctgatgttcggtttcgttcgtttcaccgccgctcacggcgtgtcgcgagcacgctagcacactcagaaccaaccaacaccgaactaacatgaacacccgttgaattctggcgcgttcagccgttttccggccacgccagagcttacgatataagctatggcacagatatttgacgcaccctcgaaggcaattctgcgcagccaaatcgcagagcatattgccgaaaacgacaacaacgaccgccgcgtcgatcaggaaggcgaggcaccgctgcccaaggaccgtttcttcgaccgcgagctcagctggctcaagttcaaccagcgcgtgctcgaatgcgcggagaacgaagacatgcccctgctcgagcgcgccaacttcgccgcgatcttcgcctcgaaccttgacgagttcttcatggtccgcgtcgccggcctgaagcgccgtatcgactcgggcatcgccgtgccgtctgccgccggcctgagcccgcgtcagcagctgcgcgcgatcagcgagaccgcacaccgtctgcaagacgagcacgcacattacgcgatcgacaccattctgccggaattggagaaggagcgcatcgtcctgctgacgtgggacaagctcacctcctccgagcaggagcgtctctcgcgctactaccgccagcaggtgttcccggtcctgacgccgctcgccgtggatccggcccacccgttcccctacatttccggcggttccatcaacctggccgtgattgtggagaacccggcctccggcaagtcgcacttcgcccgtgtcaagatcccgggcaacctgccgcgcctggtgccggtggacgacatgaccgacgaggagtccaaggacgagcgttacggcttcatcgccatggaaaagctcatcgccgcgcatctggaatccctgttcccgggcatgatcatcaaggaagcccgctccttccgcgtgactcgtaacgaggacatcgacgtggaagaggatgacgccgagaacctgctcaacgccatggagaaggagctgctgcgccgccgcttcggaccgccgatccgtctggagatcacggacaccactagcccgttcctctcccagctgctcgccgaccagctcggcgtgagccaggacgaggtataccgtctgcccagcccgctggacctgaccgtgctctttgagctcggcagcgtggaccgcccggacctgaagaaccgtccgttcgtgccgaccacgaaccgtcagatcgccgaggtcgagtcctcccgtgcgcaggacattttcgccgccatccgcgagcgcgacatcctgctgcatcacccctatgactccttctccacttccgtgcaggccttccttgcgcaggccgccgcggacccgaaggtgctggccatcaagcagaccctgtaccgcaccagctccaactcgccgatcatcgacgccctgatcgacgccgctcatgccggcaagcaggtgctggctttggtggaaatcaaggctcgcttcgacgaggacgccaacatcgcgtgggcccgcaagctcgaacgcgccggcgtgcacgtggtgtacggcatcgtgggcttgaagacccactgcaagctcatcgaggtcgtgcgtcaggaagcggacggtctacgccgctactgccacgtaggcaccggtaactacaacccgaagaccgcgcgactgtacaccgatctgggtctgctgacctgcgacccggtggtcggccaggatctgactcgtctgttcaaccagctctccggttacgcgccaaagtccagcttccaccgtttgctggtggcccctcgcaccgtgcgcaccggtctaatccagcgcatccgccgcgaggaggacgccgcccgcgccggcaaggaggcctggatcaagatcaaggtcaactccatcgtggacgagaagaccatcgacgccttgtaccgtgcctctcaggccggcgtgaagatcgacatcgtcgaacgcggcatctgcgctctgaagcccggcgttcccggcctgtccgagaacatccgcgtgcgttcgattctcggccgcttcctggagcactcccgcatctacgccttctgcaacgcggacggcccgcagatcggcgagggtccggcttccggcccggaggtctacatcggttcggctgacctcatgcaccgtaaccttgaccgccgtgtggaggctctggtgcgtgtcaccgccccggagcagattgacgggctcatcaagtacgtggacctgcagatggccgactccaccatgagctggcacatgcagcccgacggcacgtatgtgctgcacaccaaggacgacgagggccgcccgctggtcgacagtcaggaatatctgattcgcaagcaccagcgccgccccaattcgcacaactgatttcactcgatgctccctgtcaacgcaagctgactgagggtggttacgatgcccggctcctctttcgagaggatgccgggcatcgttgttcagcgcgcaaaactacgtagcagcggtccaacgtgacctacaatacaagagatgggtacgaacagtatgagacgaatcgtggaagccgccggcggtattctgtaccggtggaaggatgatgccgagccgacgcaggcatcgtctccatcagcgaaatccaatattgccaccgatggcaccatcatcgcgaacaccacggattctggcggcaaggccacggcagcacccggcgcatcggacgcggctcccaccccggacccggcgcaggccgacagcccggccgcggcggacaacgtactcaaccgcatcgaactgtgcgtcgtgcatcgcccgaaatacgacgactggagctggccgaaaggcaaggtcgacccgaacgaatcgcaccggcatgccgccgtacgcgagatcggcgaggaatcgggcctgtccgtggaacttggcccctatctgggcgacatcgagtacccgctgtccgaagaaggcagcaaacagcgccataccaaggatcggtcggcggataccaagcatatccagttctggatggccacgccgatcagcgccatcgacaacctgcggcgtacccatgcgtttggcccggtgcatcgggcggacatcggcgaaatcgacgaagttttgtggctgacgccggccgaggcccgcaagaagctcagccattccaccgataaggacatcctcgcgctattcgttgatcgggtcgaagaaggtgcactggacgcggtgccggtgattatcgtgcgccacggcaaagcggaagcgcgcaagctgtggaagggttcggacgcgaaccgtccgatcacgccgcgcggcgcggctgcggcatacgcgctgaaccgcgagctggcgtgtttcaatccgacccgactggccacgtcgccttgggtgcgctgccaggagacgttggagatgttcgcgtggcagaccggacgagacatggttcatctcgatccgctcaccgaagatgcatacgccgctgcgccggacaccgcatgggagtgtctactcagcgaaatcgagttcgcacttgagcgccgtcagcccatagcgatatgcatgcaccggccggtgattggtggtatgttcggacacctgcgcagcatgtgcgttgcgccgtctctaagcaaacgcctgatcgccaagacaccgttcatgccgaccggcacggcggtggcgctgttcgtcactccgacgcctcatggtcccaaaatcatcgatattcagaaggttcaaccgcttgtctactagacccgcatttcctgattcatccaactcctcggccgctgccgctgcagctcatgccgcgcacaatggtgccg

SEQ ID NO: 3220 - DNA, 10584 bp, Unknown
  R53_2m  MAG No. k141_5648
tcgtcctcgacggcccctctggctgcgctaagtctacgacccttcgtatgctcgcccgcctggaagaggtcaacaagggccgcctcctcatcggtggcaaggatgtcaccacgatgcagccgaaggaccgcgacatcgcaatggtgttccagaactacgccctgtacccgcacatgaccgtggccgacaatatgggcttcgctctgaagatcgccggcactccgaaggaagagatccgcaagcgcgtcgagaaggccgctgagatcctcgacctgaccgagtacctcgatcgtaagccgaaggctctgtccggtggtcagcgtcagcgcgtggccatgggccgtgcaatcgttcgtgagccgaaggtcttcctcatggatgagccgctgtccaacttggacgccaagctccgtgtccagacccgtacccagattgctgctctgcagcgccagctgggtgtcaccaccctgtacgtgacccacgatcagaccgaggccctgacgatgggcgatcgcatcgccgtcatcaagctcggtatcctgcagcaggtcggcgccccgaccgagctgtacgatcgcccggccaacgtcttcgtcgccggcttcatcggctccccgtcgatgaacctgaacacccacccggtggtcaacggcaaggcgaagatcggtgaggacaccgtggacctgccggctgaggccgtcaacaagctcaccaccgaagacaacggccagatcgtggtcggcttccgtcctgaggacgctggcctggccccggctgacgacccaaacgccttctccctgaaggttgtgaacgtcgaggatctgggctccgatggctacatctacggcaacatcgtcaccgatggctccgccgctgaggcctcccaggtcatgtccgaccagaacaagctcaccacgattcgtgtgaatccgcgtgcgctgccgaaggttggcgcgaccgtcaagatcaagatcgacccggccaagatgcacctgttcgctccgtcgactgagctgcgtctgaactaatagatacttggcgaggtctaatcgcttcgtcaaccattaaacgaggttattctcttcctctcttatggcctcgttggaaaagccctgcatagctgcggggcttttctttttgccttctagacggtctgagggagagacccaacggtgttttcccgtaaacataacgcgccgaagtcgtggccaaggagcacacatcgcgaacgacacgtaaaatcgaacacatggagttgaacgaattgccccagatggatccgcgtgcgctgaaggccacgtctgtcaaagccgaagacgaacacgccgattcagcggaaccgcaagcactgaaaatcaccgccgccagctcgaacccaaagatgttcacgctgccctggcacaagcccttggccacctggcctgaggacctgctggccaacctgccgcgaggcatctcccgccacgtcgtgcgattcgtgcacgtgggcgacgaggtgtacgccatgaaggagatcacgcgccaggtggccgagcgagaatacgagatcctgcgtcgactgcagaagctcgaactgccaactgtgaccccgatcgccgtggtcaccggccgtcacacccgtgaaggggagccgctggaggcgattctggtcacccggcacttgaagttctcactgccgtaccgtgcgctgttcgcccgcaacctgcgcccggacaccgccgaacgactgatcgacgccctcgccgtgctgctggtgcgcctgcacctggccggcttctactggggcgatgtgtccctgtcgaacgtcctgttcctgcgcgacgccgacgctttctccgccttcctggtggacgccgagaccggtgacctgcaagtccagctcaccgacggccagcgcgaatacgatatcgacttggcccgcaccaacatcatcggcgaacttatggatttggcgtccggcaagctactgcccggcgacgtggatgagatcgaggtgggcaaccgcctggtcgaccgctaccactcgctgtggagcgctctgaccgacaccgacaagttcaacccggacgaaatgtggaagattgagcagcgcgtcaacaagctcaacgatctgggcttcgacgtggacgagctggaaatgaagaccgccgaggacggcaagcgtgtgctggtccgcccgcgcgtggtggacgccggctacgccaaccgcaagctgctgcgcctcaccggccttgacgtgcaggagaaccaggcccgtcgtctgctcaacgaccttgacgcctaccgtgcctccacgtggcgtgagggcgaggatctggaaatcgtggccaccgattggatgcgcgaggtgttcgagccgaccgtgcgtatgattccgcgcgaatatcgctcccagatcgagcctgctcagttcttccatgaggtgcttgaccatcgctggttcctggcggagaaggccggccacgacgtgccgatgggcgaggccgtgaccagctacatcgacaacgttctgccgagctacaaccttgattccaaggcactcgccgaacttaacgaagaggccgattccggcgtcattgacgacgaatccacctacagcgacccggacgacgacggctacaaccccgatgacgatccggatgcggcagtgtggagtcattaagcggacaatccggtggactgtctgtaggtgagcccatcacacaaagaagcccctcaaatagaggggcttctttgtgtgtacaacctattacggcctcaagcgacaatcactccgccgcagccttgcgccgtgcgttggacaccgcgtacaggctgatacccgccgccactgaagcgttcagcgactcaacagacgagctgatcgggatgccggcaatcgcgtcgcaggtttcgcgcaccagtcggcccaaaccgctgccttccgaaccgagcactacaacgagcggatcggattcaaagccagtctcgccgacgagcttatcgccgccaccgtcaaggccgacaacgtagtatccacgctccttcaagccctcaagtgccttagtcaggttcaccacgcgcgccaccggcatatgcgcggccgcaccggcagacaccttccaagcggcggcgttcactgaagcggaacggcgttccggcagaatcacaccattggcaccgaatgcggccgccgaacgaatcacggcacccaggttctgcggatcggtcacgccgtccaatgcaataaacagcggtcgcgcagcaatacgggcggccgccgaattcgcggcctccattgccttggccttcttctcggcacgatcggccagctcgttcaacgaggagtactggaacggatcgaccttcaggatcacgccctgatggttgccggagcgggcgatacgatccatctccagacgatcggcctccagcatgtgcaggccgttcataccagcgattttcacgatttcgcgagtacgatcgtcatgttcaatacgagacatgatgtacagcgtggaagaaggtacgcctacgcgcagtgcttccagcacggaattacggccgtacaccagatccgaagtatccgccgaagcgaacttgtccactcgacggcgggctgccagacgcgggtcggccatctgccgacgttcggccgctttcttggccttatacgccttgtgatagacgcggtcctcggctttgggagtggggccgtaacccttcagtttgttgcgatgcttgccacccgaccccttggtcggtccttttttgatagccataggtgctattgtcccagcaccccgcgccaaaacgcggctattccgccgtcggtagccggtaaggtattgagagtgaagaagcagcgcatgatattcggactgtccctgctgtattggggattatggttggcgattctgattctgtggatgggtcgcttcgtgacctcattcttgtcgatatatttggtttccgcgctgcgcctcgatgagggtgtggtgggcacagtcgtggccatgtacggcttcggcgcaatcatcggctgcctgttcggcggtaccttgtccgacagattcggccgccaatccatgattatcatcggcgaaatcggcgcagcggctgccctgctggtcgtttccgtgctcactgaccccgtggctttaggcgcggccctgtttgtctatggtgcgttcgcctcactgcccagcccggtcatcgccgcgtatatcgcggatgtggtgcccgccgaacgtcagcaacgtgcgtacgtactgcaatcgtgggcgattaattttgggtacgcgattgggccgattgtggccaaccagctggtcaagatctcgtattcaatgatgttctacgttgaagcggcggtgatgatagccgtcacgatattgctgattgcgttcttccgcgaggtgcggcatttggggattactgtatcggtgccaagtgcggtgcgccatgaagacgaacgcagtgttacgcatgcggaattcgccggcgtcgaggggccgaatcactcggatgccgcaccggctgccagtgccaagggctccatgtctcgcaattggcggcgcgtgctcactgatacgccattcctcggcttctccctactgatgttcggctacttccttgtgtacttccaaagcacctccggcctgcccattgccatgacggaccttggtctagggctgggcgagtattcggtgctgctcaccatcaatggcggtatgttgtgcctgctgcagattcccgcgatgaaactgttctcgcgcatgggcaattcacgcgtgctggtgatgggcctcgccgtaaccgtcatcggctatgcggtgcaggccgcggcccattcctggggcggattcgcgcttgccgtagtgctgtggacgctgggtgagctgggcacattccctatcgccaccactacggttgccgccatggcacccgcgtcggcacgcggcacgtaccagggcgtctacaacgtagtgtggtcggtatcgattgcgctggcgccgctgattggtggctggaccatcagcaacttcggcggtcgaacgctgtggatcgcctgcacgatagtcctgatcgccgtaaccctcggtctcaagctcaccaaaggcttgcgcgaccgcgccatggccgccaacctgcgcaatgcctcacagtaaataattcccgtcaagaaaagtgtgaggcatccgaacttttccgcacaatcaaacatggtccgcaacggcgggatctcactgatatgacgctctgcatgtgcgattgaggcatcgtaatcctcacgcttttcttattgagaatcattctctgcgatacgttctagaatcatcacaagcaatgcgccatatacaacggcagatataggcggtctccttcaacgcgcattggtctaggatgcagcacatattgcatgccgacccggctgtcgaatttattcttgaacttatcgagcgatgaggttttgtatctctttgtcgatttgacctccacggggcagaccctggccttcatggcggcatttgaatactccccgataaggagaaaatcaatttccatgcggtccttcgcctgacgggaatatcgggaatagaagaacaggcgatggcctgaggcccggagctgctgcgcaacgacattctccaccagcatgccttcattcacttccagcttgccgaacaggatatcgcggtacaactcattcgacgtgtatgcgcggtcggcaaacacttgcgttactaacaagccggtgtctcccatatagcatttcatcgtggagtcctcttggtgtaggcgcaggcccacatgcggatccgtggcattcatgcagcggttgatcaggaacgattcatccaaccagaagaaagcatcgccatattcacgttcgcgtgcgttttcgcctaaagacgacagtgtgaacttcttttcatgcttggaaagttgccctggaatttcatcgaagatacgtttgacccgttctttcgaatctccgccgtatttctttatgtcctgagcgtacaggtgcaaaatttggcgtttcactcgatcgacattgcccatatcggatgttcccagataacgctctacggcctgcggcatacctcccaccagcatgtattcacggaacaggcgttccgccttgttgtccagcagcggagacattgctcgcctgtccgcaaaagattgccgtatcgcatcggcgagtagttcttctcctctggcccatagaaattcctcaaaatccatgggaaacatgctcaccgattcttcctcggagggaatcaagatgttttcgacattcttcttaatggagatcagggagccagtctccatgaagtcatatcgaccatccgcaacgagttgtttaaccgcgctgcgggcaaaggggaagagctgtacttcgtcgaaaataaagagggtgtcacgctcatgcaggcgtacgccgtaatagacggaaaggtccatgaacagcgtgtccaaatgatccagattgttgcggaacgagtctcgtaccgcctgcggagccttctgccagtcgataaggatgtatgagcggtattcgttcttcgcgaattcctcggcgacggtgcttttgccgacgcggcgggctccttcaatcattaacgcagtagtgcccttgctcgctgctttccatcgccgtagatggtcgtatacttttctcttatacatgttaagctcatattcctagtattttcaaggatttatgagctattatatcacgattcctaagttatataatgccgtaaaactcactattcctaggttatgaattgctttgattctcacgattcttaagttatataacgaggcgcgattctttggctatgtggccgacaacagcgaggagatggaaccggaccgcatacgcccggccatcctgattttgcctggtggcggctacgccatgacctccgaccgcgaagccgagcccgtggagaatacgctaatgctcatccaggcctgccgggccgccggcgtgagcatcgaagcacacctgttccccgaaggcagccacggcctgtccctggccaatgcggaaaccgctggcaacggcttctatgcgcacatcgtcgaatgcgtgcagtgttggcctgatttggctgaagcctggttgcgtcgcctgttctaggcaaaacgctattacgctgtgcgccaagtgcgccacgcagttatggaataatagcaatcgtatgcatcggcagcagttgcgccggtgtccataaccgcgcagtcctgtgcgtccagccgggagagaaaacccggcagcggccgcaaggctgactactccgcggcaataccaaggagaacattatggatgatctcaaagatcaatccgcagtgtccgcgaccgcaacgaacgaggtcgtggaatcggaagaagtgcgcgcgcaggaagcgctattgggggaagctgatccaagtctgaccagtgccgacgacgtggccaaagccctgaatgtcgacccatcccagggcctgagcgaggaagaagccaagcgtcgactggccaaattcggcccgaatgagctcgccaccgccccgcccgtaccgaaatggaagaaattcctggcccagttccaggacccgctggtctacctgctgatcgcggccaccatcatctcggtgatcgcatggttcatcgaaaaggccaatgcgcagcccggcgcggaaggcggtgaagtgctgccgttcgacgccatcgtgatcattttgattctgatcgtcaatgccgtgctcggctacatgcaggaggccaaggcggaggccgcggtcgaggcgctcgcccaaatgacggccccgcagacctcggtgctgcgcggcggcaaagtcatgcgcatcaacaccgccgacgtggtccccggcgacatcatcgtccttgcggaaggcgactcagtctccgccgatggccgactggtcaacgcggccagcctgcgcatcgccgaggcctccctgaccggcgaatccgtgccggtcggtaagaagccggacacactcaccgaagccaaggcgctgggcgaccgtgccaacatgatcttcaacggcacttccgtgacgcaaggcaccggccgcgcaatcgtgaccggcaccggtatgaacacgcaggtcggcaagatcgctgacatgctctccgccaccgaagatgagaaaaccccgctgcaaaaggagatggattacgtctccaagatcctcggcattgcggtgtgcgtcatcgctgtcgtggtgctggtggcgctcgccgtgctggaaggcttcgacgacgtccatgacgtgattgattccttgctgttggccgtctcgctggctgtggccgccgtgccggaaggcttggccgccatcctgaccgtggtgctggcgcttggtgtgcagcgtatggccgcgcacaacgccatcgtcaagaaactgcattcggtggagaccttgggctccgcttccgtgatctgctcggataagaccggtacgctgacccgcaacgagatgaccgtggagcgcgtggtcaccccgtccggcgcagtgcagatcaccggcaccggttacgcgccggaaggccgcatggttatgaccggtggcgtcagtcctgaatccgagcaggcccagattgtggccgatgaagtcgtcgccacgcttgtggccggcacgctcgcgaacgatggcgaactacgcgaggagaacggccgttgggagattgtgggcgaccccaccgaagtctcgctgatcgtggccgcacgcaaggtcaaggccgatcgcaagatcaagcgctacacgcgcgtgggcgagattccgttcacctccgaacgcaagcgcatgtccatcatcgccaaggacagcgccgatgccgacaatctcaccgtgttcgccaagggcgcgcccgacgtgctgttgagctactgctcgcgtatccgcgtgggcggacaggtccgtaagctcaccgaaggcgatcgccagtcgattctcgccaccgtcgaacgtctctcctccgaggcctaccgtacgcttggcgaggcctgccgtccgctggaaaccagttctttggctgatgtgcccggtgtaagcgtcaacgccgcaggccaggtgtccgacatcgccgatcaggccgaagccatcgaaaccgatctcatctggaatggcatggtcggcattatcgatccgccgcgtactgaggtgcgcgactccgtgaccgaggcccatcgtgccggcatccgcacggtgatgatcaccggcgaccacccgctgaccgccgcccgcatcgcctccgaccttggcatcatcgccaaggacggcaaggccctgaccggcgaccagctcgaccagctgcccgatgaggccgcactcgacaaggccacgtccgaagtgtccgtgtacgcgcgcgtggcccccgagcacaagctcaagatcgtcgaatccttgcagcgtcaaggcaacatcgtggccatgaccggcgacggtgtgaacgacgccccggcagtcaagtccgcggacatcggcgtggccatgggcatcaccggcaccgaagtgaccaagcagagcgccaagatgattctggcggacgacaacttctccaccattgtggccgccgtacgcgagggtcgcgtgatcttcgacaacatccgcaagttcctgcgctacctgctgagttccaatgtgggtgaggtgttcaccgtgttcctcggtgtggtgtttgctggcttcctcggcatccgccagccggaaaccgtgggcgtcaccgtgccgctgctcgccacacagttgctgtggatcaacctgctgaccgatgccgcgccggcgttggctatgggcgtggacccgcagaccgacgatgtgatgggtcgtaaaccgcgtaaggtgacggaccgcgtgattgacgcctccatgtggggcgacatcatcttcgtcggcgtcattatggccatcgtcacgctgattggtatggacatgcacctatccggcggcttgttcaccgaccgctcggtggatgccatcggccatgaagcgcagatgaccgaggcccgtacgatgggcttcacgattctggtgtttgcccagctgttcaacgcgctggcctcccgttcgcatctgcagtccgcattcgtgggtctgttctccaacaagtggctatggggtgcgattggtttgtccgtggcgctgcagctcgtggtgatttacgtgccgttccttaacggtccgttcggcaccgtggcattgagcccgatggcttgggtggaatgcatctgcctggccgcaatcgtgctgattgcctccgagctacgcaagattgtgctacgtgcgatagccaagcgttaagccatcgcaatagccctgattgtgggcatatagcagtgggccgggctctggtattcagggcccggcccactgctatatccaaacggctcctcatggggcggtaactatcccatggggcggtaacttccccatggggcggttagcacattttcctttttcgcggaataacgccgttttcagcgaccgccccatgaggaaattaccgccccatgggatagttaccgccccatgaggagccgtttggatatagcagtgggccgggccctgaataccaga

SEQ ID NO: 3221 - DNA, 68286 bp, Unknown
  R53_2m  MAG No. k141_5817
accgtcccatgcgcgtgctcggctaccgcaccccggccgaggcattcgccgacgaactgctatcattaaccgaacaacaaggatgttgcacttctaaatagacaacggggtgactaacgaagagacggcggtgttctacactggtagccatgtctatcgcatcagtagaggcccaaaaacagctcgaccgtatcgtggctctcggctatccggatgtggcggatatttccgccgccgcattccgctcgctggcccgacccctgatcggggcgctcgagcattccgatttgggatcgaacatcctgctggtgcccacgcgcgaactggtttcgcctgagtcactgatcgcacgaacctccatcaatcgcatggccggcttcaccaccatgccgccgcgtgacatcgccagcttcctgcctcaagacggcttcatgccgccggaaggcccgttctatctggtcgtcaatccgcacaccggcacgtgttatatcaatcgcgagccggacgtggcccgcaagcttatcgactccgatgaacgcctgccgctcaccctcgaggaaggcttggccatcgccacccagcacccggagtggctgctggaaaagaacggcttcaatctgctcggctcacgctccgcagacggccgcgtgccgagcatctggatgagccagaacgcaccgcgactgggagctgtctggcccaattcccgccatacctggctgggcaacgcgtattgcacggcccgtcgcggggtgagtctgtttaagtaggtttagcgcgcggccttgatcagcgaacggatgatggctataaagccaaggctcatcgcgccggccaccacggcgaacacctgcgggcggcgcagctcgttgcgtgcgctgaccgctccggtaacgcaatgatcctcgaaccagacgcgcagctcgttgctggagtagcggccgaccagattaccccatgtgagcatgcgggtcacatagcccgccggattgctctcatggaattcaaataggcgaatgccgcggtaccgcgacttgggaccatagcattcgaacccgcacgtgggtgcatagcccagatcgatatcatgcacatgaccaacgaaagagttcttatggtcatgcccgcagaacagcgcgaaatagccgccagcctcgcgcaaggcatccacctcgcccacattctcgtccgcgcagccgattgcctcgccgagccgcgagccggggcggcagacctcatggttgagcacatagcaacgcccggcgtgcgtgcgcgcgccttccacggcgttcggcgtccatgcgggcacttccttcagacaatcgtagaattcctgcggcggaatgtgctggaaggcgatggccggcacgggcttgccgtcgccattgcgctcgcccaactcggtttggacggaccccagccattcgatggccttgggggtgggggtgccgtacccgtcggcgtcggccaggtcgagtcctcgcggattgaccacatacgccgggtattgggcatcgttttcttcgggtttgccggcataatcgcctgaattgaccatcataacggacatggccacgcggccggaaccatcggaggactcgacgggcagcgcgaacgtgccgggctcgagactgtcgtcggggttcaggcagccggggtattcgcggtagatgtcatcctgttcgtcggccagaatgccgcattggaagtcgtggttgccgtaggtggcggcaaagggcacgccggcctcgacgaccggaccaaggaaaccggagaacgtgcggcggaccttttcgcgggtctcattcatgagttcgtcgagggtcgccggcgtctcgtgtgcggggctggccttgccggattgcgttgaatatacgagggtggaaaccgtctcgggcgtggggctggtctcaacggaatcgcctacttcggaagtcgtgatcacgtcggtcgaatcggcgccggcagcggcgacggcgttcgtcacggtatcggggtcaagcagcgcggctggtacaggcttgccggcttcggtgagacgatcggccacgcgatcggatactttgcgaattacggggtgacgcttgatcccgcggattttggcctcgatctcggtgaccgcgcgcacgcgagcgcccggctcctcgccgcggcggcgcaggaacgtgtcgatgtaggcgggatcatagccgcggatctggtcgccggtgaacaccacaagatccggatcggcttcgcggatggcctcgcggatgaggcggatggtgtcgggcaacacatcggggccgtcctgtacgtcggccatttgcagcacgcggaagctgccgtcttcgcggaatcgcaagctcgtcatagctcttcagtctatgttgccgggcggcggatcgcccgcgcgttcacaggactggcacagcaagggacggggcagggcggggtgccgcagccgtgttgttgcttgatggtgccgcgattttgtcatgcagcgtcggtggagatccagacagcgtccctatgctgacgttctgagaccattggcgtcgttactgattcatggaatggcccggcgccgacgctcaaagaggctagcgtcggcggtgggccaatatttgtcgcgttgccgatggttgtgggcctcgtagcgtcgatagtgtgccatagcctggcaatttgccgacgataagctttcccagagtcggtatttcgccataagttggtccgctgacgacgctgagcagtttggctgtcggtgcagtaccaatatttggcccgccgccgacgtatggagggccatctggtggggtatcgcaggcggggtgttgtgccggagtcaaagcgtggtccgctgacgacgctgagtgccctcatatcagccaggtgcataagcaaatgccacgatacggcatttcccgcgggtttgcccgaaccggcctgtaggatgttacgtgcgtattgacaaatccgcgtggcccggcgccgccctggcacaacgccgcagtcgcgtccgcaagagggcccgcgcaataaccagtaaaggaggaacaatgggtcaggatcaatcatccgtttttgatctcgcagcggtagccgcggcgtccaatggggggaacaacgacccgctgctgcctccggcacgattcatcggcgatccgcagaagccgagtcgtatgccgtacaacaagtacgcctcatacagcgagcagatcccgtttgattacccggagcgcacgtggccgggcaagcgactgcagcgcgcgccgcgctggtgctccgtcgatcttcgcgacggcaatcaggccctcgtcaacccgatggattccgaacgcaagctgcgtttctggaacctgctcgtctccatgggattcaaggagatcgaggtgggcttcccgtccgcttccgagactgatttcgacttcatccgtatgctcatcgagcgtgagcttatcccggacgacgtgaccatcgtggtgctcacccaatgccgcgagcacctcatccgccgcacatacgaggcgcttaagggtgccaagcgcgccatcgtgcacttctacaactccgtgtctgtgctgcagcgcgaggtcgtgttccgcaagaacaaggaagagatcaagaagctcgccaccgacgccgccgaactgtgcaaggacctcgagaacgaggccaagggcatcgacctgtactatgagtactcgccggaatccttcaccggcaccgagccggagtacgccgtcgaggtgtgcaacgccgtgatcggtgttatcaagccgactcccgagcacccgatgatcatcaacctgcccgccaccgtggaaatgaccacgccgaacgtgttcgccgacgaagtggagtacgtctccacccacctcgacgaccgtgactccgtggtgctctccctgcacccgcacaacgacgaaggcatgggcgtggctgccaccgagctggccgtgttggccggcgccgaccgtgtggaaggctgcctgctgggcaacggcgagcgtaccggcaacgtcgacttggtcacgctgggcctcaactggctcacccaaggcatcgacccgcagcttgacctgtccaacgtgcccgagatccgcaagacggttgaatactgcaaccagatcaagatctccgagcgtcacccgtacgccggcaacttcgtgttcaccgcgttctccggctcgcatcaggacgccatcaagaagggtctcgaggctcgtcaggtggccgccgggcgcgctggcgctgatcttgacagcttcgtgtggctcgtgccgtacctgccgatcgacccgaaggacatcggccgcacgtacgaggccatcattcgcgtcaactcgcagtccggcaagggcggcatggcctacctgctcaagaccaaccacaatcttgatctgcccaagcgtctgcagatcgaattcgacaagatcgtgcagaactacgctgacacgaccaagaaggaagtcaaggacggggatatctggcgtctgttcaaggacgagtatctgccggtcgaacagtccggcatgaccgcggccggtgtgatcgtgggcgatacgcatgacgcctcgcttgagccgtggggccgcttgaagctgctcaaggtggccgtcagttccggggaggacggttccgataccgtgctcaaggcccgcctgctcgaccgcggcgtgaacgtcggggtcgatgcgcccgtggagcgcgaggtctccggcatcggcaacggtccgatcgccgccttcctcaacgccatttccaactttggcgttgacgcctcgattatggattacgtggagcacaccatgtccgtcggcaccgacgccatggccgcctcgtacgtggaatgccaggtcggcgaggccgatgatgcgcagatcgtgtggggcgtcggcatcgattcgtcgatcaccaccagcgctctgaagtcgattatctctgccatcaaccgttcccagcgcaagcgctgagcgctaacaacaaaacaaagctccctctgattgcatcagagggagctttgttgtctgtgcttacttactactgggtgacgccgttggtgccggtgttcccgccggtgcctccggaattaccattatcgttgccggtattgttcccgttgttcccgccggtattgccgggattgttgccattgttgccatctccgccggtagtggtgccgggataattcggacactcggtggaatagctcggattggcgaggcactgctgggcgaactcctgggcctgctgttgcttcttggcttcctcttcggccgccttctgctgtgcgtcctgctcagcctgcttctgcgcgtcttcggtggactgcttgttggtgttgttggacaggccgctgctctgtcccttgcccaagccccaagtgccgtcgggtccaccgatcttgccattgtctttagcggtcgggaactgctccacctcggtaccttgcaaggcctgagccatgaactcctggaacaggtgggcggggtatccagtggaagagatgccgtatccggagaaggccggcaccgcctgcggattgcccttatcgtccgggttccagatagcccacacattcatcatgctgggggtgtatcccacgaacgacgaagccatttcatcgttggcggtaccggacttgccggcgatgggtcggcccagcatgttggatgtgccggccgccgtaccgtacgtggtggtgccctgcatggccttctgcaccaaagcgcagtcgttggcatcgaacaccttggtgcctttgctgggcgcgttgtacatgtccttattgttggaatcaagcactttggacaccatgtgcaaggtgctcttcacaccattgttggcgatggtcgaatggccttgcgccaaatcccacacggtcagggcgttgatgcccagcacgttgtacatggagttttcatcgatatcgccctgaatgcccgcttcatgggcgattgcggccgtgcgcttcggcgtcagatgctcattgacgttcatgaacaccgtgttcaccgagttggcggtggcctgatacagattgatgttgccccagttgttctccagagcgttattcacctcttgatccaagccggtgaagtgctggtgggaattgccgttgaacaacgtatcgaagctgacgccggattgcgcggcccccagcaaagcgaacggcttcatagtcgaacccggttcgaatacggcctgatcggcattgttgagctgcttggacagataatctgaaccggcgtatacggacaatacttcaccggtcttcgggtccagcgctatgccgccgatttgcagggattcaggcatgtcgtccagacgggtgtcgccgatggactgcataaggtcctgcttgctcttgtcgatggtggtgatgatcttgtatccgccggtatccaaatcctctttggtaaaggccttggactgcaccagctcacggcgcaccatatccagcagataaccgttcggccccgcgtattcgttttgctgcgccaccgcggcagtctgcgggaacttggcatcagtgtgctgcttggcagtgatgtaaccatcctcctgcatgatgttcagcacacgcttgaagcgcgatttggccatatcggcgttatcggccggatcccacgtggacggtgacggaataatgccggcgatcatcgccgcttcagacagcgtcagatccttggcgtccttattgaagtatgccttggccgctgcctggatgccgtaggagttgcggcccagatagatggtgttcatgtaattgcacagcacctcgtccttggactcggtttgcgcgattttgatggccacgatggcctcgcgcgccttgcccacataggatgtggtttcgcccatgtaataccgctcggcatactgctgggtgatggtggaaccaccttggcgcgtgcccttggtcacattattaatgaatgcgcgggcgatgcccttcagatcaagacctttatccgtgtagaacgtacggttttcggacgccacaatcgcgttgccgatgtagtccggcagcccctcgcaagagatgattgaacgattctgttccgcgtaggagccgatcgcggtggtgccgtccgcgtaatacacggtggttttctcggccaacgcgaacttttcgggttgcgggacctcggtggtggtgtacaggtatgcgaatactgcgataccggccagcaagcccagtccaatcagggagaagaagatgcccagcacccatttcagtacacggtgcttgccttttcctgtgttctttttcttcctgttcggggctcgatggctattggaagccttgtggcttgcgtggcgggaacggctctcctggggcgtataggggccctcctgtgcggagtggtcggctctgctttgcgcggtgcgcggttgcctcagagcggggccattgcctcccgaatgtgcacgacgagtataagaagccatggtgtccaccgtaactgttggccttgaacaatcgtttgacgtgagcgtaaccacacgcatttatgccggtatttttccggaattcttacaattgggcacgttccttgatgctgcatgaatattgcctgaatgcgctggttggcctgccgtgcgacccggcgcgcacgtttcgtgtcgctgcgctggtccatacgtctccatagacttatccccagcctccacgcggcgctatgtcacccaactcccccagggcaggaatgcagcaagggtaagtggcctctgacgggtgcgtggaggttttccatttgtgcggatttggccgtgagctggcacgagcacggctccctgtccggggcgcggccgtacagtcgaacgtatgaatgacgcacagacccctagaattcgcgacccgcatgcggcggtcaatctggtcggctcaggcgcagcgcagcctgactcgtcgtcgaacgttgttgacccattggctgcgctcggcccggtctccggttcagatgcatcggcatccacatcaggctccttaggggatttcaggccgctgggcatggacgatgcggatggggcatctgatatcgaccgtggcttggcctggcttgacccgctcaccgtgcgcccgcgaatctccagccgcgtactgtgcgtggtattcggtctgctcctgatcgctattggcttcggcgtgtggtgggggtgcgtgtttaccgaaaacggacaatcgtacgacgaactggtctggaaaaacctgcacaacgatgtaccgtcctggaccaccggcatgatgaacgccgtcgcacaatcctggctggttatcgctgtcagctgcacaattgccgcaatcggcattattacggcgctgattcgacgccgctggtggttggccgggcaaatcgccgtgttcgccgtggtctgcttggccgtcacccgtatcaagggtctgttgccgcgtccgttcatcatcaacactgaatcgcctgccgctaattccgcgccttccggacacacgatgctggccgcagcctgtgcggtgattctgctgcttaccgtgcctcgcgcggttcgagctttggcgggcgtcatcggcgtggtttgggcggcgaccgtcggtgtctctgtgatatacgggcaatggcatcgcccttcggatgtggcgatgtccatcctgctggtggcgggattggccctgctcgctctggcggttacacgcaagtccggcatggacgagccgggccaccgcgtctcctcagtgagtgtgcagatcgtcggcagcgtgttgattaccgggggcctgctgttgctcgcctacagcggttatgtgatctggcaggtggtgccggggctcaatgtcagcgccagttgggcggttcagggggcgaatgtcagcgctgttgtgggcattacgggtgtggccatgctcgcattcggactgttgctggccctacgtcagatcactgcagcgcccttaagcaggctgggcctgatcggcgctccgccggcaccgcccaaacggtaaaacatgaggtgcgaacggccgaatttgcccggcacaacggcggaatttggcagttggatatgattcatgagtattatgacgccagaaacgtcgtgtgtttcgcgcaatacataaggagtgggtatggctaccaaactggtgattgtggagtctccgaccaaggcccacaagatcggtgactacctgggcaaggggtacaccgtcatggcgtcggtcggtcatatccgcgacctcgcgcagcccagccaggtgcccgcggcagacaaggccaagttcggcaagttcggcgtggacgtcaacgacgggttcaagccgtattacatcgtcgacggcgacaagaagcgtacggtcagcgaactcaaatcggccctgaagaacgccgacgaactctatctggcgactgatgaggatcgcgagggcgaggccatcgcgtggcacttggtgcagaccttgaaacccaaggtgccggtcaagcgcatggtgttccacgagatcaccaagaacgccatcaacgcctccctgaacaacacgcgcgacgtggacggcaatatggtcgacgcacaggagacccgccgcatcctcgaccgtctgtacggctatgagctgtcgccggtgctgtggcgcaaggtgggcccgggcctgtccgccggccgcgtgcagtccgtggccacccgcctgatcgtggaacgcgaacgcgaacgtatggcgttcaggcgtgtgccgtactgggatatcgtcgccatgttggccgcgcctgacgcgctgggggagcgtgccgaattctccgcccgcatgatcgcgctcggcggcaagcgactcgccggctccaaggatttcggtgccgacggccagctgaccccggacgggttcgcggcgaacgttcgccagcttgatgaggctggtgccactgccgtggctgaagcgctgaggaccgccgatttcactgtgatgtcgatggaaaccaagccgtaccgccgccgcccgcagccgccgttcaccacctcgaccttgcagcagaccgccggcaatcgcctcggcatgggtgctcgcgtcgtgatgcgcgcggcccaaagcctgtacgagaacggctacatcacctatatgcgaaccgattcggtgacgctgtcgcaggaggccatcaccgccgcccgcaacgccgtctcctaccatttcggcgacaagttcctctccgccgagcccaagcagtacgccaccaaaaccgctggcgcgcaggaagcccacgagtgtattcgcccggcgggctcgcgcttccacgacccggatgagctggcttccaaacttcccggcgaccagctgcgcctatacacgctgatctggcagcgcacgctcgcctgccagatggctgacgccaccggctccaccgccaccgtgcgcctgtctgcgccggccggccccaccgagggcgaggccgtgttccaagcgtccggcactgtcatcgaattccccggctttatgaaggccacgggggaggggcgcaagcccaaagccgccgctcccggcgctggggctggctcggaccaggctgctgccgccggcaagacggacgtcaaggccgtcaggggtgacgcctccgaatccaacacctccctgccgccgatgagcgtcggccagcaggtcgaggcaagcgacatcgaaccggacggccatgaaacccagccgccggcccgttataccgaggccacgctggtcaagacgctggaagccaaggaaatcggtcgcccgtccacctacgcgagcatcatctccacgattatggatcgcggttacgtatacgagcgtggccgtgcgctgatccccagctggctcgccttctccgtgaccaagttgctcgagacgaacttccccaagctggtcgactaccagttcaccgccgagatggaaaacggccttgaccgcatcgcccacggcgaggaatccggccgcgactggctcacccacttctacttcggttccggcgagggcgccgcccgcaacgccgacgaggcgcacgaaggcctgcaacagcaggtcgcgcagctcggcgagatcgacgcgcgcgccatcaacaccatcgacatcggcgacggcctgcacgtgcgcgtcggccgttacggcccgtatctggaagacatggagcatctggacgtcgaaggcaacccgaagcgcgcgtctctgccggacaccatcgcgccggatgagctgacggtggccgtggcccgcgatttgatcgacaaccactccggtggaccgcgcgagctgggcgttgacccggtatccggcggtaccgtcgaggtgcgcaatgggcgtttcggcccgtatgtggcgctggtgccgccggctgaggcttcggctggcgctgctggcgatgctgctggtgcttctgcggccaagaagggttcgaagaaggccgcggccgccgccgcgtcgcgcccgaagatggcctcgttgttcaagacgatgagccctgaatcgctgtcgctggaagacgcgctaaagctgctgagcctgccgcgcgaagtgggcacatacgaggaaaccaacgccgaaaccggcgaggtatccgaatgcacggtggccgccaacaacggtcgctacggcccctatctgaccaagacgggtgccgacggcaagtcggagacccgctcgctggcctcggaagacgagatcttcacggtcgatatcgacaaggccaaagaactgttctcgcagcctaagtacggccgcgggcgtggccgtggtgccgccaagccgccgctgcgtgatttgggcaaggacccgaacaccggcaagaacgtgaccatcaaggacggccgtttcggcgcgtacatcaccgatggcgagaccaaccgtacggtgccgcgtcagtacacgcctgaatccatcacccctgatgacgccttccgactgctcgccgaaaagcgtgcggctggtccctccacccgtggccgtcgcggtgctgggcgtgccggtgccgcgaagtcgggagccaagggagccaagaagggcgctgcttcggctgcgaccaatgccgccgaggccaagcgcgccggacgccgtgccgaggtgaagaagctggcaaacaagggctggtccaaccagcgcatcgccgaaaagctcagctccaccgccgccaccgtcaagaaggatgtcgactggctgaccgccaacgagggctacgagcgccccgccgtaattcccaagcgtggctgagcggaattattgctctacttgcgtttcaaggggctgatttctcgttttgagaatatctacttccgcttcaaggggctggtcatctgctgaaccacgagtatgaacggctccgcgccaacgtcattccgccgttttgggacgttgtctacttgggtaacagcccctcgaaacggaagtagaccttcagaaaagaccaaatcagccccttgaaacggaggtagagctggtttaactgcctgttgggcgcaactctgcgcctaacgctaaggtcaatagcatgagcggtctgtttgtttcgtttgaaggtgtcgatggcgtgggcaagaccacgcaagtcgagcggctgcgtgcgtatcttgaggctcaggggcgtaccgtggtcgttacccgtgagccgggaggcactgcgctaggcaaggccattcgccaactgctgttgcacggtgtggatgggggcgccgtcgacatcgcaccgcgcgccgaggcgctgctattcgctgcagaccgagcccagcacgttgccgaaaccatccgcccggcattggagcgcggtgaagtggtgatcaccgaccgctatttagactcttccttggcttatcaggccggtggccgcgaacttacgccagaagagattcgagccttaagcatgtgggccaccaacaacctgctgcccgaccgcacatatctgctggacatggatccggcgctttcccacaatcgtcttgagcatgccgaagatcgcatggagtcggccggcagcgaattccagtcccgcacccgtcaggcgttcctcgacttggccgtggccgagccgaatcgtttccacgtgatcgatgccagccagtccatcgaacaggtgtggtccgccatcgaagcggacattcagacactgctgcgggacaatgttgcagatgtggatacggtgatggcgcgatccggggcgtctacaggagccgtgacgatgggcggtgtccgatgagcgtatgggattcactagtcggccagcagccggtaatcgacatgctcagtcgcatcgcgcagggcgacccgaggcaaatcacccagtcgtggctgatttgcgggcctcccggctccggccgttccaatatggcccgagcattcgcggcggcgctggaaagccccgaccacggcatgaacgatgagcccacgcgcgtcacccaacaggtgctcgctggcacccacccggatgtcacagtgctggccaccaacaaagtgaccatcggcatcgaccaggtgcgcgagatcatcaccgcctccgagcaaatgcctgccacggcaccatggcgcatcatcatcatcgaggatgtggaccgcatgctggagcgcaccaccaacgtgctgctgaaggagatcgaggagccggctgaacactgcatctggctgctgtgtgcgccgagtgcccaggatgtactgcccaccatccgctcgcgcacgcgcatcgtgaacctcgccgtgccctccacccaggcggtggccggattcctgacctccaccaccaatgtcgagccaaaagtggcgcagcgtgcggcccgtctggccgagggacacatcggcatcgccaagttgtacgccactgacgagcaggtgatgacggatcgcgacgaattggtggtgggcgtactgaacctcgctcgcgcctcggacgcggtgctgctggccggcagccttatcgacaatgccaaggcccaggccgaggcggacgcaagccgcatcaccgccggccaggaagcggaattccgccgcatcaacggactggcaccgaacgaccgcatcccgccgaaactgcgtggcgcgttcaaccagatcgccaagaaagacgatgtgaagcgtttggtcacccgccgtacgcgcgacgtattggatcgtgcgctgaactccatcgcctccatctaccgggatgtggcggtgctgcagaacaatgcggaggattcggtgggcctcatcaacctggagaaccgctcgccgatcaccgaattgtcggtgcggttgaaccgggccggtgccgtgacccgtctggacgaagtggcccacgcccgcaagcgtctagccggcaacggcaacccgctactggtattcgaatccctcttctgcgccctaattccataacccgacgcaaccagccccctctgacgagggggctgtcgagcgcggcgagactgggggagagacccccgtaacgcacagcccccagtacgtcacacatatgagcgatactgggacatatgaagatttccgccgatttcaccgtcattccggacgattttgccaaggccgccgcgcctgagtacttcaacggcggcgtgccggtcgtctccttcccgttctacatcggtgatgtgaaccccgaggcccgttacctgcactgggagttcgtggacccggattcgattccggtctgcggcttcgagtggattcactggtccgtggccaatctgccgattgacgcgctgatgtacgacttcaatgattcgcatgcgttggccatcccgccggacttctcccgtcagctgccggccatgattcccgagaccgtgcaaggccgcaattcttcggcctccaagttcttgggccgcagcactgacccagcggtgatcatgcggtacaacggtccgcagccgccggacaaggaccacgagtactacctgcaggtgtgggccaccaagaagccgttgcccggcttgaatcagggcttctggctcaacgagctgttgcacgcgctgcgcaacagcggcgaagcgcccgacaccgacggcatcttcctgaccggtaaggcgtgatttttagttggcgtatgtgagctccctctgatgagggagctggccgccgtaggcggactgggggagagacagctagagtgactacccctcagtctcgctttgcgagacagctcgtcctgcaattacggacgggctaccgcccgcaacatctgtggtgggacttatctcccaccctcgcctacaaacagcccaccgggctgtttgctgaacggctcagcctgacaaggggagcttgaataagagaaaggacaccatcacactatggcctgcaccacgattctggtaggcaaagacgcgagctatgacggttcgaccatcattgcccgcaacgaggattccgcgaacggcgagttcaacccgaagcgcttcatcgtcgtgaaaccggaggaacagccgcgcgaatacaaatcagtgatctcccacctgaccatcactctgccggacgacccgctgcagtacaccgccgtgccgaacgcggacctcaaggaaggcatctggggcgaggccggcgtcaacgaggcgaacgtggcgatgagcgccaccgaaaccctgaccaccaacgagcgcgtgctcggcgccgacccgttcgtggaatacacgccggccaggggcgatgagctcgaggtgcccggcggcatcggcgaagaggacttcctgaccatcgtgctgccgtatgtcaagaccgcgcgcgagggcgtccagcgtctcggctcactgctcgaggagttcggcacctacgagatgaacggcgtcgccttctccgactccaacgaaatctggtggctggaaaccgtgggcggccatcactggattgccaagcgcgtgccggacgaggcctacgtgaccatgccgaaccagctcggtatcgacgaattcgaccttgaggacgctctgggcgaccaggaagcgcacatgtgctccgaagatctcgccgaattcatcgaaaccaaccatttggacctcgcggtggagaacaccaccccgttcaacccgcgcgacgccttcggctcccactccgactccgaccacgtgtacaacaccccgcgcgcctggtacatgcagcgcttcctcaacccgtacgacgaggtgtgggacggcccggacgccgaccacaagcccacctccgacgacatcccgtgggcccgccagcccgagcgcaaggtgaccatcgaggacatcaagtacgtgttgagctcccactaccagggcaccccgttcgatccatacggccagctgggcgatgagcgcacccgccacatgtaccgcacgatcggcatcaaccgccagagccagcttgcggtgatgcagatccgcccgtaccgcccgcaggcctcccgcgccatccagtggatggcatacggctccaacccgttcaacacgctggtgccgttcttcccgaacgtggacaccacgcccgcttaccttgaggacaccaccacccgcgtgacgtccgagaacttctactgggccaaccgcatcatcgccgccctgtgcgatggcgccttccgctccacgtccaacgccgtcgagcgctaccaggagaagaccggtgcgatgggtcaccgcttggtcgccgccaccgacgagcagatcgcccgtctgggcttgacggccgccgaggaagccgcgcagtctgctgccgaagaggaattcgaggccgacaacgtggatggcgatgtgcagccgatgaccccggacgagaccatcgccgcgctgcgtaaccccgaggtgcgcgagattctcgccgccgccaaccagaccatggccgaccagctcaaggaggaaaccgacaagctgcttgactccgtgctgtacactcgcagcatggaaatgaagaacggcttccacatgtccgacttttagtccgtattgagctcccctccctgaggggaactgaccgcgaagcggactgagaggctaagctgttaagaaacagcccagtgggctgtttctaggcgaagaggcggcggcggccgccccaccaccccgctccgccatcatcaacacagaaaggcattaaatgaccaccatcgaagacttcaccagccagtacggcctggtccagaagatcgacgcattcggttacatgaagtacctggctgagaacccggacgccccgtgcaagcacggcaaggtggtgctcgtcaccgccgatacgccgctcaaggcatcgcgcggcgaaggcaagaccaccacgaccatcgccttgatcgacgccctgaacaagcgtggcattgatgcggccgccgtgctgcgtcagccgagcatgggcatcaccgcagccggttccaagggcggtgcctccggcggcggcaaggcatccctgacccaccccgagctcatcgactggggtctgtgcggcgaaatgggcgccatcgaggcggcccagaacctgctcgtctccttcgccgagaaggccatcgatgaaggcaagcttgacacgattctcgtgccgcgtgtctccgaggtgccgagccgctccctgcgctccaccgccgtggactacggcaagggcaacgtgccggagaaggtcgtgctcacgccgacctgcgagctcatgcagatcatggtgctctcccgctcgatggacgagatttccgagcgtgtatccaagatgatcgccggcaccaaggacggcaaggccgtgaccttcggcgagttcgtggacctgtggcgcatcaccggcattctggccgacgcggtcaagccggccaagaccgagaccgtgaacggctccccggtctacgtgcacggtggcccgttcgccaacgtgtccatcggcattccgacgctggtttccgtggaaatggcctgcgctctgcatgacgtggttgtggtcgaagccggttacggcaccgacgccggtgcccagaagtggctggacatcgcctgtcgcgagtatggcgcgcagtggccgtccgccgccatcgtggtgacccgcgcctccacctggcgcgacgatcccgagctggcctggcgctacccgttccacgtgcagcgcctggagaacctggacattccgaccttcccgctcatcaacctgtgggaaggcgaggacgatcaggttccgtccctgaaggccaccgccgacgagctgggcttccgcacgccgatcatcggcaacctgttccgcgacggcggcgaggcgctggccccgcagcttgacggtttcgtcgacgcgctgcagaacggctccatgccggccgaaccgcattcgcacaagggcatggccctgaccgagaacgccaagtgggtggccgagaacgcctacggcgtaccggccgagcgcgtgatctacaagccgggcttcaccgagtccgtgtccgaggccatggaactgtgccagagcgcaggcatctcgctggatgatctggcgttcgtggcggtcaagtccccggcgaccatgaccgacaacgaccgcgcccccgaagaagagcgcaccgtgaccctgaagaaggtcgaggtgcatgccggtgccggtctggtccacgtcaacctgaccaccagcctcaccacccccatgcccaagattgtgtgatgacaggcatgaggtgaggtaactcgctttcgaggggcggatttccggttttccggaggtctatctgcgtttcgaggggctcttcgattgcgaaacccggagtatgaccattgaaattgcaatgtttatactccgggtttcttgttttaaaagccccttgaaacgctagtagagcttctgaatgttggaaatcagccccttgaaacgtagaaagcccgccaccggcgggctttctacatctgagcttccctctttgagggggagctgtcagctaagctgactgaggggagccagaatacgcaaactagttgccaccctgagccattaaacggaaagcccactgggctttccgtaggcgatgcgaacagctatgctgcgaggggaatggtggcaactagaagttgccgccattccagccccaatcggtggtggcggtgtagcggatgtaggtgcggtcctcgggaatgccgagtgtggagttcagcgcggccataatgctttcggtcagcttttcccaagcagagcccggcacagagcggccgaatacgttgacctccacataggcggcgggctggtcatcgctaccaccgaagtagattggcatattgtcctcgaacgggcacatcagccagccttcggacttgcccggcacggcggtaatcgccttgccataggcggccttcaacgcctcgcgctgctcaggggtggtggacacggacacatgagtgtgaataacgggcataattcctccttgattcggttcacttccagtctagcctcagcggctgctgttgaacatggcatgcggacgtaggaagctgcttgcagaacggaccggggcaaggccaattggggatattattggcctttccagccaatacacgttccgcagtcagcccaatagtgttgaatactcttgtgagaaaactgattgaacagctgatgaagttcggcattgtgggcgttatcgcctttgttatcgactggggtatcctcaacctattggttggcatattccacatgcacaacgtgctggctgccaccatctctttcatcatctcgctgattttcaactatctggcgagcatgaaattcgtattcaagcatcgtgatgacatggcacgctggatggagatccttatcttcgtggcgggtgctgtagtcggtctgttcatgaatgacgcgattatctggatttccacctatggtatgaaccatgatgcctatgtatcgcagcatgccgaatatctgttgcgcaccaatatcggcaagttggtggccactgccgtggtaatgatctggaacttcttgattcgcaagtggctgctcgacgatacgcacaccaatgcgatgaaccgtctgaagtccgctgaaaatcgactgaatgccgaggagcttgaagccaagtggcagaacagcttctcccacaagctcggcatctggtccttggagcacacgcccaaaggctggccgaagtagcgttttgacgtatgctaagccccctcgtcagagggggcttagcatacgtctcacacactcacttcagtcagggtcggctgctcggtggagcccttgatctgcttgaagccgatcagtgcaatcaccagcgaggccagtgccaaggtggtcaccaccatgaagcctccgtgcgagcccatgcggtcgatgaactggccggcaatcgccgaaccggcggaggagccgatagaattcatcgcacccatccacgccatgccctcggtcaagcgagagggcggcaccagatgcaacatgagctggttgccgttgatccacgtcggggcctggcatacgccaataatcaagtagatgatcatgatcacccacagatgcttggcgaacaggaacgtactgatgccgatgttcaccacggccaggcagaagtagaagcgcttccacagggcaatcgaccagttcttcgcgccatacaccaatgcgcccatcagcgagctgaaggagaagcaggcaaacacaaagcccgtgtactgcttcatattcgcttcggtggcaaacgcgatgatggagatgcccgtagccgactggaacgcgcccaaaccgaaccaggtgacgcacaccgcaatcagacccggaccccaaatggacgccttcttgcccgaacgcgcatcggcgaccgcctgcttaatggctgcgttaatcgtggcctcatcggtcacgccttcacgctcaagacggcggcgggtctcctcggcggcggtttccaccttcagcgcctcagccttggcggcctcgcgctcacggtattccttgcgggagatgccctcggcacgcgccagcgcggtctgcgacggtggctcagtggtcagctcggtcaggaacatcagcgcaccgaccaccacgcacatgccggtgaacgagaacgccagcaaaccggagatcacggccagcgtggaggccagcggattaccgatcacccacatgcattcgtcgagcacgccgcacagcgacagcgcgcggttcgtgcgctcccggtcacccttaagaatcttggtccagcgcgcgcggctcatcgcgccccacggcggaatggcggccaggaacggcgtcagacagtacagcacccattccggcgcgcggttggtaatcgccgtcaccagcgcgatggcggccacaatccaaacgataatcgtcggaatcgagacctgcctctggccgaacttgtcggtcagcttgcccagcagcggcgtggccacggccagcgcaatcgcctgaatggcggtgagcatgccggccagcgaatagttgccgtaataatgctgtacggaaatggtgatggtcatgccgaccatcgggaatggcatgcaggcgatgaccgagccgatggaataacgggcggtatgcggaatgcgcagtagttccgcatacccaccaaagactttgtggcctacttccttgatgccggccagaatggtgctcgagttcgagttggacgagttattggacataacagcactacgctcctttccgctcccgattggatgtcccccgctggcgtggcgttgccggcgaagccctcatcgaatgatgtgttgtccatggtcgcgcaaagtttgcgtcggattttcccatccgcatatttgcgtcacggatactctacgggtgtccactccgcgacacgcggtagattggagatattaagacaacgttctcatgcccttcagggcgggaagcagaaaggcggctcatgagcgctaccaccatccatttcgtccggcatggcaaggtatataaccccgaccatctgctctatgagcgactgcccgacttccatctttccgaccttggccgtcgcatggcccaagccaccgccgcgtacttggccaagaatccccaaaccaatacgattgcagccgtctactcctcgccgctcgaccgtacgcgcgagaccgccggcgcgattctcgatgcgctgaaccccgtgcgcgaggctcgtggcgaggcttcgctcacgctcaccactgatgaacgggtgattgaggccggcaacgagttccgtggcaagcgcatcggccatggcgagggcgcgctgtggaagaacggcaactggaagctcgtcaccaacctgtacaagccgagctggggtgagtcctatcagcacatcgcggcgcgtatggacgacttcgcccgcgagaaggtggcccagcaccccggcgagcagattgtggtggtcagccacgaatcgccgattttcagttatcgccattatctggagaccggccatcccgagcactggatgttcctgcggcacacggcgctcgcctccgtgacctcggtgacgtacgacaacgaaaccggccgtgtgatgtcaatcacgtatgtcgacccagcagccaacgtcaagtaacggcacactggtgttaggacattggctcccctcggagaggggagccaagacgcactgcaatcgagtggtggacgcaaaggagcatagatgaccattgaactcaatcgtgaggcaatcgcacaggtcgcggcattgccggcggtaactgaggccgccgaagccggctcggcgctgatcagcctgtggccgctgaccgaagccatgcagatggacaatgacgcaaagtacgcggagaacctgcaggtgcgcgtcacccgtgcattcgcccgcatcctgaccggcgaggacgtcaccgtgccggacgccgagttcgtctacgaaggtgccgatgagattcccggtcgcccgcagagcatcgtggacgccctgctcgccgccaatgacgcctacgacacgatggccgactacgccgagtccggtgatgccaggctgatcgttgaggcggccgacgtgttgggaatcgactgggattccgcgacggcggaatcggtgagggaggcggtcgcggccatggaagcccaggtcgaggccgacgctgaagccgatggtcgtctggccacgtctgccaagcccgccgatgtggctgttcggttcgccaccgcgctcgccgtgtgcgatgcgttattgggtgaggtgtccggtgatgctgtggccgatggttcagcggacagtgtcgccaatgctgccgccaagattctgccgattctgctctacgtcaacgaactgcgcgagcagtgctcggtgccgcgcatctgcctgaccgacgagcagatcctcgggttgcttaatgcccgtgccaaagccgccgacgcagacaccctgaccgccaccgccgaatacatcgctcctctggccgttgccgaatggaacaagcaccgtgaggatgtgctctggaacccggacgaggctaagcgtcaggccaaggaagaagacgaaaagcgcaataaggaggctctggccgccaagttcgcgcatgtcaaggatgatcccggcaaagagaccgtggagttgtaaagagtaagggcgttgctctggccgatgcttcgctcgtaacggttagaggcctggtgcctctccctccgtcatcgctttgcgatgccacctccctcgtcagagggaggtggggttactgcttatcgattaccgagccgcgatcggtcagcgtcgggtccacgtagatgtggcgggttgtagaatccgggttttggatgcggttgatcagcaggttgatggccgcctcggccagatccttatcggacgagcgcagtacggtcagcgggcgggagctgggcgtggcaaagccgttgacggagagcatcgagatatcgtccggtacgcgcttgccgcggcgctccagggtctgcgcgatggcgatcgccagataatcggagtgcaccagcatggccgtcacgcccgaatccagaatggtgtccacgatttggttgacgtccctggtgttgtacggctgaatgccggtgatggtgaacgggcattcgatggcgtcgctttccgtcacgatttgcttccagccatcctgaatcagctccgaagtcggtgtatcggtgaacgccgcgcccacacgggtgtgaccgtgttgcaggaagcgcaccgccgccttacgcacgccatagggatggttggtgcgcactgaatcgacgtagcgggaacccagcagcggcagatcacgttcgatgatcactgtcggcgtcttcgtctgctcaatccaattccacgtgtatttgccgcattccggatgggcattgggggccacgacgagtgatctcaccgattactcaatacacaaacttgaggggagggctcccggaccggtgaaggaggcactgatgaacaccgaacgattcgaccttgaggatgagtctcaggactggtcggcgctcttcgccggtttgacggcctgaggcacttccctccgcctgagtgtttgcgcaaagggcgattcctatacggggatcgccctttttctgcaattggctaattttggcatattttgccccgccggcgacggcgtattgtgtggcgaaaagagtttcgtagttcgtagtaaaacggaacatcctcatggatattctggttggtggattcggcaaactgcatcatgtggcttgccccggcatcgaacaattggtattggatgccggcggcgataacagtggcgacgccaaggtgctacgccgcgaacggctgctgtcggacgcgccgtcgcccactgggtgcagccagtgccggacggccgcgtgctgaccagcgatttgggtgcggatcgcgtttatgtgcaccattgggagcacggcgaactggtgcgcgagggggaagtcgtgcttgagccgggcactggcccgcgtgaccagcatctattgccagtcgcatccgatgatcttgcgcacgattggcgcgtggcggtcgtcggcgaatggggtggcacggcctttgtgcatcttgcggccatactttgcgattcttttttgttaaggaagtatcctatttagtgaaaagtatcgttcgcacaatgggaatgggaaacttatgggcaatggtgtcgatttgcgtatgctcgccaacaatggcggcagcgtggtaatcagcgattacggagcgcatctgttgcgctgggccccggccgggcaggcggatgtggtgtggacgccgagtacgtggcatatcgaggccggtaagtcgctcggcgggggagtgccgatctgcttcccgtggttcggcccgggttttgcgcatggcaagcagctggcactcaatccatcccacggttttgcacgtctgcgtcggtgggcgttggacgagggttcattcgacgacagccacatacggtatgtgttggattcgcagcagctgaacgacaatgaagtgccttggttcgatgacgagccgggtgctcagtttcatgccgtgtatgacgtgcaaacgggcaatgcgctgaccatgagcctgaccgtgaccaacaccggcacggcgcctatgtcgtacgaggccgcgttgcattcctatctgcatgtcggcgatgtgtccggtgctcagctggtcggattgcagggagcgacgtatctggatgccaccgaagaagggtttccgccgaaaacacaggacgcgcaagtggtgacgtttggcgagcagccggtgaatcgtgtgtattactcggatgcgcgtctggaactgcgcgatgacatgttggggcgtgcgattcatatcagccgtaccgggtcgccgcaaaccgtggtgtggaatccgggagcggacggcgacaatatgagctacaccaagccgggcgaatggcgcggtttcgtggcggttgaagcggcggtatgccgcgaccgcatcgtgacgctgggcccgggagaatcccatgtgatctcccaaacgctctccgtaggcagcttgtaggagtagctcggcgcagcgtccatcctccaccgtaacgcattccggggaatgttgcgcgaagagaggggccgcaataacgcacaatgccctgtgtgctggaatgatccagtacacagggcattggcttactgaacggcggggaatactaccgccgcttgatgagtggggcctcattgttgggcttcatgagtgatgaggcgaacttcttaagcgaacttcgccggcgtcagtcactggccttgccagggtttctgtgcgttgtcatcggtgggagccgtgtgcggagacagcacggtggacccatcatcaacgttttcgggaatcggcggaacctggccgtactgtggggcctgagcgtcgggctggccgtactgcggggccggggtctccggctggccgtactgcggaaccggtacctgaccgtaatcgggcgtaggcacagcgggctggccgtagtcaggagccggtgcggtcggctgaccataggccggggctggctggttgaagtcaggagcgggtgcgttcggagcggcgaagttcggagcggcctggttgaagtccggggttgcgggagcgccgtacggtgcgccgtaagcaccctgaggcatcggggcagctactgcgtcatcgtcgaaacgtgcgccttccggcttgctgggcatagccatgaacacgatgtagacgattgaaccagcgagcgtaatcagtccgccaatggccatggcaccgaggccgccggttgccatggctccatagctggagttgctaaggctgccgaaggcgccatacagtgctgcgccaccgccggcaaccatgatgatcatgccgagggccatcgcgccatagaagatggcgacccaccagccgggcttgtccgtgtcatgcagacggcgaacggcgagcgccagactgggaatcaggatggccagactccaaatgctggaaaggaacccgagcttgtcgtccgtggcactgctgaggaggctcagcaggacgctgatgccgacagaggccaacgtccaccaccagaactcgctgcgggaggcacgtcccttgaagaccacatacttcttccagaaacggaggaatgcctcagggaaggggcagtcgtaatacggcttgttcaacggcacggctgctgtggcagtgggagcggcgtactggttgtatgcgggtggcacctgaccgtaagcgttggcgtccggtccgggctggccgtaggtaggagccgcgccgggagcggggaattgcggagccgcattcgccgcgtacgggtcggcggcgggctgaccataggcgggagttgcaccgggcgctgcgccgggtgcggaagaatcgggagcgggctgcccgtatgcgggctggccgtaggccggctgtgcgggggacggagcgttgaattgcccataatctggctgtgcgggggccggagcaggtgcgccgtattgcggcgtgctgggattctgctgggccggggtgccgttgggcgcgggcatctgcggcaacggcacgttgttgggatcggtcattgattcccctttcataagacgattgcgtcgactcctattcttccatcgtttgggtaaaaaactcaacagttgcgccaaatggtgtcgaagccttgcgtgcgggcgtgtggatggcgccaaagtaggtgtcaaaacaggtgtgaagacaggcatcaagatatcgggcactaccaaagacaggcaaaagagatttcgttggaaaatggccgttttgggatggtgttggcccgaaatgtcaataacgaagcaaaagagcgaggagcgctgctctccgcgtccggcgcgcgcggcacaataggggattatgactgatgctgaaaacaccaaacccgaactgcccaagaacgttcgtgttcgcttctgcccgtcgccgaccggaaccccgcatgtcggcatgattcgtaccgctctgttcaactgggcggaagctcgcgccaccggcggcacgctgatcttccgtatcgaagacaccgacgccgtgcgcgactccgaagaaagctacaaccagattctcgaatccctgcgttggctgggtatcgactgggacgagggcatcgatgtgggtggccctcacggcccgtaccgccagtccgagcgtaccgccatctacaaggatgttgccgccaagctgctcgaagccggctacgcctacgagtccttctccactcccgaggaaatcaaggagcgcaaccttgccgccggccgtccggccgagttcggctacgatggctacgaccgcaacctgaccgatgagcagaaggccgccttccgcgccgagggccgcaagcctgcgctacgtttgcgcatgcctgatgaagacatcgccttcgacgatctgattcgtggcaccatcgagttcaaggccggctccgtgccggactacgtgatcgtgcgcccgaacggcgacccgctgtacacgctgaccaacccggtcgacgatgcgatgatggaagtcaatgtcgtgctgcgtggcgaggacctcctgagctccaccccgcgccagatcgtgctttaccgttaccttatggaactcggcatcgccaaggagatgccgctgttcggccacatgccgtacgtgatgggccagggcaacaagaagctctccaagcgcgacccggagtccaacctgttcaaccaccgcgacaacggcttcatccgcgagggcctgctcaactacctggccctgctcggctggtccattgcaccggaccgcgacgtgttctccatggacgagatgatcgagaagttcgacgtgcgcgacgtcaaggccaacccggcccgcttcgacatcgacaaggccatctccatcaacgccgagcacatccgtatgcttgagcccgaggacttcctgcgccgctcggtgccgtacctgcaccgcgacggtgtggtttccgccgacaactgggatgccctgaccgaccgtgagcgtgaggtgctgaccgccgccgccccgctggtccagccgcgcgtgcgcctgctgggcgaggtcgccggcatggtcggctccctgctgtccaccgaggagtatctggagcccgcggacgacgccaagaagcagctcaaggattccgccggcgaggtgctggacaaggccatcgccgtactcgaggctgtggatgaagctgactggaagaccgacaacctgcatgagaccctgaacaaggctctggttgaggagggcggctacaagccgcgtctcgccttcggcccggtccgtgtggccatgtccggacgccgtgtctccccgccgctgttcgaatcgatggagatcgtcggcaagccgatcaccgtcgcccgtctcaagggcctgcgggcgcatctgtgatgcgtcgtccaccgcacgccggcggatgatgggagcgtgacgcatggcgggcatccgtacatacggatgcccgctttcgcgttgcatggggtgttcccgcagaacggcggaaaatggcgcgacacgccgggatttgcgtgagagcagggtagcgcgtaatatatctacttgttgcgcggttcgccacgcagctggttgaaaaactgaatatgcccccatcgtctagcggtctaggactacgccctctcacggcgccaacaccggttcaaatccggttgggggtacgacgaacaactcttcggagttgctacgccaagccaaattggggtgtggtgtaattggcaacacagctgattctggttcagccattcttggttcgagtccaggcaccccagccaataaccctcgcggattagcgagggttttttgtttttacacgtcctgctcctgagatacggccgagagggtaatcctgaatagacaactctggggcaaagactgggctatagtcccaatccgtgactcaaaaacggcagaaatcccgcgtccgaacgtaaggggcgcgggatttctgccgtttcgggccgtgcaggaccggccgacatcgcgcgttgccgcgacttgagcgctgtccgatcctgaaaacgtgagggagaccgccctcgtttacttcttgaccgcgttgacggcgtcaacagccttctgcagcgacgtggtgtgctcgtggtaccacgtgacctgctgttcgagtttcttggtcgcggcctggtagcccttggtgtcgtcggccacgcagccttcgtacgtcggcagttccacggtcagttccttggacagcgcgtcgagagcggaggcgtccgagacgtctgccttggtcagagcggcggcttctgcagcatcgccattgaccaagttgttgtagtcgttggtggcgttacgtacgtcttccgaggcggcggcgcaggcggccactgcactatcgtactgagacgcgctgtatgcgcgggtgccgaacaccgcgaccgcggcgataatcgccaccgccacgatggcaatcactatagcgacccacttcgtcactcgcttgttgtgcggctgtgccgtcgcttctgcttggttctgggattcgggctggttgccgttcgcctgctgtgcgtcagtcatatttacctctccttctcactgcccctgtttgtatcttgcggagggcctgtttcaaacaacgggtatccaacatatcgaggagagccgagattgccgggcgtttcctactggttgcgctgtggcgtggccgtttttgtctcatatggcgaaagtatgcgccagaggctattgccggccggtgacccacggcgcatccgaatggacgtgcggaatcatcatcgcgatgaccgccagcagacacccgagcatcaccatcaagatgatgttctcgtgtccgtgcgcctgcagaagcgcgccggtcagcgcgccagacgccagcgccagcattacgaccgcacgccgcccgagcttcgactgctggtggccgtgtgccgaagcgtctgcgacgacgccggtcagcgtcatcgtgagcacggtggtgggcaggtccggcaccgacagcttgcgggcggtggagttctggatgcccattgccggggcgagcagcacgatcagcaggatgatgtgcaggtcgatgtgccgtgcggtggggaagttcaggctcggctgtgaggcctgggtggtctgtgcaagccgtgcaatcgaggagacgccggacgcatcgtctgcggggccggtgatgagctggttcaaaagatagacgccgattagcgcggcgagtacgaacgacgcctgcacgcaggtagaaaccaacagatgcttgacccggttctcctcgaatcgccggatgatgcgcccgccgataagcgcgccgaccatgaaggagacgagcgtcagcgccgacgtccaccagacgaagccttgggcatgggcgatcgaaaacccaagaaacacgatgttgccggtcacgttggccacgaacacatgccccagcgacaggtagctcagcgcgtccaccagcccggcgacgaacgtcagcaccaccaaggcgggggagagcagaccgtatctgtcttccttgcggggaaccaacgtgcgtcctgcttcggcaagatgtgatgtcatggttgcgacaaggctccttttcgggattgaaattatggcgagaacatgcgtcggtcgacgccgccactctactccctactcccgtacggttcctccggtttccgctcgtgcgcagatcgtcgggacggagaagacgccggtgatgcagatcgatgtgccgaaatcccgcagcgtggtctcgaccaagtcgggcaaggtgttgcgacgccgtatgaaggtggatggtacgccggagagcgtgccgatgtacccgtacgagatcgccacgcgcctgtccgatttgggacgtttggacttttccgcgcagccggtgccggatgcgacccgtgatgatttcgatccccttgaacgcgaccgtctgcgccggattatcggcacctaccaatccagtgaccgtaatttgttggaactgaccgatgaggagctggagaaatccctgcaattgacggtgaccgtcgatggcaagaccatgccgacgctgaccggtttgctgctgctgggcaagggggagtctctgaaacgcttcgttccgactcatcgggcgtctttccaagtcatgtctggtacggatatcaaagtcaaccaagactatgccggaccattgctgaagaccatcgagcaaatcaacgacatgttctctccttggaatccaagcgtcgagctatccgtcggtctgttctcaatgatggtgccggaattcgaccatcgggcgttccgagaggcgctggtgaacgccttcggccatcgtgactacactctgctgggacgtgtgcgcgtgcagttggatgatgcggggcttaccatcgccaatcccggcgggttcgtggagggcatcaacatccataatctgcttaccgccgaaccgcatggtcgcaatccctgcctgatggatgcgttgaagcgaaccggtctcgccgaacgtacggggcgcggcatcgaccgtatattcgagggtgctttgaactatggtcgtcctctgcctgattattcgaggtccaacaggcgtggagtgtcggtgctgttgcctcgtagtgtgcccgacaaggcgtttgtggaactgctggccgaggaacgtgagcgcagcggcaagtccatgtctctcgatggtctgcttattttggacaagctcaagagtgaacgtcgttgtggctttgatgtgttgtcgggctccctggacatgagtgaccagcgtctgcgcaccgtattggggcagctgacggaggcggggcttgttgaaagcgctggcgttggagctcgccgcacgtatatgttgggtgcgaaagtgtatcggcgcagcggtagggcgatggattacgttcgccaatcagacatcgatagggtacggtatcccgaactgatcatcaagttaatgcatgaacagaaatcagtgagcaaaaacgatgtgatggaattactgcatcttgaggggaatcaggcgtactaccagttgcgaaaactagtccttgaaggacgcgctaagaaggtcggcagtggacgcaacgtgcggtatgcggcagtacgttgaatgagatacgcagatcattcttgaacggttttctctgaatcccgagatttatctctgaattcagagaaagaatctcggaattcagagaaaaccagtgtgcgatgtggctattccgcttcaggaattatgtacgacttgaacgcggcctgcacctgcgatgccgtcagccgctttatcggtacgcttcctatgtggggcttgatgtggttcccgtagctgttcccatagcgcgtccttgtgctgtcggcgatgttccagatagttcacgtcatgctcctttgcgtgatgattcacatgattcgcgtcttcatggtggcgtctcccgccggcgcatgagtgactggtcacgctgtcagtggaatctccccgacggatatcccgcctatgcgagatatccacgccggcgtacggagattcgcatgttcgggcgtacgatggacccggttttttgcaggatgcggccaacgccttggatgggcatgggcctgcaaccatcgtgagccgccacgggcgttcggcgatcgccgggcggtggatcgagaaggatcgggcgatcgggaccgcccaccatccgaaaccatcgtcggcgtcgcttcagcggggcatgccgacggttcgcgttttccggcaaagggtcggccggcgctttcctcattgaagttcgacgggtcatggtcccgccgtgagggttggaccggtaatcgggtgatgccgaacgtcccgacgtgtttttgttcaataggaagttgaggttttagtcacgaaggtttttcgggtttaggcggaaaggcatgccgaccacccgtgggccttagcctgatggtgcttctagttccattcgggaaaggtccggaaaggcaatgatcagcatgccccaaatacagtctatccgttcgcgtcgcaggaacggtgagtccatcgcctcgatagcgcgcagcgagagggtcagcgagccgaccgtgcgcaagtatctgagggtcgacgacctatcggccaggccgcccgtgaggcgacgtcgtggttcggtgatcgacgagtggctgcccatgatcgagggcatgctcgccgaggaccgggagacctggcgcaagcagcggcataccgcgacccgcatccatgagcggttgcgcgacgagtacggggccggggtgtcgttgtcgacggtgacccggaccgtggcgcggctcaggcgcgaggccgcggcggagcgggaggccggtttcctggacctgtcgtggcatccgggcgaatgccaggcggacttcggccaggtcgacgtgcgctaccggggcgtcgtgacgcgaatgcggcatttcgtgttggatttcccgtactcgaacatcgggccgagccagctgatgcccggggagaacgcggagtgcacgtgccaggccctcaggaacctattcgaatggctgggcggggtgcccgaacgcatcgtgtatgacaacgccgccggcgtcggacgcaaatggttcgacgggatccgcctgacccgcctgttccaggcgttccaggcgcactacgggttcgagtacacgttctgcaacccgtactcgggacacgagaagggcggcgtcgaggcccgggtcggggccgtgcgccgcaggctgttcgtgccggtgcccggcgtatggaacctcgacagcttcaacctgcgcctgcccggccgctgcctcgaactgggggacaaggaccactacaggaagggcgagagccagaccggcctgttcgacgaggaccgaaaggcgctgctgcccctgcccgccaagccgttcgacgtggtcacgtggacgaggatgaaggccgacaaatacggcaacatcaccgtccagggccgccaccggtacgcggccggacccgaacacgccggccatgagatgatcgtcggcctgagggccctggaggtggagatcctcgatgccgaaggcaaacgcgtgatcacgcatccgaggtcctacggggacaagccgaccgacagcggcgacccgtcgagccagctcgggctgttgtgcgaccggccggcggcctggcgcaacagccgggtgcgcgacgcgatgcccgacccgcttcgcgaatggatcgacgcgcaggacgaggccacgcggcgcgacagcctgcgtgccctgctgcacgccgacggcgagagcggctggcgggcggccgtggccggcatgctcgagatcctcgaatccaccggaggcacggaccgggccggggtatgtctggccgcggcacgccacgcctcgggcctgggacccgtggcctacgacgaccccgtggacctgagcgaatacgacatcgcctacaccaaggaggacgagtgaaccagaagaacggacggaccgaccccggcccgctgcgcgagcgggcgaggagcctgttcatctcgcaggccaccatcgacgaaacgctcgaatgggccacgccccgccaactggacgccatcgaccgcatgctcgccacggaactggccaacagggagacctccaaacgggcaaggctcatgcgccaggcccggttcccggtgcccaaaagcctcgacggctacgacttcgcgaacgtgcgcctgcccgacggatacaccaaggagcagctgaccggcctcgatttcgcggccaaggcgcaggacctcgtgttctacggcaagacgggacgcggaaagacccacctggccaccgccctgggcatgctcgccatcgagcaaggcaggagcgtgaggttccggcagaccgcggagctcgtgctccagctcggcaaggccaaacgcgacggcgccctcgacagcctgctcagggacctcgcccgtgccgacctgatcatcctcgacgagttcggctacgtgcccttcgacatcgacggggcccgtctcctctaccagatcatcgccggcagctacgaacgtcgcagcatcatcttcaccacgaacatcgagttcagcaaatgggggacgatcttcgccgacgacaaactcgccgccgcgatcatcgaccgcatcgtccaccacggacgcctcatcgaattcaccggccccagccgacgcgtcagccaagccctcatgttcggcaagacggacaaccagtaaaacaaaccaccggccggcactcctcatgccgaaaaccgaaaaaaattagtgacgaaacacgaaacaccgacttgactaaaaacagtcccgacgggacggcggccgtgtcatcaaagcgaccgcacgaactctccgcccggaagcggacggcgctgattttggaggacccatcggccgtggcattcccgggcccggaacatgccatggggtttgcggaccccgggcgacgccgcatggccttcccgttcccgcgccacgggcggcggcgtggttcatggcgccgacggtgggtccgtccgcacgcggagcgcttccatgcctcgctgacggatggtggcgatcccccacggagaggagtattgtttcatttgtagataacattgttacacagtaggagagcattgatatgcaatctgaacgttcgttgattcccacccccatgccggtccggagacacgcacggtccgggaacagggggctggccctcaccgccctgtgtctggcggtgctgctggtcgtgatggacaacaccatcgtcaacgtcgcgattcccacgatgagcgacgcgttgaacgcctcgtccacggacctgcaatgggtggtggacgcctacacgctgtccttcgcggcgctgctcctgcccgccggcaaactcagcgaccgatggggaagaagacggatgctgctcgtcggattggcgggattcgccgtggtctccgcagccacggccttctcctgggccctgtggcagctggtgacgctgcgcgtggtgttgggggtctgcgccgcgctgatctatccggcgacgctgtcatcaatcatcgtcatcttcgaaggctccaggtaccgtagcctggccgttggcctgtgggcggcgacatcaggggtcggcatcgccctgggcccgatcatcggcggcgtcctgctggagcactatgcgtggaattccattttctgggtgtgctccgtcatcggcgtggtggcgctggcctgcatcgcggtggcggtgcccgaggtacgggcgtaccgttccgagaggttcgatttccccggcaccgtgttatcggtggccggcgtgggcctgctggtgtgggcgatcatcgaacgcccgacttacggctggctctcctggcaggtcataggcggcatctgcgcggccctgatcatacttgcggtgttcgcggcggtcgaggggcatacgcacgccccgctcatcgatgtcggcctgttccgaagggccacgttcacgagcagcacctgcgcgatctgcgtcgcgttcttctgcctgttcggcttcatcttcatcaccacccaatggttccaggcattgcgtggatacaccgcattgcagacggcggtcgcgacgctgcccttcgcggtggtcatggcggcggtcgccccgctcgccacgcaattggcgaaacgtttcggataccggtcggtcgtctcgacgggactgctgttcctgtcggcgagcatgttcgtggtcacgcgtgtcgacgcccattgcagctactggttcgtggtcgtacccaccatggccctgatggcggccggcatcgccctgatccaagggcccgccacggacgccctgatgagcaccgttccggaaagctcgaccggcgccgcatcggccgtcaacgacacgatccgtgagatcggcggcacgctgggcgtcgccgtcatggggtccgcgatctcctccgtctaccccgacgagctctcggactcgttgtccggactgcagatcccgtcttccatcgcgaaagcagcggaggattcggtgatggccgcgaaatcgatccttccgcacctgccggcaggcatccgacagaccgtggagcagtccgtctcgaccagtttcatgagcgccacgcatgcggcatgctggatcgcctgcgccctcgcattggcgttcgcgctgctctgctggatcacacttcccaaacacgattcaggcaatctcccccaatagaaaggaacatccatcatgaaagacgacggacggatcccacggatcaaggacacggatatgacggaccgtctcctgacggccggcgcgatagcggaggacacacgcaaccccatcggtgacatcgcggcatgcttccccggtcacggcagccagagcgtcggcatgttccacgcccgcgccggccagcgttccccgacatgtcttggctcggtggcaatctcaatgcggtgggaccagccatcacacccatcgagacgcggtccaagagcgtggctggaccttcgaccccacccatcatgggacggtgcagggacctacgggccggatggcgtttttcatccgtaacggcgggatgatgcggagaagcatatgaggactattcggaaaacgacaaaaagccagcggacgcccaccaccgagatcaggggcctcatactcgacgcctcgaaacgaatcatcgaagaggacggctatgacgccttcaccatccggcttctctcggaaaaggcggatgtgtcccccgcgagcatctaccggcatatcggcgacaagcaggccgtcatcaacgctctcatcgacgacagtttccagacgttacgggagaagctcctgcgcgtcaccaccgaggatcccctgcaaagactctacgatgcgggagtcgtataccgcgggcacgccaaggcgtcgcccggcatctacgccctgttgtggcgatggcatgcgggcgaggcttcggaggcatgcctcgccgccatgaccgagctggtgcgctacgggcaggccgcgggaaagatccggagggatgacccgcacctcatcgcatggtccatatggtccgccgtgcacggattcgtccaattcgagacacgacccgaacatgatacgcccgtcgacgatgacgatgcggcctatgcctttctgctccggctgctcattcgaggggtccgcgcccctcagacggtctccgagggagcggcgaccatcgcggataccagccgatcgtagaatcgccattggccgcgcaacgccacatcccgtctcacagcggcgaacgttccatccgccttcaggctcacggataccttacggaagtcccccgtcccgtccaatgcggacaacgccttcgaggcggcctccttcgcgcagaaggccgccctacgttccaccgaggaggccatacgcaatgatgcgagctcttcggaagagaacacgaaccgcatgatcccgtcggacaatccgtccgaatcgtccacgtccactcccacggcacggattctgggttataggccaaaatgtgtgtccgttttggcttgtgttcctttgtggcggtgggcgttcctcctgttcgagttgtatgggcggggaactcgaggtcggccagaatgtgtgtccggaatggccggtcaggccttgcggcacaacggttgagtgactttcgagttggcgtggcagattgggtggatgaacacaccttgttgcgccgtgtgcggcgagccgatgaagcggaacggaaggacgagctcgggacggatcaggtggcggtgccggaacgccgactgcgggagctcacgcacccagtcgcgcgacaacagcgcccgtgatctgcggtgcggtctggattggctgttctcgaaacaatcgcaggccgagcaccggctgccggcacgcacgctgcgccgccggtgcgagctcatgtggagcctgtggccgcccgtgcccctggtggacgaggtgcatcatgtggtgcacgtggacggcatccacctgcaccgcgacgcggtggtcctgatcgcggtggccggcgggcacgtgatcggctggcacgtcgccaaaagcgagaaagcggcggcatggcagtgcctgatggcgcgcatcgcgccgcccgacgtgctcgtgtgcgacggcgggggcggcgtcctcaaggccgcgaaggccacgtggccggatacgaggatccagcggtgcctgttccacgtgcaggccaacatcctcgagctgaccggcaggcggcccagactcgaggcgggcggacggctgcgccgggtggccctgtccctgccccgcgtcggggacgcgggcggcgcggccgaatggctggtctcctacaaccagtgggagcaggacttcgcctcgttcctcgacgagaagagcgaatacgccgacggcggcgtgaacgacatgcaccaaaggctcgtcaaggcacggcgcatgatccgcagacgcatccgcgagggccacctgttcacgttcctcgacgaggggctcgcgtccgtcggcccgataccgtccaccaacaacctcgtcgaatcacggaacgcgcgcctgcgcgacatgccgcgccgccaccgcggactgcggctggtcagacggctgaaggcgatctgctggtggtgccaccagcacacggaacgtcccgagaccgacgcgtggctcgcggccaacgcgatgaccgacgaacgactcgagcgcctctaccggcaggcatgggaaaggagcccgcaaggccagtacgagacgttcggcatccccgcaagatacggcaccggcatcgactggaacgagttccacacacgggtcgaatggcagtcgaacgactagaccgccggacacacattttggcctataacccgaaacggagggaacctggagggaaccggcaatcggggggaatcaaagcgaaaccccggaaaccgaatgatttcaacggttttcggggttccaatccgggcggaggatacgagattcgaactcgtgaggctgttacaccaacacgctttccaagcgtgcgccatagaccactaggcgaatcctccatgctttgcagtgtgcagttgaactgtgctccgcaggcaactcgaataagttaccacaggtttcggataagtgcacgtttcggcgtggcgcgtgtcgcgacgcggatgcgaagaatgattactgcgagtgaaggactcactggaaagtcccacacaacacctgcacaaggaccgcatacttgtgcagggcccacacacccgcgcgcacctacacaacccccggtaaagaaatcaccgtatccgggtgaattttcgatgttcgcccggcgcgcgcccgcaatcgcgcctaggctgttgagtcatgaacgaggggacagcggccgacgtaaccgcagcacatggcggccggtcgcgccaatcgaagaaacactcaaagacgtaccgcagcatatccgcgatccttagttggctcacggcccgccgcccgaccacgttatccacatcgctgcgcgcgcgattcctctcttacctgctcacgatcgctatcgcctggctgccgtggctcatactcacttggccgggttcgatgcgcgacgatacgcttgcccaatatctgcaatcgtccggtctgcaccactactacacccagcatccgctgtttgatacgctcacgttcggcctgttctggcatatcggcagcgcactcggctcccctctgatcgggcaggccctgtacaccgtgacccaagcggttctactcgccgccgggtgcgcgcttctgctgtgctacatccgcaaaatcggctcgccgcgctggctcatcggtctcggccttgtctatcttgccaccaactatgtggtggtcggcgcaatcaccacgatgggcaaggactcgttgcatgccgtgttctatctgccgttggccgtgctgttcgtggaggcttgtctgacgcgcggctcggtactggctcgccgcccggtggcattcgcgttcgtcatcctgctgttcgccaccatcatctccaagcggacggcgctcataatcgtgctatgcgccggctgctgtttgctcgccgtctgcacgcccaaaggcgcgcggcgtcgtgcgttcgcgtgtcttgcggttgccatcgttgtggcgcagggcgtgtggacgccattaagcgcggccgccacgcatgcgaatcgatcgcccggacgtgaggtgtggggcctggtcacccagcccgtggcccggctcgcgcacgatgatcccagtgcgatagacaagattcagcggcggcggctgaacgcgatcatggatctcgactgggccgccgccggcatcaacccgcaccgcaccgatgagaccttccgcactctgcgcgagcaccctaggccaaccgcggcgcaacaactcgcggccctgcaggtctgggtgcagctcggcctcgcgcatccgactgaatatgccacggcctatgccggggtgactcgcggatggtgggacccgcgcgtcaatttcgcgtaccccactgattccgactacctgttcacgcctagctatctcaggcaatgggcgtctttcctgactgaaggtgcttggaagcatacttccgacggcgatgccgataccgtggcggccgaacggcttgccgccatcgaacatgaccttgcgccgctgaggggtacctccgacaagccgcaatggcagaaaaacatattgcgggcgattcatcggtgggtgcgttcggatggtcatgtcggtgttcgcaaaggcaatccgctgacttcgatggccctgtacgtcacgtggattccgctggctgctggtcttgcgctggcggtgcggcctgcgcgacgacgctacggccccgcactggccgcttacggcttgctggcattcacggtgctgtcgctgtatgcctcacccgtggcactattttggtatccgattccggtattcctcacgttgccgctttttgtggtgttgccgttcacattccgggaaagccatcctctctgagcatagttatctcagatagtgaaataattgcggggttgaaaagcactaaaacgccttctattacctcgcacccgtcaaaaaatcaagactgttgttcaagaatttttttctatagagttcatagttgtttttggaccattcgagtacttgaagtgagaggaattcagcatggttcgtcgcgcctgcgcgcagtccgctgaaatgaacacgatgcgggaacgtgatacgcgcgttgccgtttctcgcgtgcgcgcgaagtcgggcagcaccggtcgtctgcagtcggccacggtctcggctcgtgcatttgcggtcatcgtttttctgtttgcgatgatcgccgcgaccttcctcccctccgccatcattccgcagtccgcgttcgccgtgacgccggcaaccactgccactgctgccaccgtcaagagcgacgacaccaccagcgtcgattacgcgacctgggccgacgttgccaaggccgtcgaagcgcagttgcaggaaggccttaaggaatacaaggacggcaacccaatgggtgccaagtccgatttcggggctgcatacaccaccgtctacgtgacgtccaacttcaacaaagtggtgagcgacaccatcggcgcagacaagcagaccgcgcagcagcaggccttccaggacctgcaaagccaggtgttcacgtcagaccaggccgatcagcttacccagaaggtcaacgacctgaccgccgacctcgacgccacggcccagcagctcgacgccaacaccagcctcgccaacccgaagcagtactccgaagacctccagaagcagatcgccaaggagcgcaaggagctcgacgccaagaagaagcgcaccgaggaaacggccaagacttggaaggaagtcgcggatgcgatgcttccgatcctggacaacgcctacaaggcctatgagggtggcgacgccgccaagggcgccacgctcgtgaacgacgcctactaccagcactacgagaagctcggcttcgagaagaccgtgctgagcgccatcagcggcaaccgcgtctcccaggtggaataccagttcaagctgtgccgctcctcgatgaacaccggcaagcctgcttccgaagtcaagaagtacatcgacgacctgaagaacatgctggccaccgatgccgccaagctcgacggcggcgcggccgatgaggagggtggcttcctcaagttcatcaccagctcggtcggccaggcgttcctgattctgatccgcgagggtctcgaggccctgctcgtggtcgccgctgtggtggcctacctcgtcaagtccggcaacaagcgcttcaccaagtggatctacgtgggcgtgctcgccggtctggccggcgcaggcatcgtggcggtcatcttcatgctcgcgttcggcggctccggcccgctgcaggagatcatggaaggcgtgtgcgcgctcgtcgccatgtgcatgctgctgtggaccagcaactggatgctcaacaagtcctcggtggaagcgtggaaccgctacatcagggaaaagaccgaagccgcggtggcctctgtctcctcgcaggtcgaatccggcgagaaggtggcttcccgcacggtgatttcgctcgccatgctgagcttcctcgccgtgttccgtgagggcgccgaaaccgtgatcttctaccagtccatctacacgatgagccaggatacgcatggcatggtggtcggcgcactcgccgccgccgtggtgctcgtgatcatcttcctggtgattcgcttcacctccgtaaagattccgattggcccgttcttcctggtcacctcgatcctcatgtccgtgctggtggttgtcttcgccggcggcggcgtgcacgcgctcatcgagggcgacctgctgcccgccaactacctgccgggcgttcccaccaacgactggctcggattctacccgtacgccgaatgcatcatcgcccaggtactggcagccatcgccgtcatcgcgctgttcgtggtcggctttgccaaacagcgtaaggccaaggcccggcttgcggccggtgcgagcaagtcggacgcgaaggctgacgaggagagcgcgcaggcgtagcacaacgcccggtgcgaccatctcgcgcaacacaacttgcgacatggcaatggaagcgattccagcccacgccgccacaactaaaaacagataagtcgtgaataatccattcaccacaacagaaggaataagagaaatgatgaagaacaagaagcttgccgctctgctcggcgtgctgctcgccggctccatggctgtttcgatggctgcttgcggttccaccaacaacgcttccgataccaagtcctcgaccagctcctccgacaccgccaagaaagacgactccaagaaggccgacgccccgactgagacctccggcttcgaagaggtcccggtcggcccctccggcaccgccgaggagcaggacaaggccgctggcccgctgaccgtgggtgccgtctacttccagcccatcgacatgtaccctgcttccatgggtctgaaggctgctgacgcttccttccacctggaagccgacatccacgcctctgaggaaggcaccgactacggctacggcaagggcgacttcgtccctgaccttactgtgaactacaccatcatcgacaagtccaccggcaaggaagtcgagggcggccaggccacctccggtaccttcatgcagatgaacgcctccgacggcccgcactacggcgccaacgtcaagctcgacaaggccggcacctaccagctcaagctctccatcgagtcccctgagaagaacggctggatgctccacgttgacccggagaccggtgtcaagaaccacaagttctggaccgagcccatcgaggtcaccttcgacaactgggactacaccccgcgtcagtggtgattgactaagcagacagccccctcgtcagagggggctttacgccgctttagggagataattcttaggacggtctaaaaactcccctcagtccgctttgcggacagctcccctcagggaggggagcctaagatgaacagagaaaggacgcgaatgcttgaacaattcgtggcagtgatgccgggcaccttggcccccgcattgctggtgatgagcctgagcgtgatgctcacggtcggcgaggggcgagataagccgataagctcgcattggcgtctcatcggcctgaccgtcggcctgatcgccgctatcacattcgccggcctgcgcgcctcggccgtgatcaaccagcgcacgttcgtcaactatccggtgctgtggtgcgcgatcattgccgacatcctgaccatcgtcgtggtggtgttcgcacgccgcatcaccaccaattggcagcagcacaaggtgttcatgcacattgcgaacgccgtggccgccatcgacatcgcgctcaccctgttctacgcgctgccggacgtgatcctgcagctgaccatctgggtggagcccggcgacccgatcttcacgtccgacatgctgctgcgcgcgctcggcttcgcgctgggcctggccatgtcgatcatcgtggccgcgatcttccgcacgatgcgttcgaccgcggtgcgtgcctcgttcaccgccgccgttctcgcggtgctggtgattctgttcgtccggcacctgaccggtgtcatgcagatcctgcaggcacgcggtttcccgatgggccacacgggattcgtggccctcgcctggtcgatcaaccacaacgactggatgatcatggcccaggcgttcgtgttcctgattccggccgtcgcctccgtggtggccggcttccgcatgccgctgaccggcgcgaacgaagccatcggccgcaagcacaaggcgttccgccgccgcgccgtggcctccgccgtctggagcctcgtggccatgatcggcgtcacgctgaccctcaccgtcggcgtcgccgcgacccatcagaccatcactctttcgccgccggaagcctactcgctcaaggacggcgtggccaccatccccttcagccaggtcgaggacggccacctgcaccgcttcgaatacaaggccaaggacggcaccgtcatgcgcttcatcatcatccgaaagaacggtggcgcgtacggcatcggcctggacgcctgcgagaactgcggtgacgccggctactacgagaaggacggcaagatcatctgcaagaagtgcgaggtggccatcaacctggcgaccatcggcttcaagggtggctgcaacccgataccattcccgtacaagaccggccacggcaagatcaccattcagactacggatctggacgcgctgagcgcccacttccagtgagtcaggcaggagacaagaatcatgttctttctgcgtatgattactcgctcgttcacccgacagctgcgccggcgcctgcttatcgcgctgaccgtatgcctgtcggcgaccgtgtccgtatcgatgctgggcgtcgtgttcgacgtgggcgacaagctcaacgccgagctgtccacctacggttcgaacatcaccgtgcagcccaaggcggacgcggtcgtttccgacctgtacaacaccgagtcgggcggcgcggcgtccaccagcgacccgaccgcttttctgaaggagtcggacgcggccaagatcaagacgatcttctggtcgttcaacatcaccaacttcgcgccgcagctcaacatccatgccacggtgaacggtgccaacgtgccggtcgtcggcacgtggttcaacaaggacctcaagatctccaccggcgagaccaccgtcgtgggcgtggaaggcatgcgctcgtggtggcagctggacggcaagtggcccaaggacgattccgaccagggcgtgatcggcaagacgctggcctccgaactcggtgtgaccaccggcgacaccatcaccctcaacaagaccaccgcctcgggcaagaagaacgagcagaaaatcaagctcaccggcgtctacgattccggcgacgaggacaacggctcgctctacatcgcctcctccacggcccaggtgctcgccgacctgcccgattcggtcgacaagatcgaggtcaaggccctgaccacgccggagaacgacctggcccgtaaggccgccgcgaacccggccgcgctgagccaggaggaatgggagacctggtactgcaccgcctacccgagctcgatcgcctaccagatcgaagaggtgattccgggcgcggtggccaagcaggtgcgtcaggtcgccgcgttgcagggcaatgtgctgcagaagacgcaggccgtgatgattctgatgaccgtgctgagcctgatcgccgcagccgtggccgtggccaacctgatggtcgcctcgatcggcgaacggtctggcgagctggcgctgctcaaggcgctcggtgccaccgatgccgcggtatcccgcctgatgctggccgaaacggcggcaatctcgctgctgggcgcgattgtgggcgcgttgcttggttccggcgtggcccagctgataggccgggtggtattcggttccggcatcacgatgcggccgatggtgttcgtgctggtgttcgtgctgctggctgtcaccgtgctgctggcgtccgcctcctcgattcgttcgattctgaatctcaagcccgcggaggtgctccatggccgctgagtttatctacgtaggtgtggaaggaggaaaccgatgaccaacaccggtatgttcttcagaatgctgttcagcgccgtgttccgccggcgttcgcgcgcggtgatggccgtggtggcgtcgctggtcggcgcggccacactgttctgcctggcgatgatctgcctcgccgtgccgcagcagatgaacgaggagatgcgtgcgtacggcgcgaacctgattgtcacacccaccgaatcgaccaatgccgacggcaaggccggcatcgacaaggcgatggtgcagcacaccactgaaatggtcaaggccaagggttccgcgaaatacgccacttaccgctacgagaacgtgcgcgtcaacgcctcgccgtacgtgatggccggcgtgaatgcggcgcaggtcaagaacctcaaccatcactgggtggtcgacggctcgtggccgaccgacggcaaggtgctggtcggacgtgacatcgccgacgccatcggtctgagaatcggctccgccatcaccatcggctaccgtgcatccgataacgccagcaccaacggcacttcgtcgaactcctcgatcgaccagcaaaccaaagacggccgtgtctccagtgacattatggacacctccggcaccgaattccgcgtggccggcatcgtggacaccggcggcagtgaggactcgatcatctacgccaccaacgccgacgtcaacaagctcaccggcatcacgcgcggcgtggacgtcatcgagtattcggccggctccagcgatctcgcgggcctggtgtccagcatcaacgacatgacctccatgcacgtcaaggcgcagcaggtcaccaagattaccgcctccgacacccgcatcatcaccatgctgcagacgctgttctggatcgtctcgctggtggtgctggtgctgacgctcgtcggcgtcggcaccacaatcagctcgatcgtctcgcagcgacgcaacgagatcggcctgcgcaaggccctcggtgccagctcgcgcgccatcggcaccgagttctacatcgaatcatcgctctacggcctgatcggcggcctcatcggcaccgcaatcggctacggactcgccagttggctgtgcgtggcggtgttcgaacgctccatcggattcaactggtggctggcgctgatctccgtgctgttcagcgcgctggtcgccatcgtcgcctccatcccgcccgtccaccgcgccacccgcatcgaccccgccgtcgtgcttcgcgaagaataaagaaagagaaacgtcatgctacttgaactcgaccacatctcgaagatctacggcgatctgcatgccgtggacgacctcaatttgaccgtgccggaaggcgaatggctcgccatcgtcggctcctccggctcaggcaagaccacgctgatgaacatgatcggctgcatggacacgccctccaagggctccgtgaagctggaaggccgcaagctggaggacctgaacgccacgcagctggccgacgtgcgcaagaacctcatcggactggtgttccagaagttctatctggtgccgcacctgaccgccgtggaaaacgtgatggtggcccagtactaccattcggtggtcgatgagaagcaggccatggaggcgctggaaaaggtcggcctgaaggaccgcgcccaccacctgcccggccagctctccggcggcgagcagcagcgcgcgtgcgtggcccgcgcgctgatcaacgacccgaagctgattctggccgatgagcccaccggcaacctcgacgagaagaacgagaaaatcgtgctcgacctgttccgcaagctgcacgagcagggcaccacgattattgtggtcacccacgatgcgcttgtcgccagctgcgcgcagcgcgagatcatgctcaaccatggcgtgctcgtcggtgagaagtggaatgacgaggatgcgcgcaaggcctacgaggcggccggcggcaagcccgcctccacgggtgcacaggtcgagggcgcgcagaacggcgagaccgccattggtttcgctgaccccaccaaggccgcgaaaaccggcggcgaggagtagggccgtcaggggcatcgagcagtatgtgaggaatacatggcaagctgatggtctctcccccagtcagcttcgctgacagccccctcgtcagagggggcttaaggagcgtgaatatgaccgaaaagaatacgttgaagaaatccgcgacattggcggcggccggactggtcgtggctggcgcgctgctggccgggtgcggcgaatccaaggccacgccgatggacgatgcgtacgccggcaactcgggcgagaccgagaagtcgcaggaagagcagtcgcaatcccagtcgaacggctccgatagctccgacggctccgattccggctcatcgcacaacgacccgtccaccaccacgtccgacaagaaggacaccggcaactacaaggacggcaactactcgatcaacggccagtacggcccggtcggcgaggattccatcgacgtccatctgaccatcaaggacggcaacgtcgagaccgtcaaaatcattgggcacccgttcaccacgatttccaagaaccatcaggacgacttcgccaaagccatcaacggcgtagtggacggcaagccactgaagggactcaaagtggacaaggtcgccggtgccagctggacctccgacgccttcaacaaagccctcgaagtcgcccgccaggaggcttcgattcaggagtaagaccgctacttcagcaatgctggccacagcagatcggccatgcgcgaggcccaggcggtgtcgtcgtccatcgctttgccctcgatggcctcatacgccaccaaagacccgataatcgtggacaacagcaacttctcgtcaacgtcctcgcgaaacacgccctgcgcgactccctgcttgaggaacgcccccacatgctccagccacggggtcaccacctggtcgacgatgtgctggaagaactcggcctcgctggacaatacaatgcccacgcgcttgacgtcgatgtcgttgtcgcgcacccaatcgaccaatcgctgcaatagttgcgtgaaatgctcacgcgtggggctgggcactgggtcagaatccgggatggccagatacatcgcgctgatctcgcgcagcagctcgtcggcattatggtatcgacggtaaatcgtggttttggccacaccggagcgccgggccacctcctcgatggtcacgccgctgatgccgcggtccaccgcaatctgcagcgtggctcgcatgagcttgcgatccgtcgcctcgcgcgtgcgctcaccgcgcggtgtcgccgtcgtacctgtcatctccgtcatctcttctcttcgaaatatgctcccgtacgctcccgttggcgggagctgactggcaaagccagactgagggtggtaagtccatgccgtttgtaggcaactcccggataatacctactagcccagcactttagtgctctcgactttggctacataccactggttgaaccgcaccagtggcttcctgagcaacagtccaagcaacagtagcggcggcacgaatgccagcagcattccggcggcccgccagtaatccatgtcgtagatgccggcgatggccgcacgcatcatcgtcaccgcatgggtgagcggcaagaacggactgactttggcgatgaagtcgggcaacatctgcaccgggtaggcggcgttcgcacccgaaatctgcacgatgagcataagcacgccgattgccttacccacattgccgaaactcaccaccatcgtataggtgaagaacgagaacaccagcgaggccagccatccggacaacataaacagcagcggatgcacggcctgcacgcgcaggaacagcagatcgccaccgagcgacaccgtggattgcagcagcgcaatcagcgcgaacaccccgtaatgcccaaggaagagccgatgcggccgcggatcgcccaaggctttgcgcgtccggcgagacacggtggttttcagcgtcaccaccatcagcagcgcgcccacccacagcggcagcagcgtgtagaacggcgccatcgacgaaccgaaattcgccaccgggaatacggccttgcgcctgagctgcaccggcgcggccaacgtactggccagcgtttcgggatcattgcccagcacctctttgaccatgctcatatcgccactgtttagtgcgtcgctcagtgtactgttgaacgaagccagttcggcaccggcggaacgcagtttgccggacaccttgcccaaggtggtgcgagcgtcaccgagcatatcgctggcgtcgtcggaagtccttttcaggtcgccgagcgtggagtccaactgggtggcgccggaactcagtatgccggaggcgtcagcgacggtggacgacagggagtcgatttgcggtttcaccgtggccgtgaaatccgacttgatattggcgatactgttctgcgcttgatcggccagatccttgacctgcgcatgctgatcctgcgcgtcctgattaccttggcgaatatcggtcgccgctgtattcagcgcttgccgcagcctgttctgccgtgcgattgaacggtcaatcgccgtgatgatggatgagtcgttgcccagtatgccggccaacgtgttgcgaatttcagtgtatttctccgtctgcttgccaatggacgtggcttgacggtccaattcgtcggcggccgtggtggcaccatcattcgcgtcggaatacagcttgtctatggaatcggacaccgcgccgaaactggaggcgctcgcgtccagtgagctgctcatcgcgtcagcggtggtgcccagggctccgaccacgtcggtgactccctgcttggcgctggcgagatccttgcctccttgtttggcggcagaggaaacctgcgtgatcagcgagttcgaggtgtcgagcaaggcgccggccgtatcggtcaatgcgctgtatgtgccaagcaaatccgccgtatcgtcaagccgtgtggcgaaatcggcgatattggcgttgaaggtattcagttgctctttggcttcgggcttggacagctgatcggccagcgaagacgcgatttccagccctgccgaagtgatggtcttggcgaacgtggtgttgatttccgccgccacctcgtccgtgccctcgttgagcagattcggtgccagcgcgttcttcttctcgttgcggtaataggtcagttcggcatgctgcacatcgtcggagaagaaggtcatcatgtctttgctgaacgacttcggaattacgatggccgcgtagtatttgccggatcgtgcgccctcgacggcatcggctttggacgtgatcgtccaatcgagctgactgttggcgcgcagcgcgttcaccacctgatcaccgaccgtgactttcaccgggatcaggtcggaacgatacccctcatccacattcgccaccgcgaatttcaggttcttcatattcgagaacgggtcccagcatgcggccacgttgaaccaggtgaacaggccgggaatcatcaccaagccgatcacgatgatgatggagaccacgttgctggtcaggcgtttgatgtcgccggtaaatagtttccacatggtgttcatcgtgcgtgcctgccttccttggtcggcggaatagtggggatgattgcggtaacggcggcgctcgggtccgcttcttcgtggcgttcggcggaggtgtcgcgacgcttggccttatgcccgtacagcatggcgcggatcgactcgtcggagaggttgccgagctcggtttggcggcggatggaatcgcgcatgaattccacgaccatcaggaagcccatgatgatgagcacccatgccagccatgtgcccatgaccacgattttctcgctggtggtcagcacaaacacgataatgagcgcggccggcaccacgaatccggcgataagcgcacccagcagcagccggggatactggtaggcgaatttggcggcccgacgttcgatggcatgacggtattcgtcgcggtcggccagtgccgcaatggcctgagtgacacggtattcgctgccgggcaggtgcaccggctcgccgataatcatgtcgctttccttgatttcccgcgcgaacaggcggttgagattggccagtttcggccgggcgccgaggccaagcacaaaggccagaaccgcgaaaaccagcaatttgccgatataggcgaaccagaggccgtcgtagaagccgccgatggtttcacgcattgcgtcaatcgaataggtgaacggcagcagcggatagatggcgcggaagaacgcgggcatcatttcaatcgggtacaggccggaggcgcccggcacctgcagaatgaccagtgccacgcacacgcctttgcccacgtgcatgaacgtggtggagagggcgaaaatcaccgacatatacaccagtgaggtgatgacgcaggtgagcagaaacaccggggcgctcgcgcattgaatgccgatgacaagatcgccgatggccgtgaccaggccttggacggcggccagcgtggccagcagcaggaaacggccgagatagccttgggttggcgtgagatcgtcgatgccctcgtcgtcggtttcgagtttgggaatgaccacgagcacgaacgcgcccacccacaaagacagggtggtgaacagcggtgccatgccggaaccataggaggcgaccgggtagacggcccgttcgctgataacagtgggggagagcatgaagtcggcgattgtggcggcatccagtttgccgtcggtgccgatcagggagctgagtgaactggagacgctcagggctttgatgtcggtggtcagcgtatcgagcttggtttgcatgccggccagcgccttatcggtgtcgtgcagggcggtcaccgtggtggaggcggctttgtcgagttgatcgagggtgctcttcgactgatcgatgagtgagccttgcgacgtgatgccggtcgacagagtgttggcggtcgagctgagggtgttgaggccggtgttgagctgaggaatggcgccggagatgatggtgccgcgagcggtattggcctcgcgcaccgtggtttgggtggcggtattgagatgctgcgccaatccggcggtgtctgtggaggcgttgccgatagtggtgttcaggctatcgaggttgcccagtgcgccggcaagctcgctattgtggctttccagtgtggcaatggcggattgcagcggttctcgatcggcgttcggcagccctttgagttggtcgatgatgtcggcgttcgcttggttgatgtcttccgccgtattgatcagtccgcctacctgctgattggcggcgctgatggttccggctaccgtgcccacgctttggttggcctgtgctgcggcttggctcagcaggcttgagccttggtcaagcgcttcggacgtggaggtgacgaagccgttcagactggcttgggtagtgccgatcagggtggagacaccggccaggccttccgcggtgtcgatgccaagtgcgcgcgcgtcgtccagcgcctgacgcgcggtgcgtgtctgctccggggtatcggtgagtttggtggtgagcttggcgatggtgctgcgtgtgtgctgcacgtcgccggaggcctcggcaagggccgtgagggccttggctttggtggtgtcttcggtgctgatggctttgccgccaaccgtattgatgacttcggtaagtacttcggatacggtggagacgaatgtggaattgaccgtgcggtccacagtggacgcgcctacatcggtgactttgggggcgatggcgctggctttttcgttgacgtaatactccagagtgggccgactcttgccgccggtcaccacgccggcgagatcgtcggaaaagtctttggggatgatgatggctgcgtatgccttgccggattccacctggtccatggcctcggcttcggtgacgaaggtccagccgagctggtcgttgcttttcagctgcttgacgatttgatcgccgaggttttgcttgccgatgagcgcgttgtcggtgccgtcgtcattgttggcgatggcgacggtgatgcctttggtattgccgtacgggtcccagaagccgacgatgttgtaccacgaatacagtggcgggataaacaccatgccgaacaggatcacccatgcggccggcaccttgaacaggcgcaggaagtcgcgtttgaggaccttgaagatattgcccactgatacctccggagcttggtgttgcttgattgctacgttttccgtagcgatacgttaatcgtagcgctatggttgtagtagcgtaatacggctgccggagattattggggtgattgatgatggttttggcggaataacgccgctgcccagcggcttatcgtgtgtctctgggcagtgtgcctaattttttgtggctggggtgctgtgtggccgggtgtgctgtgtgtgttggtgtgaggctgccctccatggggcggtaaaaccttcattgggtggtaagtggcccatggggcggtaaaattcccatggggcggtggcttaaaatggctttattccgcggaatgcggttttgggctaaccgccccatggggtaattaccgcctcatgagagagctaccgccccatgggtaaaccgttgtatcagctttcgatggtgccggattgaccatcaatggccgactgctcgttctggctggatgactggtcggagttggagttaccggaagtatcagaacctgtgccggagctgctgccggtgccggactggccatcagtgccttggctggagcgaaaggcgttctggaacttattgacaagatttctggatggtttttggatgtttcctgaaagcgagcgggctcggtgtccggcaatgtagacagacatgtaccggctatccatcaagttcggcaaaactgcaatcgggtgatagtgtaaggggacgctatgtggggaggaaaccatggttgaattcaaggacgatggcacggccactacccctggcaagccgcgggagaaccgtgacgccgagtccgcagtcgtggctgatctggtggccgtcgaactggacgacgccggcttgaacccgaacgccaagcgattaccgattctggcgcgcatctatggcgcggtcgtgctgctggacggactcgccacattgccgattatggtgatttccatcctctatgccgtgcgcgagattctggatggtcatgtgcacgtcgatgcgatgagcctgactttcatcctgtccgcgattcatgcggttgtgctggtagtcagtgccgcatgcctgattgtgttcggcgtgatgctgctgcgcaatcatcgccggtatgccgcgcgctggacctacgtgctgatgccgttgacgttggccgacggcatgctgtcgctggccctgaccggccttggcttcaacctgctgctgccgctgattcagatgattattctcgtcgtgatttcggtgaccgccgatccctccctgagcgaggaacgccgtttgcagcgcgcgctcaaacgcatggacgatcgcgatgattatgaatcggcggtggcggccggcatgctgggccgcgaccaatccggcaagggctatattgcactggacttcttcaatatcttctggctgtttaccatcgcttcggtgggtggcctgattatggagacgatctaccatatggcgctgtataacggtgaacttcaggaccgcgcgggtttgctgtggggcccgttctcgccgatttacggctgtggtgcggtattggtaaccgtgtgcctgaatcgcctgtggaaggcgaatccgttcttgatcttctgcgcttcggcggtgatcggcggcgcgttcgaatactgcaccagctggttcatggaagtggcgttcggtattaccgcgtgggattacaccggccgttggctgtccatcgacggacgtacttcgggccaattcatgttcttctggggactgattggtgtggtgtgggtcaagtggctgttgccgcgactgctggctctgattaatcgcattccatggaaagtacggtattcgctgactgcggtatgcacggtgctgatggtgatcgacattgccttcacgctgatggccttggattgctggtatgggcgcatggccggccagccgcaggattcaccggtcgcgatgtggttcagcgaacgctacagcgacgcttacatggccaatcgcttccagaccatgcatatcgacccttccaaggccgggcgtatgtgaatggctggcaagtaattacgcttcgcgggcagaaggtgcgtagaacctaagacagccttcgcgtgtgggtggtaagtgggatacactttcgagcgttgaaggaatgattccctccgctgatgcgctgttttgtgacgcgcgtgatgacgatgggacaatcaaacgaaaggcaaggcacatggccgaagctacagcaaacattggtgtgattggactggccacgatgggctccaatctggcgcgtaatctggcgcaccatggcaacacggtggcgttgttcaaccgtcactactcgcgtaccgagaagctcatgaacgagcatggcgccgaaggcaacttcgtgccggccgaaacgctcgaggaattcgccgcgtccctgaagcgtccgcgtaccgccatcatcatggtcaaggccggtgctccgaccgacgcaactatcgcgcagctggaagaggtgttcgaaccgggcgacatcatcgtcgacggtggcaactccttcttcaaggacaccatcaagcgtgagaaggaagtacgtgccaagggcttccacttcgtgggttgcggcgtgtccggtggtgaggaaggcgcgctcaacggcccgtctctgatgcctggtggcactgcggaatcctggaagaccttgggcccgattcttcagtccatcgccgccaaggtgaacggtgaaccgtgcgtgacccacatcggcaccgatggtgccggtcactttgtcaagatggtgcacaacggcatcgagtatgccgatatgcaggtgattggtgaggcgtatgacattctgcgccgtggactcggcatggataccgaggagattggcgacgtgttcgctgaatggaacaagggcgacctcgactcctacctgatcgagatcaccgctgagattctgcaccacaaggatgccgagaccggcaagccgttcgtggacgtggtcgtggatcatgccggcatgaagggtactggtacttggaccgtgcaggctggtctggaatttggttctcctgtggctgctatcggtgaagccgtgttcactcgtgcactgtcttcgcacggtgagctgcgtgaagacgctcagaaagaaggtctggctggcccgaacaagaccatcgatctggccggagaagacaaggccgcgttcgtcgaggacgtgcgcaaggccctgttcgcttccaaggtcgtggcctatgctcagggcctgaacgagattcaggacggtgctaaggaatacggctgggatatcaacctgtccgaagtggcccgcatttggcgtggcggctgcattattcgcgcccagttcctgctcgaccgcatcaccgaggccttcaagggcgataatttgccggcttccctgttgttcgatccgtacttcgagaagatcatcggcgaatcgcaggatgcatggcgtcgtgtaatcgtgcgtgccgtggaggccggtatcccgaccccggtgttctccagctccctggcgtactacgatggtctgcgctccaagcgtctgcccaccgccctgacccagtcccagcgtgacttcttcggtgcccacacctacggccgcgtcgacaagcccggcgtgttccacaccctctgggcgcaggaaggccagcccgaggaacagcaggcttgagcgtctgcgacaatctgtgggccgggcccctcattcagggtccggcccacaggaggcgccatcacaactcggtgacggtttcttcggtggagaaccaggtgaactcgtccactccgttggcgtaggaggacgggtaatccgggttgttgggccgctcgaagacatgggccagcgattcggctttgccggcaccggcggcgaagaaccatgtacggcgcgagcgggcaatcagcggcgcggtcaacgagacgcgcaacggcggcatcttgggggagtggttcacacccacggtgagcctatcggtaaccttgacctcatcatgacccgggaacagcgacgcatagtgaccgtccggtcccatgccgagaatcatcagatcgatgaccggttccggccccaattcattcaccaactcgcgctcatagtcgctcgcggcatcgtccagcagcgcatcattcgcggcatcggcggcggcgcgaacggaagcgtcatcactatcggcctgatccatcacatcggcgatgtcatcggctgaacgggtatcggccgccatctcatgaatattcgattcaggcagcttgccatccgccaccagctggtcaagcagcaggcgacgggcctccagagcattgcgatcggtgtcgtaagccggcacaaaacgttcgtcgctccaccagaaatgcacgcgcgaccaatcaaccgcatcagccagtggatcgttcagcgccaaacccaacggctgtgcggccgaaccgccagacagcgccacatccacacgtgtgcgatgcgtgccatcaggcaatcgttcggcgagcaaatcgagtagcgccaagacaaaacgttgcgcgccagcctgaatcatcagatctttattcggatacacaatgagttttcgagttgccatgtatggtccttatatggggtatgtgtcgtactttgcaatgtggattgtgttgtcagttgacaacgcataatacgggtggcatgccgggaatccagccatttgcagcaatgaaatgtgttgtcagttgacaacacaatgtacattgtgcgacatcgcatatgtcactttattactccgcggtcatgagcttcgtcatcgcatgaggtaggaaacgatgagcaacggcgttggcatggctcgaccacaattgccgaactcatgccaacgccgctgtggcaacggttctaccgacttcagtgacgaatcagatcccagccttcgttgatgacctcggcgtagatctcatcgggatcgatgcggcgcagttcctcggtcagacagtcctcgatggtgcgcatcggcacggacacttcctgcggagtctggccgggcagcgagatcagcgcttggtcctcatacgggcgttccagtgagatcacaccgtcctcacgggtcaggtacacgccggtcacggcctgcgcgtcgggcacgaactcagtttcgactggtacgccgagtttcagacgcagccatgcgcacagcatttccagaggcaggaagtcggccttgccggtcaccttcacggcggtgatgggcaggtgcggcggctggtcgagcatcgaggcgagcattgcgcgccagacggtcagtcgtgtccaggacaagtcgatgtcttccggtgtccaattgcggcgcaaacgctcgatcgtggcctccggattattggagtgcagcgcgtcggtgatgcgactgcgggccatcgcacccatcagatccttggccgggttcgacggcggtgtggtcggccaccacgccactacaggcgcatccggcacaagcagcgggataaccagcgtatccgggtggttgataaggccaccgcgcggacgcaagatgataatctcaccggcaccggcgtccgcgccgaatcgcacttgggcgttcaggttggaatcgttcggatcgttcgggccgtcggtcaaatcgacggccggattatcgcgattcgcgctcacctcggcggccacttcggtctcgttcggttcgccttcgccggactgatcggcaggattggtatccggtactacggcaatcacgcggcacgggtgctcacggctggccgagttcgcgatttccagcgcatgctctaggtccgcgtcctcggtggcgatgagtagcgtcagcacgcggccggtcgccgattcgccgcgctcctcgtgcagctgttcgattttgtgcgcaatctcgcgggtgcgggtgttcggcatatcgatgatcatggcatcctccagtggcggccgtcgcgcgccagcatttcgtcggcctgtgccggaccccacgtaccggcgcggtaggcctgcggctggccaagcgtggaccagaattgttcaatcggatcgaggatctcccagctgaggttcacctcttcggtggtcgggaacaacggcggatcaccgagcagcacgtccagaatcagtcgctcataggcttccggcgagttctcggtgaaggagcggccgtagctgaagtccatgttcacgtcacggacctccatggtagagccgcccggcaccttggctccgaagcgcatggtaacgccctcgtcgggctgcacgcgaatcacgatggcgttcttgccgagttcgcgcacggcggtctgctcgaacggcagatgcggggcgcgcttgaacgccacggcgatttcggttacacgcttgccgaggcgcttgccgcaacgcaggtagaacggcacaccagcccagcggcgggtgtcgatatcgaggcggatggcggcgtacgtttcagtggtgctcttggggtcgatgcctttttcttccaagtagccgaccacttcgtgcgagccctgccagcctttggcgtactgaccgcgcgcggtgttggcggcgaggtccttgggcaggcgcacggcggaaagcaccttggtcttttcggcggtcaggtccttggcggtgaagctcaccggctcctccatggcggtcagagccatgagctgaagcaggtggttctggatgacgtcgcgtgcggcgccgatgccgtcgtaatagccggcgcggccgccgatgccgatgtcctcggccatcgtgatctgcacgtggtccacatagttggcgttccagatcggctcgtacatggcgttggcgaaacgcagggccagcaggttctgcacggtttccttgccgaggtagtggtcgatgcggaacacggagctcgggtcgaacacttcggataccacgctgtcgagttccttggcgctggccagatcatggccgaacggcttctcgatgatcacgcggcgccatgcgccctcggacgagcgcgacaggccggaggcggccaactgcttggcaacctgcgggaaggcgcgcggcggcaccgacatgtagaaggcatggttaccctgtgtgccgcggtcgcggtcaagctcctgcacggtggcgctcagacgctcgaaggcctccggatcgtcgaacgtaccctgcacgaagcggatgccggcggccagattgcgccaagtcgactccttgaacggcgtacggcaatgcgcccggacggcggccttgacgaattcgatgaaccgctcctgtgtccagtctcggcgggcgaagccggtcaggccgaagctcggcggcagtaggccacggttcgccaggtcgtagacggccggcagcagtttcttttgtgccagatcgcccgtgacaccgaaaatgacgaggctgcacgggccggcgatacggggcagtctgaggtcgcgcgaatcgcgcaggggattgctccaattgggggattcactcataatgtacaagggtagccgccggcggctatctatcgctagaggcgatatgcgatttgggctgcgatttgggccacattgcgtgtgctgtgccgtgcgttgggccaatcgcgtacgcaaacgtgtacgcaacgccgtagttgaaatatcccaaaacggtgtgtattttagaagagttgcccctttagctcaacggttagagcagcgtccttttaagtcgtgggttgtgggttcgaatcccacagggggcacaacagatccttggaatcgcaatggttccaaggattttttgtttcgaccagcctggctcctagagtggtgccccatgtcatgcaccacgattcttgtcggcaaaaatgccagttacgacggttccaccatcatcgcccgcgatgacgattcgggctcgggccgttacgatcccaagcgcttcgtcgccgtcgcccccgacgaccagccgcgccactaccgcagcgtgctgagccatgtcgaaatcgaactaccggacaatccttgccggtacaccatcgcaccgaacgtgctgaataatcgtggcattctggccgaagccggtgccaacgaacacaacgtggcgatgagcgccaccgaaaccatcgctgtcaacgagcgcgttctcggtgcggacccgatggtcgagttgcggccggctgtcggcgggccggacagcaccgattatcaggccgagcagcccggcggtatcggtgaggaagacatcatcacccttgtgctgccgtacgtcaccaccgcgcgcgagggcgtcgcgcggttgggcgaactgctcgaaacctacggcacctacgaatcgaacggcgtgattatttcggatgcggacgagatctggtacgtcgagaccatcggcggccatcattggatcgcccgccgagtgcccgacgactgctatgccacgatccccaaccagctcggcatcgacgacttcgacctcgccgatgcgttcggcgagcagcgcgaatacctatgcagcgccgacctgcgcgagttcatggccacgcatcaccttgaccgcacaatgggaacgtcggtctcttccaacggccgtcacgtgcatagcgccggattcggaacaaccgttgcccttcccacccgcttcaacccgcgcaaggccttcggcaccgcgacgccgaaggaccatatctacaacacgccgcgtgcctggtacatgcaacgccgcctcaaccccagcgaggactgggattcgccggccgcccgctacacgcccgaatccgacgacatcccgtggtgccgcgtgccggaagacaaggtgagcctcgaagacgttgatttcctgctgtcctcgcacttcgaaggcacgccgtacgacccgtacggcacgaccggcacggcggaatcgcgccaccgttaccgtccgatcggcgtgaaccgcaccggccatatggtggcgattcaggtccgcccgtatgtgccggcggccaatcgcacggtgatgtgggtatcgttcggctccggtccgttcaccgccgccgcgccgttctacgcgaacgtcaacgacacggcggcctacctgcgcgacaccacgcccgaagtctccaccggcaacctgtattggacgaaccgcctgatcgccgtcgtggccgacgcgcattggtatgagacgaaccggttcatcgagggctatgcggaaggcgtgcgcgcgttcgggcaccggctcatcgagcgcacggatgagcagttgcttgctcgaagcgatgccgaatcgacgggtacgaatgcatggccgctcgatggcggccacggcgatgagaaggatgtgcagggcgtggcggatgtgctcgaagcggccaacgacgagatggccgactacctgcgcgagcatacaaccaagctgctgaacgacgtgctatacacctccagcaacctgatgcacaacagcttcgcaatgtccgaccgttgggccgagtagcaaaacctcggctggggaggtaatagggatgccctgctgataacgcgtcagcagggcaaagccacaatccgaatcagttgaagccgacgatgcgttcggcgatgagatagccgttgcgcacgatccagcggccggttttaccaggcagattgagcgcgcgggacatcagcttcgagcgcacatccttgccgatggccggagaataggcgtcaatcgcatcccacagctcggttttcttaacgtagttggccggatcgcgcgagagaatcaggaacgccgaggtaacgcatgattcgatcgtcaggaagtgaatcatgtaccggtacagcccctccggcaccgtaccacgttcgggcgtggcctcggtcatcagccgattgacgagccgcagctgatccacacgcttaatcatcacgtcggtctgcacgctctgaccctcgcgcccgatgaagtagtggtagaacggcacgtcgagatactggatgcgcttcacccacgggaacggctggtacgagtaatagaaatcgacgtagaacgtatgctccggcagcttcagcccggaatcgcgcaccacctgcgtgcggaaagtgagcgcatgcatgatgatgtactgcgccagaccgaacttgcccaggtcatcccagccgagcacgcggccggcctccatcacatgacggaagttcaccacgatcttgtggcgcttggtcactttgtcatacacatagttggtcaccagcatgtcgatcggctcgctggcctcacgttgcgcgcgcaacgtggccagaaccgtgtcgatggcctgcgggtcgacccaatcatccgcatccaccaccttgacatacatgccggtcgccgccgtgataccggtgttcaccgcgccgccgtggcctttgttctcctggtgaatcgcgcgcacgacacctggattggtgcgttccagtttgcgcgcgtactccagcgtgccgtctttcgaaccgtcgtccacaatcagtacctcgaggtcgctggtgtcgcttgccgaaagcagcgagttcacgcaacggtcgagataggactccatattgtatgcggggatcacaaaggtgagcgtctttgccgtgctggccatgaaagtcttacgtcctcacatatttagtcgttatgttcagtttcctgttcaaaccgtagcacttcgtctcccgactcggcagagtgttgcgcaacctatgcccctgaactcgtgttctgcaaccctgaatcttccccaggggcgcgatcggaatccgattgggcggaacttgtctggtctgaatccggaccgccggaatcggactcgcgcttggctcggcgctcggcctccttccgcgccttggccccctcaaagaacaactggggcttggagtcaagccggctcaggccatgccaggccaaatccacaatgtatgcggccagctgctccttgctcaccttgggccggtcggcccagtactggccggtgaacacggtcatgcccaccagcatctgcgcatagtacggcacgcctttggtggagagtttctgccgtttgaacgtttcggaaaggatgtcttcgacgcgcacggcgatgtctcccagcagtgagctgaacgagccggacggttcggtgctgggcgagtcgcgcgccagcacctggaatccctcggcgtcctcttcgatataggtgagcagtgcgagtgcggtgcgttccacgatctggcgtgggtgcacggtcggatcgtcaagcgcggcggtgagcacactggtcaacgcgcgcatctcacggtccacaatgacggcgtacaggccctctttgccgccgaaatgctcatatacgatgggtttcgatacttttgcggtggcggcgatctcctccacgctcactgcttcaaaacccttcgacgcgaacagcgaacgaccgatttcgatgagctgctcgcgccgctgatacgacgtcattctggatgtattggccatgctgtccagtttttcacgccccgtggatagctccctgaccgtccgcccccacgtatcgtccgattctagtgaatcggatatgtgtgtcatattgacaatgcttcatcgcggctttaatatatttaataaataataaattttattaaagagggtgatgtggatcgtctaccagaatggttggccagccttacggaggaggatttggccttcatcaagaacttcgtgctatcgtcaggatctctgaagcaaatgtcccagctgtatcaagtctcctacccgaccatgaggatccggcttgacaggcttatcgaaaaaatacggttgaacgaca

SEQ ID NO: 3222 - DNA, 4208 bp, Unknown
  R53_2m  MAG No. k141_5887
gcgttcttggtgaacaggaagccgttgaggttctggccgaagtattcgaccatgtcgttacgctcgaactcgccgtggaccagcacgtcgaggccgatctcctcctgcttcttgatgacggcgtcgatctgggccttgatgaactcgtcgtaggcttccttggtgacctcgcccttgcgcagcttggcgcgctcggcgcgaatctccttggtctgggggaaggagccgatggtagtggtcggcagcagcggcaggccgagggcctcgcgctgcagggcctgacgctcctcgcgggcaggctggcgcacgtagtcggcgtcggacagcttgccgatgcgctcggcgacggccgtgtcggcggccacgcgggtgccgtcgaacagggcctggttggcggcgagggcggcggatgccttcttctcgtcctcggtggcgtcggccagagcggcgacttccttgagctcggtcagcttttccacggcgaacgcgaagtgcttgaggtcttcggacgagatgccggtctcgccttcagtgctgaacggcacgtgcagcagggaggatgcggtggagacggccacgttggcggtgacctgcttcagggcgtcgaccaggccgagggaggtggcgtagttgttgcgccagatgttgcggccgttgatcacgccggcgaagatggcggtgttggaggccacgccatacttggcgacggcttcgaggttctcttcacggccttcgttgaggtccagtccgatgccgtcgaagccgagcaggttgacggtctcgtacacgtcggcgatgtggccgaagtaggtgttgagcagcaccttgacgttgcccttggcggacaggatcttggtgtacagggtcttgaagagctccacatcgcccggctccttgtcgagcacgaggtacggctcatcgagctggacccatgcggcgccgagttcgttgaacttgtcgagcacttcggcgtagacggcggccacggcgttgaccaggcccttgtcgagctcgagttcggtggcttccggggtgcgggcgagcttcaggaacgtgtacgggccgatgaacacgggcttggtgtcgatgcccagcgccttggcctcgttgaactcgtcgaacggcttggtggagttgagcttgatctccgcggccgactcgacttcgggcaccagatagtggtagttggtggtgaaccacttcttcatcggcagggcggtcacgtcgcccttgtcgccctggtagccgcgggccatggcgaagagcgtgtcctcctggttatcgaaggcgagacgctcgtaacgcttcggaatcacgttgaggaggatggcggtgtccagcatctgatcgtagtagctgaagtcgttgctggggatgaggccgatgccggcggcctgctgcagcttccagtgcttggcgcgcagttcggcggcggtggccttaacggcggcgaggtcgttggcacccttccagtagccttcgatgatcttcttcagttcgcggttctgcccgatgcgggggaagccggagacggaagtcagagtggacatgaatcctccaatgtatgcgttcgtaacccgacttagggtagcaaaacatccggattccaccccttataaatggccgcagagtgtcgttatagatggaatttatatccgctttagtcgaagtctttcacattgatgaccgcgagcagttcgccgctgtgcacctgccattcgtcgaacggtttgttcgatcccatgatcacgatggatgcgggcgaaagtcccaagttgagcaggtcgagtcgttcgccgtcggagtcggcggaggcgagccattgggcgctgatcgacacagtcggctcgtggcccactatcatgaacacgcggttcttggccttgacgtgggcgagctcgtcgaacaccgcctgcactcccccgtcatacaggctgatgcggtagtcgacgatcggcttgtcgccaaaggtcttgagcatgcggtccagtgtctggcgcgtgcgggtggcggacgagcaggagatctggtcgggcaccagtcccagcgactcgatgcccttgcccacggccttcgcctgtttcagacctttgtcggtgagctcgcgctccgagtcacccttgtcgccgaacggctcggccttggcatgcctcatgatgatgaggatatggtcgtattttttcgctgctttggcgactttgctcagcttgatgcccatccgtggctcccttcacgaaccgtctgcccggtgtggcggtgtggtgttgcttccagtatagaggtgtgtgagcgttcacaaactcatcgtcgggcggttattcatgcgtgttgccgagttctcccacctgacggtcgaggtcgcgcaacaccttacgtagtttgtggtcggagatgtcgcgcagttccagttcctcgatctgcgcctcacgctgttcgtcggtgagcgagtcgatgtcggtctgcgtgtccttggtcacgcgatcgcgctttctgagcgcctcgaatccggaggccatggcgcgcgagataacaaggaaaccggtatggccgatcatctggtggtcggggcgtacggcgaggccttgggccttccatgtgcgttcgaacgattcctggatctgcggctcggtccagcaaccggccgcgcgcagggcttcggccagtcgactcatctgcgtggtggtagttacgtaactgaccaacacgccgccgggggcaatcacgcggtatgcctgctcgagtctgttccacgggtcgagcatgtcgagcatgatacggtcgaaccagtgttcgggcagttcggcggccacggagtcgaagtcgccggttttgagatcccaccagctgggggcctcgccgtaatacagcgtggcgttggcctgagccactttggcgaattcggggcgcagctcgatcgtggtcagatggccgcgctcgcccacggcgtccagcagattcacgctcatcgcgcccgagccggcaccggactcaagcacgcgcatgccggagcggatgtcgccgagctgaatgacctgggcgatgtccttcggatacatgatctgcgcgccgcgcggcatcgaaagcacataatcggccagtcgcgggcgcatcaccgcatactcccagccgccgatggcgcgcgacgatttccacggcttgttcttgtctttctcggggtagacctgattgacctgtgcctcacgcttggcgtgcacggtgaggatgacggtgccttcggtcttgccgatcacatcgtcatgcagaatcaggccatgctcggtctgcgtggagccgccagacacaagctgatcggtgatcttcttgcccttgcggtcggtgaactgcaccttctcgcctgcggtgagaggcccgcgcctcggctccataacttgctccttgcatgctcggtgggtcaatcgctacaagtctaatgcatgtaagctcgttggtgaggtgatgacgatgcgaatgcagatgacaagccagatcgatgccggcggcaatgaccccattttcctgatgttccacggttacggcaacgacgaaagcgagatggtgcggattctcgacgccgtatatgcgccgacgcgagccgatgcggccccggccgcaattgccgccgtacccagctatatctcgttccgtgccacctacgcgaggccctatatgggcggcaattactggtatcccgacggctgcggcgtggacgagcgccaacgcgaatgcgcggcggtcggggatgcggtggcttcactgctggatgcctcggcattcgcccatcgcaggaagatattgatcggtttctcccaaggcggttatctgtcgtatcgtctggtcaaggcgcatccgacgttgttcgatgccgcgatcctgctcagtccttcgttcatgggcgaggaacaggcggcgcttgactcccctacccgattcttcctggcgtatggcgcgcaggaccgcacgattccgatgcccgaccagcaaacggcccatcaggtccttgaacgggccgggcatctgacctatcgcgagtattccggcatggcccatgccatcggtgatgaggaaatcgccgatatccgggatttcctacgtgccatatgatgccggaatagcttcaatatggaatatctccgttcaaagaggtaccggtccaagtagaagcggctcaacaatggcggaatggcgtggcgcgtgccgtatggacatac

SEQ ID NO: 3223 - DNA, 2756 bp, Unknown
  R53_2m  MAG No. k141_5968
gccctcaaaaaacctcacccctcatcaaaccctcccgggtacccgaccaccacgacaggcaatcaggcgaggaatgaactggcaatcattgactataaagaagtcgtacaaacacgctcttgagttctcaaaccaccaccacaccagcaagacaggaaaccaaccagaagaaggaacccgccgcgccgagcggcaacaggtgaataacttacacgcaaccacgccacaacgcaaatcgggcatgaaaaggtacgccagaatcgttgcaacgacggcgttctatcggcgtgtcgaaatcagcttgaatcacgccgttatcatcaggatacgccggctttttatgggctcacgtaacgaaatcagatgttcaccggcgtgtcgcaacaattcattccacgttcaactcccctcagtccgattacgcggacagctcacccgcaattacggacgagcaaagctcgcgcccttatggctcgactatcgtctcgccttcgtctaaaaaacagtccaccggactgttttttaaacgacccagcatcaaagagggaagccaaaaggggattagaaggtcaggcgcatttggtgccagaccacgtcaccgtgagtggaatcggaaatgccctcgtcctcatatccgaatcgcgcatagaatccgaccaaccgatctttgcaggtgagcaccaggcctttacggccggctgcacgagtgtcttcaatgactttcctcatgagtgtactggcgcaaccgcgatgctgatacttcggcgcagtatccacgccgaaaatcatttgccagtcaccttgagggttgtgctgcgcggcatcctcgtacatgtcatcggtcaagtcgcgccgatcggtcacaaaaccgttgatgaacgccatgacgatctcgccatcaatcaatagccagaaacattccggataggtctcgattcgggcgcgcagggacgagcggtcggcggcctcggcggccgggaagcattcgaattccatggcggccagcgcgtccagatcgtcgatggtggcgtggcggattaactggggatcagaatcagtcatgtttttgtctttctcttaacactccgttgtgagcaactcccccagtcacgcttcgcgtgctggctcccctcaccttgaggggagccggatggatgtcagattacgtggtattcgcgtagcagggtggcaatatcggtgccgtcgagtttcttgagcaccttcttgaccacggccttttcaatgaagttgagcttcatatcggtgaccggtgcaccgtcacgcaatttgacggtggcgttgagcaggttgcgcacgtcatagacgctgccccacacttcaggcacgccgcggtccacgccgagcaacgtgtagacagcttccataccggtgcgcatcgagtactcggtggtgaagatcgtgtcacgcggggtctcggcgaactggccaaggaatgcgaagttcacggcaccatcgggcaccacgtccgggcggtcgccggccgcgcgcggcatgaagaacgcggtgatgtacggcatcatgaccggcacggtgttggcgtgatgcttggcgagcgcctcgatcttgtcggtcggcacgcccatgtggtaaagccactcctcgcaaatctcttcaccggtgcattcggtcatcggcttcttcacatagttgccgggcttgtccgggaacaggccgtagacccatacgcacagctggtccttgggctggtcgcggaactgctgctggcggttcagggtccaactcatgagccagttggagtcctgcacagtgacgatgccgccggtgacgaccttgccggagaacgggtcgcgcttgcaaatcttctggatgtacggcggaatctcgccgtccagggtggtgatggtggcgctcatccacttggtggcattcggatcggagcagaacttctccggatggccaaagctcgggtcctggtcggcgatacgcttccacatatcccagccgccgccgggcttcaggtctgggttccatgcggcgggcgagttctgggaacccatggtggagttctccacgcaaccgccgttggtgatgaacaccagatcgttctcggtcaggtcgatggaggatttatcaccctcgtgatccacgtcgatgcgcacggcaagcttcttggtgggcgtgctggcagggttgcgcttgaagaaaccggaggtggcctgaatcttttggatggtgtcctggcctacgccggtgtgctcgcgcttggggccggctcccccgccaatcgcgaattccacgttcacaaccttggtgttgtagcggaattcgacgccatgcgattccagatacttgaccatcggcagaatcatcgactcgtactggttgtagcgggtgaaacgcagcgcggaaaagtccggcagtccgccgatgtgatgaatgtagcgtttgatgtacagcttcatttccagcgcggagtgccagttctcgaaggcgaacatggtgcgccagtacagccagaagttggagttcagcacctcatcatcgaagaaatcggtgatcggcttgtcatacaggtcttcgtccggggtgaagaacagcttcatgatttccatcgaagccttgtcggacaggccgaacttgcccttgagccccgcgtccttgccgaggtccttggtggcgcggcacagcgagtagttcgggtcctccttgttgagccagtagtactcgtcgagtacgctgacgccctcggtttcgatggaggggatcgagcggaa

SEQ ID NO: 3224 - DNA, 13430 bp, Unknown
  R53_2m  MAG No. k141_6040
aacccggaagctaaggcctggcacggcgatggtactgcacccgacagggtgtgggagagtagcacgccgccgcaccacacgtacaggaagcccctcggagcacacgccccaaggggctttccctatatccgaaaccggccccggcccgaacccgcacgggcaccgggacctccccgcatacccatgagacccacgcccgggaccattcccggccagccccgacggcgaggccgaacggcgcggcgcgtccgcgaccgtgggagcccgacgcccaggccccccggtccgccgcgcagacagctcccctccagaggggagccagaaactggcttggttatggggtcgctctacactggcttctgctatgcattacttcacccctaaacgttgcgccacgtcgaataaaatcatgtaccacgataaggcgcaggctcagcgtgccgctgatcaaagcctgatcgagcgtggagccgagctatgggtgtaccgttgcgaatattgcggatgctggcacctcacacatcgcgatccacaatccagttaccggcatgtaccgctgaaccagcaactcaagccacacagtcgtaaaaagggctacaagccacgtagacgttagcgtcagaagctccacaggcctcgccaacgccgtatctgaggcaggttacggtccaaacacgccaggtcgtaggctgctaagcgttcagggcgctcggacacactccgtccaacactcacatcaccttggtgctttcaaggttgcggataacccaatcgttgaagcgaattaccggcttgcgcaacataagtcccaacagcaatgagggaacaaggaacagtgccagtttgcccatggaaacccagtattccatgccgaatgagcccgccatggccgaatgcatcgcatccaccgcataggggaacagtagccatttagaaacgacctggaagaacgtcggcagtgtttcaatggggaatgtgccgccggaaccggctacctgcataaccagcagtaccacggcaatggctttgccgatatcaccgaacgatagggccagcgtatacacaatattcgagaacaccagtgcagacaaccacccgaccatcaaaaactgaatcggatgctcacactgcacgccgagatagaacatatcgcccaggcacaccagcgtaccttgcagcaaagcaaggaaaccgaaaatcatgtatcggccgaaatattcgtggtgcaagcgtaaaccgaactgccgcgcattgccggaagactcggcacgcggcttcttcagcacatccaacgcggcggccggtccggcaatccgcccggcaatcatggcctcgcgaagacccactcccgaaccgagcggcagatcattgcccaaccctaagatacgggccttctcatggtcggaaatcgatactttcaacatggcgaccagaatgatcgcaccgacccagatagacagaatcgtgtagaacggagccatcgcggaaccatagttggcaacgggatagagcgcgatgcggtcgaccgctacgggtgccgccagcatggaagcaatggcatcgggcttcgcagaggaaatcacagacaggtcgttggtgccgccactggtgatagaggcgagttgggaagacaagttgtcgagtttcttcgccgaacgggtcaaagcgctagctgcgtcagtcaaggccgactggatatccgtcaggctgtctgaaacgccgccagaaagacctgacacactgctgacggtcgacgcaagcccgtcgattacggaacttgcctgcgtggccacttcgtccatggacgaggtcagattgttcagttgcggtttcagcgtgctcttgtacgtgtctgaagcctgagtaatcgattgtttggcggcggcgatttgtgatttcagatctcgacgcgctgtatcggcatcggcagtaccatttgctatgtgcgtggccgcatcgcccaacgcggtggcggcttgctgcatgctctgctgcgcctttgtggcttggtctgcagccgcgttcagttgagcggcaacggtatctccgcccacgggcagtgaagccgcttgtttggcgagatctcgtaaagcggcggcatactttccaaagctgtcggcctgagcctccactttggattgcatatcggtcagcttgtttgatatctgcgaggattgtgagcccacatcggcaaaagcggcatcgatctgcttggcaatggtgtcgtaggatgaaccggcctgctgcaatgccgtaccgacgccatcggtggctccggacaatgccttgtcgaggctggagacgccgttgcgggtctgtttcaacgcctttttggttgtggccgcagctgagcctgttgatcccagcagcttatcggtggaatcaatgatgctgttggcggccccgagcagattggcataggaatccatctgcgacgcagtgccggtcaaacgagatgacatggtggcaatatgactggaggcgttgttgacgtactgctccatttgcgggctttgcgcgtaatcggccacgttggaaaccaaatccagcgccacgctcgccaaggtcttcacaaatgtctggtcgatggtcgtggccacggtggtagcaccctggtcggtgatatgcggagcgatcggattgattttctcattgagatagtattcgagcttggcgtgcttgatcttcggtgaaaacagcgtcatcatatcggagctgaagctctttggaataatcagcgcggcatagtattcgcctgagttcacgccatcgatggccttagcacgatccacaaactgccagtcaaggtcatgattggccctgagcgtattggtcacggtttcgccgacgttgatggtgatcggcatcagatcggacttatagcccttatccacgtttgccacggcgaccttcaaggccttggtgttgccgtacgggtcccagctggcggcgatgttgtaccaggcgtacagtgccggcacaatcaccaatcccatagccacgattacggcgatcacattgcgggtggcttggcgcacgtcacgtacgaatattttccagataagcttcatcgtgcgcctccttgcccagactgcccagactgcccagactgcccagactgaccggactgctcgaactgtgcggtgtgcgcagtcggctcggcggcctgatcgccgaacagtgtgagtcgttcagtggtttcgccgatatccggattgctgcccatcgccgcttcgtgacgtccgtggccgtggaaacgccgccacacatatccgttgagcatcacattgcggaactcgtcggcactcatggcactgacgccaagctgcatggcgtaggtttcgcgtgcgtattcaaccacaatgagataggcgtcgataagaataatcgacagaatccaggaggtcagcatggcgattttctcttgggtgacgaacagcagtaccaggaatacgaacgggagtacggtcagcaatgtcagaccggcaacgatcatctttgggtaccgcgcgaagaaccggtgcgcgcgatgagcgatgatatcgcgcagttccttgctgtcggacaccgtgcggaatacggagttcaagctcacctgttcgttcaccatgctgttgtgctcggtgatcatcaggtcggtatctcccaaacgatggtcgaacagcgcgttcaggttcatcgcataccggcgtacgacaagtcccacgaaaagcgccgccggcagataccagaacaggtgcagcatgtcgagccagtaatggttcgcgtacaggccggcgatcgggccgcgcatcgcgttgatgccgtaggtaaagggcagccatgggtgcagttcgcggaagaagttcggcatcatttcaatcggatacaggccggaggcaccgggtatctgcacaatgaccagaattacggcgatggctttgccgatatggcggaacgccacggccagcgcgtaaataatgttgatgtagacgaacgaacagaagattccggccaagatgaacagcagcggatgctcgcattggatgccgagcaccagatcgccaatggtggcgatgatggcttgcaggaatccgatggtgaccagcagcagccagcggccaagatatgcttgcgtagcggtgatacggcgaatgcctttgcggtcgacctcaagcttgtagatggcaatcagcacgaaaccgcctacccacagtgccagattcgtgtagaacggggtgactgcggacccgtaattgtcggtggcgtacacgactttcgtggtcagggtgacgggattgcccatgaactcgccgaatcccttgtcatccagatgcagcgtatcccggattttctggtaagcggcggaactatcgagcgtggcgatatcggtgcgtacggtgacgacatcgctggccgcctggcgcagcgaatcctgcgtgctgccgatggtggttttcgtttggttcagggtatcgacaagctggtcgaacagcccgtcggcctgatccaaggtgccggacaacgaagtcaacgtgccatccagcgtgccgttcagggcggcgaaactgttcaatgatgaggtgagcgacggcattacggtgccggtcagcgagccgcgcgcggtattcagcgccgcgatgccgccggtggtggtgttggtcatggctccggaaaggttcgtggtggcgtctttgccggagttgatgaactgtgtggtgtcggtatggaaggtgttgagctgtgtctgctgtttgctgatcaatgagtcgagcgcatcgatttgtttccagatgttctggccgaccgggtcggtggtgtctttgccgatgccggctttggtcagcgcgtctttcagatcgctgattgacgtttgggtggcgttcagtggggccgaaagtgtgttggtgatggtgtcgacggagttctgcgcgctgttgaaggagccggtgatgctgccggcggcgttgttgacgtggacggccagtccggagagttgtgctgaactgctgtcgagcgcgccgaccagtgtggtggagaaggcttgtgacccggcctgtgtttccgccaacagtgtgccggactggcgggaggcattctgcgcggccgcgacggtctgcttgagtgaggcggtggtctgtttggcgtcggcgagaatcgtgtctgattgggccagcgtgtcctgtaagtcggtgagtgaatcctgaacggtgttcagcgtggacatcaccgtattgagatcatcgatcgtatcgtgctggactttgccagtggcttggccgagatcgtctccggtttcggaaatggccgaggcaacggtggtggctaccgtggtgacgaaggcggagttgatctgctcatcgatggtggtggcgccggtgtcggtgattttcggcgcgatcgcgttcttcttctcgttgacgtaatatttgattttcggctgtttggaggttccggtcaccgattcgaccaagctggcgctgaaatccttgggcagcacgatggctgcatagtatccgccggtctccacgccgtggacggcctgttcctcattgtctacgaagcgccagccgagttcgtcgttctgcttgagtttcttgacgacctgccggcccgcatcgagatggccgaccagatcgttggtgatgccttggtcttcattggctacggccacttgcagattgccggtggctgaatagggatcccagttggcgagaatgttgaaccatgcgtacagcgagggcagcattgctacgccgagcgtcaccacaacggcaacgggattgcgtaagatacgtctgcaatcgcgtagaaagacttgccaaaccgtccgcatccagtccctcttttccggttcgtagtcattgcggccacatgcagtctattcccaccactggtgcggatactgctggtttggcgggttttcttgcaaaactggccgttggttgtccgcataatgggactgatatgtgaacgtttgttgatggtgcgacaccggcgggatggttgtgcaattttgccggtatccggtgatgaaatgttgaggtgttggaactgagtcgtcgcagtgctgagaccgagacgactcagtgacgagcctatccgaggctatctcgttggttctggtctcactgatccagacggaagccctgagcggcggccttgtcgagcagtgtctgatggctgacatcctgccgactgatcgtggcgacctgatcgctgaaagcgtccaccggacggtcggcttggcgcagatcgtagtaccggtgaacttcctcgtcgaaggcgggcagctggtcgagtacgccatcggcgtcagccgggtaggtgttctcgaagaactgcatcgtgcgcggcatgcgcggcttgacggtcgggttctgatcgggcttgccgatggccagacccagcaccggatacgtgtattccggcagattcagcacgtcgataaggccggggatgttgttgagcagagagccgagaatcacgcagcccagtcccagcgaataggcggcggtctccatggcgtgcagggccagcacggcgtcgttctgagcttgggtgaagcgatagctgtacttgagatggaattcgtcggaagcgggatcgatacccttgcgttcggcgatgcgtgcgttgcggtgctcgtcgatgacgaacacgtacagcaacggcgcggtggcgatatacggctgatggccgaattcggcgagcttggctttggtggccgggtcggtgatacggatggcggaccagtcgttaaggaactggctggacgcggcatgttgggcgacggtttcgagcgtggcgcgggtatcgtcgtcgatggcctcgtccttgaacttacggatggagcggcggcccagaagagcctcgattgttgcgttggcaaccatggctttattgtcgcacggcagacgccggacgccacggtggattacctcacagtgaaatgccgatattgtgtggcggaactgtgctggactgatggttcctgtcgattgactgatggttccttgacgaaattccagcgatgagtcatcagtcagccaacagaaaccatcatccaaccgggggattagcggctgggcttgcgatggcggtggtcgacgaacgccttggagccccgatccgacagctgcgaaaccactgcgccgagtgcggccgaaacggcggcgaatgccagactcattgccagactttgcggcgcgtctgccgccagtcccttgcgcagattgcgtttgcttgtgcccttgtcccatatcatctggaatgctttgccggcaaccaagcctgccagcgctgggactgccgacttgatgagcttgtcgcccagagaatcagggtcgttgagccggtcctcgcgcagcctgttgaccttctcgtcgatgcggtgcaggctgtcgaccgcgcggtcggcgctggaggggaagtcggtgttcgtttcgtcgctcatgactctcagtctaatagcatctcaatcatctcagcgcaaaagatgggcgttaatggtggagtcatgaacgagcgcagactagagtggaggcatgagcgaacagaacgtgaacggcaccgttgccgtcgagaactctcgtggcggcaatggatttttggtgttgctgcgccacggccagaccgtgtggagcgaatccgggcagcataccgggcgcacgaacatcccgttgaccgcggtcggcgagcagcaggcagcggatgccggaaggcgcctgcgcgaggccttccccgaaggattcagccagagctgtgtgttttccagtccgctgaagcgggcgtgccaaaccgctgaattggctggttttgcggaccacggtgtgttggacggcatcgctgaatgggattacggccgagccgaggggcgtacgcgccagcaggtgagtgaggccagcggttttgaatgggatgtgtggcgtgacgggccgcgctcgctgacgcccacgctggagggcgactgggtcgagaccttgccttcgggcgaacaggtgccggtccatgccgggcctggcgagacgctggaagaagcggcggcacgcgccaagagcgccatcgacgagattacgccgctgctgaaagacggccataatgtgctgttggtggctcatgcgcacatcctgcgcatcctcacctcgcaatggctgggcgtggacccgcatttcgcacggttgctgcgtttggatacggcgcactactcggtgctcagcgtctataagggagataacgtcatcgaacggtggaacgcctagccccggttgcgctgcgattgcgctggcctgcccgctactgcgggcgggcctttattgtttgtggcgggaattgcggtatgtcgataaatgatttgcaaacgatagcgtcggcgtgttgttttttgatgggtataagtggcaatcgattgccatgaaagatatgttagcgctctcatgattgcgaacgcttgcattgcgataatgaggcaaaaatgactgaattaatgggatatttgttgacaatggcctgaaaatgatgatttatgacgcgccgatattgctatcgtttgcaaaaagaagcaaaccgttgcacaatagtgcatgtcgatagtcgtaaaggtgcgtgctagcgtacctgtcccgaccggggacggccgggtcgacgatgaaagagaaaggttcgatgatgaatcgtacagtcaagtcagcagtcgcgatggcggctgtcgctgcgatgtccctcggcgctttggcggcctgcggaagctcgacctccggcgatgacgccaagggcaaggtctactacctgaatttcaagccggaagcggctgatcagtggaccgctctggccaaggaatacaccaaggaaaagggcgttgaggtcaaggtgcagaccgcggcctccggtacctacgagcagaccctgaagtccgaaatcgccaaaaccgaagccccgaccttgttccaggtcaacggcccggtcggctaccagaactggaagaagtacaccgccgacatgtccaatacggatgtgtacaaggagctcaccaaccaagatgtggccctgaaggatggcgacaaggtggtcggcgtgccgtacgtgatggaaacctacggcctgatctacaacaaggacatcctcaacaagtacttcgcgctggatggcgccaaggccacgtccatggacgaaatcgacaacttcgacaccctgaaggccgtggccgacgacatgcaggcccgcaaggacgagctcggcatcaagggcgcgttcacctccgccggcttcgactccagctccgactggcgcttcaagacccacctggccaatctgccgctttactacgagttcaaggacgacaacgtcaccgagcagccggccaagatcaagggcacctacctgccgaactacaagaagatcttcgacctgtacatcaccgactccaccaccgaacccacccagctgagcgccaagaccggagatgatgcgaactccgagttcgcgctcggcgaggccgccttctaccagaacggcacctgggcctggaccgacctgcagaaggccggcatgaccgccgatcaggtaggcatgatgccgatctacatcggcgtcaagggcgaggagaagcagggtctgaccaccggttccgagaactactggtgcatcaatgacaaggcctccgacgccgacaagaaggccaccgaggacttcctcaagtgggtgatcacctctgataccggcaagaaggccctctctcaggacatgggcttcaccaccccgttcaagaccttcgatgacgtcaaaagcgacaacccgctgaccgaggccgccgtggaagaccaggagtccggcaagacccaggtttcttggaacttcaccatgatgccgtccgaggaatggaagaacaaggtcggccaggcgctgctcgagtacgcgcagggcaccggcaagtgggatgccgtcaagaccgccttcgtggacggttgggcttccgaatacgaggcctcgcactgagtctcatagagtcccatagccgataagcaacaatccgcggcgcccctgcctttccttctccaggggcgccgctttgtattgctgagtctcgcacaaaatcgtccgccgcagaaaagtgtgaggcacgcacccgctcaatcgcacgctgtggggccatgaatcggcgatttttcgccattctccacaatgtgcgattgagcgttattgtgcggttgcctcacgctttttctatggtgggctttgttgtgtgagcctacttaacgcgggaggtggaggagcggaccttcagctgggccgggaacacgatgtagggttgctcaatcggcttttcgtcaatgagatcgagcgtcatgcgggctgccacgcgggccatttccaccggatcctggcggatggtggtcaggccgatatcgccggtgtagaaactatcgtcgtagccgaccagcgagacgtcgccgggcacggagaatccattgcgctccagctggaacataagcggcaaagcgatgccatcctcctggcatgcgatggcggtgggcatctcgtcttggctcatgagttggtcgaccacgtcgctgatttcataacgtccatcgtcatcgaccttgcagacgatgacctgcggctcgatgccttccctgcggcagcaggcggtgaatgagtcgaatcggctttgcacggagaagctcagcgacacctcgcgattggtgctgatataggtgatgcggcgatgtccgagattgataagatggcgggcggccagcgtggagccctgcacgtcgtcgatattgacggcggcggtaaagccgcgggcttcgggctcgactgaattgatgccgacgatcggcacgccgaccgaagccagttgcgcgatttcgttgttgtcgatatcgaaagacgccacaatcacggcatcggcgttacggcgtaccggcaacatctcgaagaattccttgcgctcctcgatgctggaaatctggaataccgaaatatcgtagccctgcgtgtgcagcacctcgttgagcccctcgatgaccgaggcggtgaaccacaggcggatatggccgctcatcagtactgcgatgcgcagggcgcggccggatttcagggccgcagccgagcgggagagtgagaaattgagtttgtcggcgatggcgagcacgcgctcgcgggtcttggccgacaccagatccggcctggtgaaggaacgtgagacggtggagatggagacgccggcctcgcgggcgacatcctgaatgctcgtagccattgcagcccccttgcgttgaatggaaaatcgcaatacacatgcacaactgactccagtgtacatgctgattgattgatttgcggcgatgacaacgattgtattacaaacgtttgcaaagtgtttatgacggcgtcagattggctttatatagccattatcttagttgaaagaagattgctggagctggagtatgctcgagcttgaaacgctgaaaatgacaacgtttgacatataatgattcggcgtttactatgaacataggcttgaacgagaacaggccgtgcatgcggttctcgatcggcaggctcgcattgagttgaactccgcagccggcgcacgatgcagtgtcgcaacgcagcggactcaaggaggaggaaaagtcatgatcagcatggctggcaaggcgatacgcagatggtgggcgctgttcgcgctccccacattcgccgcattcatcatcgggttcctggtgcccttcatcatgggcatctacttaagcttctgcgaattcaccaccgttaccgacggtgaatgggtggggcttaagaactacggcaaagcgctgaaggacaaggaattcctgcacgcgctcggcttctccaccgcgttcaccatcgtgaccaccatcgtgatcaacgtgatcgccttcgccatcgcctacatgctgaccaaggcgatcaagggctccacgctgttccgctcggtattcttcatgccgaaccttatcggcggcatcatcctgggctacatctggctgctgctcctgaacggcgtactggcccactggggccgcgccctgacctataaggcgtcctacgggttctggggcttggtcatcctggtgtgctggcagcagatcggctacatgatgatcatctacatcgccggcctgcaagccctgcccaccgatgtgctggaggccgcggccgtggacggcgccaacggacggcagaccatgttccgcatcatcatcccgctgatgatgccgtccatcaccgtgtgctccttcctgaccgtgaccaacggtttcaagctctacgaccagaacctcgcattgaccaacggtgcgccgagcaacatgtctgaaggtctggcgctgaacatcacccgcaccttctacggccgtatgggctgggaaggcgtcggccaggcgaaggccgtgctgttcttcatcctggtcgcggtcatcgccctgattcagaacaagctcaccacgagcaaggaggtggcagcctgatgaacgagaacaagcctgtgaagcatggcgcattatgggccgtgctgtttgccgtcgtctccctgttctggattttcccgatcgtcctggtgctgatcaactccttcaagcagaaggcgtacatctccaagaacgccttctccctgcctgccggcaaggcgttcgtgggacttgagaactatgtgcgcggcatcgagaccacgcagtttttcgcctccttcggctggacgctgcttatcaccgtcggctcggtggtgctgattctggtgtgcacctcgatgtgcgcatggtggatcgtgcgcgtgaacaactgggctgcgaagctgctctacaccctgttcctgttcaacatgatcgtgccgttccagatggtgatgttcaccctctccaagatcgccgacatgctgaagctcaataccccgtggggcctgtgcatcgtgtacctcggtttcggggccggtctggccgtgttcatcttcaccggcgtgatcaagggcatcccgcaggagcttgaggagtccgccatgatcgacggcgcgtcagtgccgcgcatcttcttccagatcgtggtgccgatcatgaagccgtcgatcgtctcggtggccatcctcgaagccatgtggatctggaacgattacctgctgccgtacctgacgctcgacctcggcaagtacaagaccatctcggtcgccgtgcaatacctcaagggcggctacggttccgtggatatgggcgccatgatggcctgcctggtgctggcaatcatccccatcatcgtcttctacttggtatgccagaagtatatagtctctggtgtcatggcgggagccgtcaagggctgacgactcgcgtcgtcagcccatggctggaagcccagtgggcttccagcaggctccaggctgagccgcgacagcggcgaagctaatgatgagcctcgtcgtaggcgagtcc

SEQ ID NO: 3225 - DNA, 3336 bp, Unknown
  R53_2m  MAG No. k141_6063
gacccgacgcgcccccggcttcgccctgctcggcgaactcggcgaggaacgcgacgtgattctggaactgaagtccatcgccgacgtggcgctggtcggtttcccctcggccggaaagtcgtccctgattgcggcgatgagttccgccaagccgaagatcgccgactacccattcaccacgctggtgccgaatctcggcgtcgtcatcgccggcgactctcgatacaccatcgccgacgtgccgggcctgattcctggcgcctctgaaggcaagggcctgggactggagttcctgcgccacatcgaacgtaccgaaatcatcgcccacgtgattgattgcgccacgcttgaaccggaccgcgacccgatgtccgactaccacgcgctggaaaacgagttggcactctacgccgacaagctcgaactgccattgggcgccatcccgattcccgaacgcccgcgcatcgtgattctgaacaagatcgatgtgcccgaggccaaggaattggccgagttcgtgcgtccggagttcgagaaactcgggctgaaggtctttgagatctccaccgcctctcatgaggggctgaaggagctcaacttcgcgttgtctgcgctggtgcatgagatgcgtgaggaagtggccaaccgcgagcaggccgaagaggagacgcgcgtggttatcaagccattggagaccaagggccgccgtccgcgtcgcgctgacgagggcggcagtgcgcttgagttcacggtcgagcgccgcgaactcggcaatggcgaagtgttcttcgaggtgcgtggcgtcaagccggagcgctgggtcatgcagaccaacttcgacaacgacgaggccgtgggctatctggccgaccgcttggccaagctgggcgtggaagatgagctgcgccgcaagggtgcccaccctggtgacgaggtgcgcatcggtcgcggtgcccgtatggtcgaattcgattgggatccgaccatctccgccggtgccgaaatgctcgatggctccaacctcggtgcccgaggcaaggatctgcgtcttgaggaacaggacccgcgcatgcaccgccgctccaacgccgaacgtcgtgcccaataccacgagatgatggacgcccgtgccgccgtgcgcgatgcgatgatggccgaacgcaaggccggccactgggccgacccgaccgttgacgacgatcgccatgacgaaaccagtctgttcggccacggtgagtccagcgaagatggtgaaaccgaggaataaatgagcactccgagtcaggccgaggtgcggcgcatggtcgcatccgctggaaccatcgtcgttaaggtcggttccagttcgctgacgcagccgagcggtcacctcgatccaggcaagctcgacgctctggccgccgcccttgcccaaatacgactgatgggcgggcgtgtagtactggtttcctctggtgctattgcggccggcttcggcccgctgggctttgacgaacgcccggccgacgtggctactcagcaggccaccgcagcggtcggccaaggtttgcttatggctcgctacgagactgcttttggccgtttcggtattcgcgtcggccagattctgatcactgccgaagatacgattcgtgccacccagtaccgcaatgtggaacgcacgctggaccgattgctggaccttggtgtggtccccattatcaacgaaaacgattcgctggcgtccaacgagattcgattcggcgataacgaccgtctgtccgcattggttgcgaacctagttcgcgcggaagctttggtattgcttaccgacgtggacgcgctatacacggcaccgccttcccagcccggctcccgccgtgtggaatatgtgcccaacgttatcgatgcatttggcgacatccaggtttccggctccggctccaaggtcggcaccggtggcatggtcaccaagcttgaggccgcgcgcgtggcggccgtctccggcatccccacggtgctcacctgcgcctcgaacgcgggccctgcgatgatgggcgatccggtgggcaccgtgttcgcaccggttaaggcccgcggttcgtcgcgtcgtctgtggattggcttcgccgccgacccgcgcggcactattgtggtcgatgcgggtgccggccaggcgattcgcggcgggcgtgcctcgctgctggcggccggcgcgctcgaagtgcatggcgatttttccgccggcgatccggtctggatcgatgccgaaagcggcgaacacctggcccgaggcctcgccggcttcgattccgaagaaattccgcagatgctcgggcgtaacaccgcccaactcaagcgtttcctcggcccccagtacgcccacccactggttcatcgcgacaatcttgtacttgtgtgactgatgggatctgtcacacgacagatcccatcaccatagtgcggctctggcgatttttcgtgctgtaggtttagcatggaagccatgactatggcgcaatggcagactctttccgaccgtatcaacactgtggcaccgagcgctacgctcgccgtcgattccaaggccaaggccatgaaggccgccggacttgacgttatcggcttcggcgcaggtgaaccgaatttcccgacccccgcaaacgtggtcaaggctgcggcagatgcctgccttgacccaaagaattacaagtacacgcctacgccgggcctgcccgagctgcgcgaagcgattgcggctaaggtgctgcgcgattccggctacgaggtgtccgccgaccaggttgtggtgaccaacggtggcaagcaggccgtgtatgaatccttccagatcttgctcaacgatggcgatgaggtcatcatccccgctccgtactggaccagctatcctgaagccgtcaaattggcgggtggcgtgccggtcgaagtattcgccggtgccgacgtgaacttcgagccctcgcttgaggcgctggaagcggcccgtaccgagcgtacgaaggcaatcatcgtcaactccccgaacaacccgaccggagccgtctggaagccggaaaccgtggaagcgatcggtcgttgggccgtcgagcaccacatctgggttatctccgacgagatctacgagcacctgaactacgacgacgcgcgcaccacctacattggtgccgccgtgccggaatgccgcgggcagctgctggtgctgaacggcgtggctaagacctatgcgatgcctggctggcgcgtgggctggatggtcgcgccgcttgaggtggccaaggccgccaccaagctgcaggggcatatgacctccaatgtggccaacatctcccagcgtgc

SEQ ID NO: 3226 - DNA, 6190 bp, Unknown
  R53_2m  MAG No. k141_6117
cccggccgacaagctggaacaggtcaccgtggtggacgaccagtacggtcgcctgaccttcaccaaggacatggccgaggcgattttccacctgctcgacagccacgccccctacggcacctacaacttgaccgggtccggtgcggtcaagtcgtgggcggagatcgcccgtgaggtgttcgatttgacgaacggtaacggcgacaaggtcaagcccatctcgacggccgagtatttcgcgaacgcgaccagcccggtcagcccgcgccccgtgcacagcgcgctcgacctagcgaagatcgaggcggccggatacacgcccgccgactgggaggaaaccctcaaagaatacgtcacccgcgaacttaacaagcggtgaaacaggaagtgaaggaaaacaccatgaaaggcattatcttggctggtggttccggtacgcgtctgtatccgttgacgacggtgacgtcgaagcagttgctgccggtgtatgacaagccgatgatctactatccgctcagcgtgctcatgcttgcgggtatccgtgacatcctgatcatctccacgccgaaggacctaccgaacttcgaaaagctcctcggcgacggttcgcattacggcgtgcacttttcctataaggtgcagcccagcccggatggtttggcgcaggcattcctcttgggagaggagttcatcgacggcgagccgtgcgcgctcgtgctgggcgacaacatcttctacggcaacggtctgggcaccacattgcgcaaggccgtcgccaaggccgaaggcggcgggggcgcaagtgtgttcggctactatgtcgacgatccggaacgctatggtgtggtcgagttcgacgagcacaagaaggccgtgtccatcgaggagaagccgaagaagccgaagtcgcattacgcggtgacgggtctgtacttctacgacgagcgtgtggtcgagttcgccaagcgggtcaggccgtcggctcgtggcgaactggagatcacggacctgaacaagatgtatttggaggacggctccctgaacgtgcgtacgctgggccgcgggtacgcgtggctggatacgggcacgatggattccctgtacgaggcgggcgagttcgtgcgcaccgtacagcgcgcccagggcctgcccatcgccatcgtggaggaaatcgcctacgaaaatgggtggatttccaaggaggagctcctcgaatcggccgaacgttacggcaagagcccctatggcaagcatctcaaggatgtggccgaaggcaaagtcgtgattgttcctaacgactgattgactcggacgaatgcggaaacgccatagtattttgagattaatgctgagtgcgatagcagattacgcatttgccgatgtatatgacgacattgttcatcaatagtaaaaggggctgctgcattgcagtatgcagcagccccctatagcgtgcaataacgcgaattcctgtaccttggtggttattctgcctttttgcggccgcggcgcttcatagtttcggaggtggcattggcggcatcgaaaatcacggttttgctttccggataggcagcaccgttgacggactggtaagccacgtatccatagccgaatattaggtaaaacgggtgtcggaactctccgatgatgggcataactgcctgcgatatgcgagccgatgcatcctgtctttttccagaggctcactctgttgcgtatgcctgtgtgctattgcgacgaggcgtacgggaatggaccatgggcatattaccgtcagacatgctcgtgctttacactgaaatccactccacgtacactgatacccagtagcacaggaatactgggcacggcgacccgcccgcagacgacgggacgatactgcgtatacgggaaggaggtgtgccatgggcgacagagacttcagattcaaactggattgcgccccgcgggacgtgaccccgaaggcgttgagccaggctgtgtccgcattcgcaaggatactgtccgcagcggatgcgtccgactggcgcatctcccgcatggaactgcacagcatcgaccttgccgcgaaacccgtggtggtggacgagagaacggaacgctcgttcgccacactggacaccatcacccgcctggccacacgagacgacgtgaatcgggacgaggcattccggttctccggcgtattttccgcgttgagtgatctggccaaggagaccaacgcgaacatcaccgtctcctcgcacgaggcggagggcacgttcacgcccggcgtgctcaccggcatcaaccgtctgctgatccgtggatcacgccgctcgttcggtcatgtgcgcggcatggtggataaggtcatcctgcagcgcacgcaccgcacgctcgggctggtcgaccacgtcacccgcagccgcgtcgacgtgagattcggccccgaactcgacccgatcgtcaaacgcatccaagtgggcatggaggtcgatgcgcgcggcttcgtacgcgccgacgacggcgaactggtgtccgtggacgccgaggacctggagatcatcgccgacggccaccgcgccccggctactgccgaagacctggaagggatcatcagcctcgacttcactggcgctctcggctccgtcgatttcgtctccacgctgcgcgagacccatgaccacggcaccaccacgggaggcgggcgatgaaaatcaatgagagcgaatcttcacggcgctatcccgaacgcgccgtggtagacaccaacgtcatcgtcaacgtggcgctcggcaaggacgacaccaccgacccgtcattcctgccccgatccgaacgactgctcaacgacggcatcgccggggagctggaattgctgctgccctcgatggtgatgatcgaactgtcctgcaacttcgtcatccgctccggccaatccggacagacacgcagtcgggcacgtgaccacaagcaacggctgatcaaatggtgctatgactgtgaattgcccatggtcgatctgacggccgacgccgctggctggttcagcgaaacaccggcggttcagaacctccggccgggtgacgcggcgattcttgccagcgcgaagtacgcccacgccacccatgtctacacttgggacgacaaattcatccgcacggtgcagcaggcccgcgagcaaggccagaccgatatcatcgcatgcaacccgcccatgctcccgcccactcaaggcgaactggaactggccggaaactgacagacgcatagcgaatgagtcgtgtgccaatggcgatcggtcagggcacgactcgtacttgctttaccagcttgacgccgtatccgtcgtatgcaggtgcatgttcattatatgaatccgaaagccaacgttacaacgatgacctatccatcgtttcaagccccgatggagagactggaccgccatcggggacggcaaaggcaacacgaaccgtgtaaagacagctggaatttgaaaaagtaaaaaatcatcacttgttccgcatcgggcactggtcataatcccacgggcatccattacgataggtcaactgcttataaccgtcagagacgctctgcccgatcatgcgtgagcaataatccagatcgatgattctcgccagacaatagatggtcactcgttgcgctccagactgtttaagcatgatggaggctgattcggcggtgcctcccgacgtccatgtatcgtcgatgagcagtacatgtcttagtgtctcatccgaatacgagccatccagcgagaacgtggatggtgcaatcgctcgatgtttctgctcattagccagcaatttcacctccgggatggttttattcagcatcggcgagacccaatccgttgagtgggtgtggctgaccatagcgttcgctggttgtggtcgacggtatggtagcccatgcgctcggcatcactccatcagacgtatgagttagacaactccaatggacgacaagcgcatcaccaagcacatatttcagcgtctcgcagtaatccttcttggattcagggcggttgcgcttgtatccatccatgacgcggtacatctgatcaaatttaatagcgtagttggcaatcctgacccgatccgccatcagatgtgcgacgccgagagcctcagcctgttggcgcagactagtgcagctgtagcaaagcgatgcgctgtccagcttgggaccgccgcaggtaggacagacatgatgcttagcactgcggtatatcactgttttggcatagctgcccaacctccaccccatactctgttcaaagcgggcgtatgcagccagcagatttagattcagcgtagagtcaagcatattgcgccttcgcgtcgagaatgtttcccagcaatgtgtctacatcgttgtcgaggaatgagatcctatcaagtgctttaccgacctcttcgacactgtgcacgacgaacacgcctggcttgttacgatattcctgcgcccattcggtgcgttccagtacgacgtcacggaaaatcaacgggcgtccgtgacgttgcgcctgacgggcctgaatacgtgtgccggaatgttccgatgcctcaaccaccacagtggccagaccatatcccgacatcagcgcgttgcgcatcgggaatgtctgtttggttggcggactgtcaggccagaactgggatagcaccagtccccgcttttcgatgcttttctgcagttcacggttggatgcgggatagcaacggttaatgcccgtgccaatgaatgcgaccgttcgtccgcctgcttccaatgttgcacggtgggcgaacgagtcgacgccttcagccagtcctgcgattacagtcaatccacgttcgcacagcatgcaagccgtgtcatgggcgaacgtggcaccctccggtgagcatttgcgcgatcccacgacactaacacctaaatcgttcgagagcagagaacccttggcgaacaggaatggcggcacgtctacgaccgatcgcagccgcgaggggaaccggtcgtcgaacacggtgaccaagtcaagactttgctctcgccactgcgtcaccttctggttggcttgattccacgcggcattcgctttcgccgtgtattcgacggatggcatgtcctccacctcaaacagtgagccctgttcattcgtcggcacatattcgtgttcacgaagcggattatgcaacggatccatccgatgcctgagcacacgcacagcactgccttcaactagacactcgttggccaatgaagaccacgtatcaggccgttcgcagcactcaatcaatgcgatcagagcagcgttttcaacatcgagctgtctcctatcatcaaaccgcaactccaatcacctccaacatcgtagagcctcgctcaaccggaaaacaacgagatatcgacataccattttaccggcaaagaagtaaattattctcttcccgctgtctatttagaaggctgtggcacttgaaacgtacctgtacaatagtcgaaactgcgatgttgcggtttgtgtttcgtgaccggggaggggtgattgtggacagtcgttgtgtgagagggcgtgccgtgaattatcagtggcgggggaagcctattgaacatgtagatggtgagtccgctcaacgtgccgttgctagatggttcgctgctatggcagctaatcaggaatttgcctggggattgctggattcaaggcgttataacaaatacaagatgcgattagaggcttttgttgaggagaaattggatcgtgccgtggccggcagcctgactccaggcaatgaagtcatttttctcgctcattcgaagcgtggggacgcgccaatgttcgagtttcgctggcatcgcgatgcgcgtgaactgagagttggcaagcgcgaacaaatacggcattacgatgctgagccgttggatttaattgatgtggtgtgggggctgcatatgcatctcaaggatgtgcggagtggcgatgatgagctaatacaaaaagcccaaaataaggaaatcgatagagcgattgcagtatatgagcagcaggcgtccgatgggcgagagactgtttcgtgagagataatcggcgatatatatattagatatagtaatattttggaatggcggtgagaatgatggggcgagctgagtacgactatcgcgaattggcttatgatttgtaccatagcgg

SEQ ID NO: 3227 - DNA, 2872 bp, Unknown
  R53_2m  MAG No. k141_6301
aatccgacggccagcggcaccaaggccagtagaagcagtggcttttccatggcgcctcctttctgaacgctgtgattcagagatatctttagctaatcatgggatatgggcggcttggcgccgattggtgatggggctcgatcctgatgttcgtcggtgccggaatatggtgcattccgtcaaatagaggtgggcacttggatacggtgtcgctttattggatttctttgtttctatggtttgattatgccacgagtccaacaaaacgttaccggccccgataaggggctgcggacgttttcttggagaccgaacggaaagattttcgtatgtccggtcttgaggaacgagagcgtgcggtggggttgtatttcaccacgccgatgacgacggcccaggtggtggagcacctgggttatccgaccaggcagtgtctggagcgttggccggcgatggattcccggtatgccggccatatggccaaacccatcatcccactggagacacggcgaagggcagtcgagctggtgctgggcggcatgcagcagaagcgggccgccaaacagctcggcgcgggcgtcggcgcggtgcatggctgggtcagggcgtaccgcaagggcggcatggccgcgttgcagcccaaaaacaggaactccgcgcagggcaataagcccgctgactcccgtcgccggccgtccgcagccgatgatgatgacgcggaggctttgcgccgcagggtcgaggaaccggaaccgggggaacgcgttgatgagggaggtggcggaggctcgcagaaaaagaccccggcgccgacctgcggcgcctgtcgaacagggagaagaccctgttgatcgaccggttgaggccggcgtattcgcccggctcgatggcatgcttgcccggcatcgcgccgagcggccacctactgccaccacgcccggctcggagttgacaagtacgccggactcggggcggaggtggccggggcgttcgccgattccaagggcaggtacgggtaccgcaggatcaaggcggtgctcaagaccggcgtatcggagaagtcggtccgcaggatcatggcggaggaagggctcgtggcgcatgtgcccaagcgacgcaggtatagttcctacgagggcgagacgacgccggctcccgccaatctcgtcgaccgggacttcacggccgagcgtccgaacgagaagtggctgacggacatcagcgagatcaaggccagggacgggaagggcgtgcctttcgccgccggtcgactgcttcgatggcaagatcgtcgcatacaccgccggcttcagccccaacgcggagctggccaaccggatgccggagaaagcggcctcgacgctgccggggaacgcgcgtcccctggtgcattccgaccgtggatggccattaccggtggcccggatggctcgcgctcatggaacgcttcgggctgacgcgctccatgagcgcgaagggctgttcgccggacaacgcggccgcggagggattcttcggcaggatgaagaccgaggcggtctaccccgagaagtgggaggaacacacccgcaacgaggtgctcgccttggtcgatgagtacatacgctggcacgaccacgagcgcatcaaacagtcgcttggttggatgagcccggtacaataccgtcaaagccaaggaatggctgcgtgattatctccaagaaaatgtccgcagcctcctacccgtatttcagacttcctattacaatattcaggtacgttattgaagaaatgagtgagcatagtggacgatacccaggataatcaggagttcacagtagaagaagccgacacaaacggtacgacttcggcggaaagcagccaatcctctgctcattcagaccgagacgataattctcaggaggctcaaaagagtaaaacgtcgctgcctccaatcttccagcagatccgagcacagctcaacacgttgatggcctctcaaactatgactgcgctttccaaagccctgacagtcttgcactccgtattcaagaaacgacctcgattcccttacctcctgtacataatggtgatggcaatcgtcgattcagccgcggtgctgttcattcaatggggcacctatacggagccgacctatgccgccccgagcacagtggacgaaaccacacggctgctgaacagcatccgcggtcaactcacgcgcttcgtcgcacagatgtggatggagcaaaaatacatctggctgcttaatttctgtgttctgggcatggtctacctggtgctgatttttgtgctgaaccgattctgggtggcaacagccttatttgcgattatcacgagcgtattcgctgtggcgaatcacatcaaaatccagttgcgcaatgaaccggtcattccctcggatttgagcttcatttccagcggcaacggaggagaagtcgcatcatttatccccaaagacagccaggcattagtaaacaacaccatcaccatgctcgtctggcttacgattgcatgcctgctgcttcaatttatcgatggtcgccgatgtgtgatttccttccactggcgtcgtccattacgcaacacaaaaacaataatcggtaactgcacacgtattgttgcagtcattgtcagcacatccctgctgtgctcgttcaccttgaacctcaacacggtaggttcatggagccacaattgggcacaggcgttgggcgatagccctaccttatgggacgctgccggcgatgccagtctgaatggccccacaatcagtttcttgcgcttggcgaatccaaaaaccatgacgaagccaagcgactacagtcaagcgaccatgcaggaaatcgctcaacgatataacaagatagcc

SEQ ID NO: 3228 - DNA, 11156 bp, Unknown
  R53_2m  MAG No. k141_6439
ccaatttcaatccacgcaccccagtggggtgcgacggagacgggaatgtccactatggatatcgacatatttcaatccacgcaccccagtggggtgcgacccatggtgcgcaacgggcatctggacgacctgatatttcaatccacgcaccccagtggggtgcgacgatgacgcaaatgccgttctcgttggaactcccaatatttcaatccacgcaccccagtggggtgcgactcgtgacggtgccattggcctcgccgtaacagatatttcaatccacgcaccccagtggggtgcgacgtcatgagtttgggaaagccttacccatctcctcgatttcaatccacgcaccccagtggggtgcgaccctcgacctcctgagcagcgaggccacgcccaccatatttcaatccacgcaccccagtggggtgcgaccaacactaatttcgtgacatatcaaaactgcggaatttcaatccacgcaccccagtggggtgcgacccgttcacgccaccgcgccatctcggcgggggagggatttcaatccacgcaccccagtggggtgcgactcgggccagacaagtcgcgttcaccagggagccaatttcaatccacgcaccccaggggggtgcgaccgcgagaatgggcatagcattccataatatggaagctccgtctgttctcaaaactgattttatcgcgaaaatccatgtacatcgctcaatacacaaattctcgaaccaaaaacatcaacagaccatccacttttgagttatcaaacgacgaggagaacataatcagtctccaagcattcattaatctcagtgcgaaagaacaagtatttcatgagaactcagagttcgcgctggtcacatggctgcagcatcaagcatcgatgctcagccacgattttaatcgtatcgtcctatactgtcctacctcgttttatccaccttggtcttcatcacagtaaggttttgcattgcccagtcatcatggaaaaccgtcacacgaaccgacattagagcatcatcacgtcatcgattggcaggtgccgctgtcttccgcgatgctcaatcttcgaagaatacttcgcccctaaattgtagtaacgcaggctatcttgcgattcgtccattatttccgccaaatcatgtttcaaaatcagatagtcagacggtgacaccgaacattcaaagacgctattctgcacgcgttggccgtatttcatgcaggttttagccacgttccgtagtctgcgtttgccttcaggcgactccgtattgacgtcataggccacgacaaccatcattccaacacctcatcccggtttccatctctagttggctcaaactccaatgcccctcggcaagaccaaagtaccctcccaagaagaactacttccacatgaacggcgggtaagcgtccaaatcgccgcgaatcgcacggttgagcagcaacgcctgtgcatggggcaccaatccccacggtatcttctcgttgaagaacgggtgggtgattgtctcctgcttgcgtttctgccaagcagcaagcacggttttgcgcccgccctcggaaagaaacacgccgccattctctcggatctcgaactgggaaggcttgaccgctccagtgttgatgagcgtcagcacgaaacggtcggcgatagccggacggaattcttcaaccagatccaaggccagggaagcacgtcccggtcggtcagtgtgcaggaatcccacatagggatcgagcccgactccctgcaaggcagcgatgcaatcgctggtcagaatcgagtacacgaatgacatcaacgcattcgtccgatccaatggcggtctgcggctacgctgctggaagaagaaatcgtccttgttgcgcagaatcaagtcgtcgaaagcgaagaaatagtctttggctgccagcccttccacgccgcgcagctcatcgatggacgtgcagtcgcgcgcgttcagcagagcctgccgcagtttctcgctttgctccgcgatacgctcgctgttgacgcgcagcgcatggtcgcgcttggtccgctcaagaacccaacggcagttgtagatctttcctataatgaacgactgcgcaaaaggcagggccgcgtcttcgtcgtccgcgaaacggaactgctcgcgacgaagtagtacgtttcgattcttctcaccaagtatcgagcagtagtaacggccgtgtggagagaagaacgaaaggccgacgccaaattccgaacacttgcccatcaacgccggcgacgagcccttataagaaaaactcatgatgccttctagggagcgcagtggaatcctcccgagcgtggtatctccttgctggacaatgacattgtcgttcttcaacgataggtaagcgtcatcgctggtgacatacagtgtgttaagtaactgcttcatatgtggtctgacttctccccgatttccacttccccacgcacggcttcctcaatgaactgtctcgccgaacgcgtcctgaccagtttcggtagacagacatcgtgcagggagcacgcccgacaggccttcgacggtctgaccttcggcgtatgacctcgagcgaataagtcgtgcatctcccccgtcatcgtgacgattcgattgcgcaaagattcgtcaaaactgacccgctcccggtgtctggtctgttggtagaacaaagcgccttctggaatcgcacaggccagcatctcctccagacacatggcctccgcgcaaagttgaaggcgatccgcatccgtctgcttgggcgcaccatgtttgtattccacggggtaaggaagccaagtgccggatcgtccatgcaacggtacgccagcctccgattgccggaactcgaccacatcacacgcaccggtaattcccaaccgccgcgaaaacacacgcagatcacgcataatcagcaagctgccgcgcgtttccgattcactgtaatcgtgggccctatcgtgttcaagagaaccagccgtcgtgagatagttatcctcccactgctgctcgatatgaattaaagcccactgccgcctgcaaaacgcaaaatgctgaaggccagaaagagccagccaatcatcctctggataatccgattgtgcatgcatacgcttcctctcgcaaacaattcgtgcaattggttttttgatgcgcgtaaatgaaggccagggcttgctgaatgccaaccccggcctgagtggagaatcacagtgtatgatcgaccatttcacttacgttgacggagtctggaatggtctcacggttcacatggacttcataatcaccaaagctgcgagcaacgtccaccccatcgcgcttatgaacgtcgatactgtcaaaaagtttccacgaaggagcgtcaccaagtgcgctactgtgtttgaatacgtacagtttacgaaccgccatattgccgcgtgccgcagaacgatcgaactcgaacatgttcagaattgctcgccatagcatgtcaagatcttcattgcagaaaccggtgacgttctgtgcgagcttggcagaaatgtagccgttcatgcgatacaggccatagggaatgatgaatttgttgcccatggtgttgttcttgtcggcggcatctgcctccgtggtgactgcgatgcgggtgatggaaatttcttggacattaaccggatcaatggaacgggcaaacccgagctgcactggaccccgtacctgaccgcatgacaggctgcctttgacgaatgtggtcatcactgcaccgaaagttcggatatcgaagaattggctgcacatataatctcgtagacgcaaatccaatgtggggtcagatttcttcaatgtcttaatttccttggcaatgatcggggttgcggattctccgctggaaagcatccgaatatttgcccagatcgtggaccagaccagccagcaatccgtcgtcaagatacccgaagcccttggcaaaccctccggcgaggcaaccggccatggccaggtgctccgcgcaggtctcatacccgtgatcgctggttctcgcatagtacgtcgcacacattatcgtcacctcgtcaatcgctccgtatcgcaacgccatcgtcgcagcgcaagcataccacgaaacaaaaaagtggtcccgccgctaaacggcgggaccacttcatgcattccacgcgcccgtgcaccgcgcatcaggcgcggtcagtccgccatggcatcacgccttggcgacctccacacccagctcggcaccttccttcacttcgaaggaggtagccagcgtctcatgggcgatcagatcgcggaactgctcgacatcggccacattggcggccggcacggtcagcaccagggcgatgcgatcggcgatgtccagatcggcagccttacgtgcgtcctgcacagaacgaatcacgtcgcgggcgtagccttcggccagcaaatcggcatccagcgcggtgtcgaggatcacgaagccaccggtcggcagagcggcggagaccgaagcggcggcctcggtggcgttctcctcctccacgcggttgatcagctcgtactcgccttcgaccagcgcaaggtcgccggacggcgtggagaccaccggcgcaccggacgcagcatcgacatgccagtcgccggacttggaggccttgatggcgaactgcacctgcttgccgaggcgcggacccgccgcacgggcattcacacgcagctcgtgaacaatcttcagaccgtgggcggaggcgtcctccagagtcgagaactcaatattcttgatattaagttcggacttcagcagatcgtcgtacgccttgacggcctccacgttcccggccaccacggtgagcttggaaagcggctggcgcacgcggatcttggcggccttgcgcagcgacagcgtgccggaaacgacttcgcgcaccttctccatcgcatccaccaaggccggatcgtcaaccagcacgcggccaagctcggtatcggcgccggtcttctcgtccaccacgaacggccattcggccaggtgcacggattcgccgccggtcagaccacgccacacggactcggcttccatcggggccagcggcgcaagcacgcgcatgaacgcctcaagcacggtgtacagcgtgttgaacgcggaagcgtcctcattccagaaacggtcacgggtgttgcggatataccagttggtgagcacgtcgatgaagtcggagaccgcatcgcaggcgtcggagattgcgaactcgttcagcgacttctcggcggccagcaccagacgacgggtacgggccagcaggtagcggtccatctccggcagaccggcgacctcgtccgcgcgcagctggcgagcgtcgaagccagccccaccgttggccgcattggcgtacagggtgaagaagtagtaggagctccacaccggcagcatgacctggcgcacggtgtcgcgaatgccttcggcggtgacgatcaggttgccgccacgcaggatcggcgaagacatgaggaaccagcgcatggcgtcggaaccgtacttgtcgaacacgccgttcacgtccgggtagttgcgcaggtgcttggacatcttctggccgtcggagccgagcacgatgccgtggcagatcacgttcttgaacgccgggcgatcgaacagggcggtcgccatcacgtgcagcaggtagaaccagccgcgggtctggccgatgtattccacgatgtagtcggccgggaagtgctgttcgaacttctccttgttctcgaacgggtagtggaactgcgcgaacgacatggaaccggactcgaaccagcagtcgagcacatcggaaatacggtgcatgtgcgacttgccggtcgggtcgtccgggttgacgcggaccaggttgtcgatccacggacggtgcatgttgatgttgccgtccttgtcgcgcggatagtcgccgaagtcggccttgagctcttcgagcgaaccgtagacgtccacacgcgggtacttcggatcgtcgctcacccacaccgggatcggggaaccccagaagcggttgcgggagatggaccagtcgcgcgcgttggcgagccacttgccgaactgaccgtccttgacattgcccgggatccagttgatctgctggttcaattccagtagacgcggcttgatcttggtcacggacacgaaccaggaggagaccggcttgtagatcagcggggtggcgcagcgccagcagtgcgggtaggagtgcacgtagctcttctcctggaagaggatcgcgcggcgctcttccggaatctcggcgagcgggccgtcgccggcgcgcaggttgcgcaggatcggcaggttggcgtcgaacacgaaatcgccctcgtagtcagggcactgcgcggtgaagcggcagccatcgtcgagcacgtcggtgctcttgatgccgtgcgcgttcagcgtattcatatcgtcctcaccgtagggagcctggtgaaccaggccggtaccttcgacggtgtcgacgtagtcggcggtgaagatcgtgtagccgttcgggccgggcacgtggccttcggattcggcctcgtcacccgcgaagtacgggaagaccgggtagtagcgtcggcctgccagctcgttgcccttgagttcgcgcacgacctcgtaattctcgccgagttccttctcatagtgcggcagcaaatccttgccgaggtagaacttcttgccagcgaacttgccttcggtcgggcggacctcgacgtagtcgatgtcggcgccgaccacgatggcgaagttggtgggcacggtccacggggtggtggtccagaagacggcgtaggcgtcgtcctcatcgcgcatcttgacggccacggatacggtggtgtcctggcggtcctggtacacgtcggcgtccatgcgcagctcgtgcgcactcaacggcgtgcggtccttcgggcagtacggcagcacgcggtagccctggtaggccaggcccttgtcgtagagctgcttgaaggcccacatcacggattccatgtacgggatgttcagggtcttgtagccgtgctcgaagtccacccaacgggcctgacgatgcacgtagttctgccattcgttggtgtacttcagcacggaggcgcggcaggcgtcgttgaacttgtcgatgcccatcttctcgatctggtcgaccgagtcgatgccgagctccttctgcgcctcaagctcggcgggcaggccgtgggtgtcccagccgaacacgcggttgaccttgcggcccttcatggtctggtagcgcgggatcacgtccttggcgtagccggtcagcaggtggccgtagtgcggcaggccattggcgaacggcgggccatcgaagaacacgaattcgttctggctgtggtcgccggaagggttgcgttcaacggactgctggaaggtgtcgtccttgtcccagtagtcgagaacggtctcctccatgtcggggaagctggggttcggcgcgacgtgcgcggtctcgccgccctcgctcgccttgggatatacgttttcgctcaccgtaaatctcctgttagtactgtgcactggtcctacaggagcgtcattgatggcgattgccgggcgccgacgtgtgccggctggtttcacgaatgtcacgtaccgaaccgtgggccgattagtcaatcgcctcgcagccggaaccgactgtgttccgcccggaacagccatgtctgccgttcctgcctacgaggacgatgacgagcgctggtatgcgctccgcaccgcggtaccacctcgcttatcgcaccggttgcgccgctccgaactgttgcactcggagccgcgagcctgcgcgaccgcttgtgttcggctgtctcgggccgatcccgtcggttctactgggcgattgccgccgttcttccgaagactccccgctgataacggatcactgcctcacaacggtgcatatcctaacacgccacgcggtcaaatcgccgcccacggccacggcaccgtcaggagcccgatttagattgggaccggccaccacggaccgagaaaggattgtcggacaatgacgtatgatttcacgtccatcatgaacaggcatggcatggattcgatcgcggtcgacggactgggcaccgacccgggattcgcgccggacccgccacgcgagggtttcgacgtcatccccatgtgggtggcggacatgaacttcccgaccgtgcccacgatcccgcaggccatcatcgaacgggcgaagcatcccgcctacgggtacttctcccccaccgacgactattacagctccatcatcgactggcagtccacgcgcaacggggtcaccggattgacccgggaggcgatcggctacgagaacggggtcctgggcggtgtgatcagtgcgctaaccgcgttcgccgcccccggcgacggcgtgctgctgcacagcccgacctacatcgggttcacccggagcatcgaaaacaacggctaccgcatcgtccacagtccgctcacgctggacgagcgcggcgtatggcgcatggattacgaggatatggacaggaagctcaaggagcatcacatccacgtggccgtgttctgcagccctcacaatccttgcgggcgcgtgtgggaacgttgggaaatcgagaaggccatggaagtgtacaaggccaacgattgcgtggtcatttccgacgagatttggtccgatttgactctggggaaccaccagcacatccccacccaatcggtcagcgaggacgcacgcaacaggaccgtggcgttctacgcgccgagcaagaccttcaatctcgccggactggtgggaagctaccacatcatctacaatcccacactccgggaccgcatcgtggccaaaagctcgaaatgccactacaacgacatgaacgtgctttccatgcacgcgctgatcggcgcctaccggcccgaaggccatgagtggctcgacgaactgaaggcggtgctcaccggcaacgtcgattacgcctacgactacatcaccaagcatttccaaggagtgagtttggccaaaccggaaggcacctacatgctgctgctcgactgcgagcagtggtgcgaacgccacggcctgagcctgcccgagttggagaaacgcggctgggatgtgggcgtcgcatggcaggacggcagcatgttccaggccccctacagcatccgcgtcaatctcgcattgcccttgagccgcgtcaaggaggccatgcgccgccttgaccaatacgtattcaacgcgtaaacggcatgcatccgcgattgcggtgtcctggaaagacgaatgccgtcaacgaggttggtgcccgttggcggcattcgtcatacgttggccgaaccgggtgaaacccaagttgccgtgcgctatgaggtggatgccgccagcggacgtgtacatctgaccgcccgatatgccggtgccaccgatgcgccgacgctgccggcattcggattggaatggacacttcccaagcagtacgagaacctgcgcttctacggccttggccccgaggaaacctatcacgaccgtctgcacggtggcaagctcggcattttcgagcgcaccgcggccgaagacaatgcaccgtatctggtgccgcaggagaccggcaaccatgaagactggcgttgggccgaagtgcttgacgcccaaggacacggcatgcgtatcagccaggccggcagcgaacatttcgcggcgagcctgttgccgtacagctcgctcatgctggaagaggcgacccaccagaacgagttgccgccggttcgtcacacgttcctgcgcctgttggccgcgcaaatgggcgtgggcggagacgattcatggggcgcgcccgtccatgagcagtaccagctgcccgccgatcgcgcctacacgctcgacgtgaatctggaactgttctaacagcgacaaagaagctccctctgacgagggagcttctttatcgcacagagggagcttctttatcgtgctggtacgaaactgtcacgcaccactagggtggtggagatgaaggtatggtggtgcagcgtgcgccgactggagatggcctcggcaagcatcgtaatcgcagtatcggccagctcattctggtcgatatcgtaactggtcaatgtcggcgaagtgtactgggcgatggcctggttattgatactgatcacactggtatcgcgaggcaccagcactcccgcagcggtaaacgcctgcagtacgccgactgcaatcgagtccgcagccacgatgaacgcatccggcatgtcatctcgatgatcgttaaccgcttcctcccctagagtgcgcccggtgtccacagtgaacgcgccttgcgcgtaaatcaggccttccgcatccagccccaaacgctcggtccaattgcggaatgcggttaatcggctgtcttccgggtattcgtgcaaacccatcgtgaagccagtaccgccgatatagccgatgcgtcgtttgcccgaggacaccaacatatccaatgcgtccaaaatggtttggcttaaatccggttgtaccgaatcgaacaggctgggcgcaggattggtgtcgatgaatacgccatagggcaataccagatggagcttcaacagtctatccgaagagagtacggacggtccgatggagatgaagccgtcgaaatcaccggcgtcggcaatcagatcgtcgatatgggaaaacgacgtgagttccatgtgctgggctctggcattgtcgccgagcacggaccgtagttcatcgaaataggcgtccgccagttcttcctcgcgggtggcgttgtcgagtacggccacacggcgtggcaatgcgatacggcgtgatccggtagcgtagccaagctgttcgctgacctcgatgatgcgccgtcgcgtctcctctttgacggacaatgtcgggtccccattgagcagccgggataccgtggcctgcgagaagcctgatttctgtgcgatttccttcatcgtgaccatagttgagccttccacgcctcagtacgtaacaatacgcagtatttcagtaaattactttactacatagtgtaactcacgcccgctgtctattgagaagtgcaacgcccttgttcgttggttaattccagcagttcgtcggcgaacgcctcggggattgttcatatacgcgg

SEQ ID NO: 3229 - DNA, 7500 bp, Unknown
  R53_2m  MAG No. k141_6545
gcaggccaagcgcatggcccgcgaggcgataacgctgatcaatgatggccagtctgccgccacgctcgacgatatccgcagcgtcatagctgatgctcaagccggccctgtgattgtcgccggcccgttcgccgacgatttcggctgcttcctgggcgattacaccgcccctctgcccgccgatgaacagtcaagcgtctaccggcaattggtggcacgtctcggggaggaccgggttctcttggccgccaagccgagcgatgcgccggccgatcaatgggcgcgtgcgtcgaccgtggtattcgtatgcggcagcaccagcgaacgcagctatgacagtgaattcgacgacaatggcgcggcgaaggccgtaaccgaatacggtgccacctgcggcgaaggcgtggacttgtctgacatccgcctgccctggcgtcaggatgacatgctaggcgaagtcgcggcattgaccaccgctccaattgtttcggtggcggtgtgcggtcgcgcgcatgtactgaccgatgtgctggaacgctccgccgtgacgatctgggccggatatgccggccaatatgggccgcaggccgtagccgacgtattggttgacggagccgacatgtctggccgccttcctgtgaccttacccgcatatcccgcagccattcccgttcgatacaatgaccgccaaagtgccgcgcatgtctacaaggatgcggcggaaccgatattgcgcggcttcggctatggagccggttcgctggcggcggtgacgttcagcgagatgcacgccgatacgcaatcgcatccaggtgaagtgctggtgcaggtgacggcacatgctgacgatcacggggccgcgggtgccgtgaatctgttcgcgcatgtcagcggcggccgccgcatcccacgtttggcaatgcttgtcgattcggtatacatggacttgaacgcgggagagcgtcgcgatatcgcgttccacgtgccgtgtgatcgtctgcgggatgtcggtgacgggcaagttcaggtgacctgcacgctggatggagattcgacgcatacggtcacggcgacgctgccgggggaatattagggggcatgtatgaatgtggggtgcgaagcactggaaccgcatcacacccccggatggagcctgaaaccgcaaggcatccatcctcgcaacctgcaagtctgcgggttgtcacccgatagaggaaacaacaaaggagattatatatgtgttgctcacaaggtagtgaagggcgctcgtccatcggacgcagactcgccgccgtcgcggcgggcgtagtcgccacagcactgatgctcggatgttcgcgggccatgggaacggttgcgaacgcccaggagggggattcccccgttgcggcgtcgcaggagggtaacggcaacaagcatttcatggtgtattaccgcgcatggcgtgacgtgaccatgaaaggcgtgaacaccgatttaccggatgacaattggatctccatgtacgacattccatacggcatcgatgtcgtcaatgtgttcagctacgttcccagtggccaggaagcggcggcccagccgttctatgacaagctcaagagcgattacgcgccgtatctgcatgcccgaggcatcaaactcgtacgaggtttggattacagcggtgttatggtcgacggtttcaagacgtggattgctcagcagggcaaaaacgtcgatagcgcgaccgaatcggattatgacgcgtacgccgatcatgtcatcgaaacgtacatgacctcggttggcctcgacggtcttgacatcgatatggaaactttcccggatgccgcgcaggtggcgatttccgatcaggtcatcacagccctcgccaagcgcatcgggccgaagtcggataacccggaaggcacgatgttcctttacgacaccaatggcagctacactgctccgtttaagaacgtttctgattgcttcgactatgttgcctaccagcagtacggttccgattcgaaccggacggccaaggccgctgccacctacgaacagtttatcgactcgaccaagttcgttcccggcctgaccttccccgaagagggtgacatgaataaccggtggaacgacgcgaccgaaccatacctggacagtcatttctatgatgtggcctcatactcgtacgaccacaatctcggaggcatgttcgtctacgcgctcgaccgcgacggacgcacctattccgacgatgatttggcacacatcaaaccgtcgaatctgatttggacgaagacggccatcgcacaaagccaaggcatgagtctggaaaacgccaagcaggctgccaaccacttccttgaccgtatgtcctataccaaggatgttccagccgaaacgcgccaaaccgtggcagcggccaccaacctgtatgaggtgaacaaggcggtgctcggcgcggattggaacgacggatacagcaacacatatgatccgacgctcgaactttccctgacctccatcgacaccatggcacttaccggtgccatagccaaggcggatgcattgctagctgacggcgcaaccgataccgatgtgcggacaacgctgaccacggccagaaacgcggcggtcactggcctgaccagcaagctgtataccggagctgacgttgtctcctggacggcatcgctcaacaccgcaatcgcagatgcaacgggcggcaagcccaagccgcaacagccaggcacaggcgaaacggacaaacctagttccggtgacgcatcacacaacaagccacagtctgcaaccggacgtctggcaagcaccggttccgatggcaccgtcgtgctatcggtcgccgtgattatgacgctcgccggtatcagcgtattcgcagtccgccgccgcggataacaccggttcgaatgaaccgaaaaacagtatttgggatacggcgcgatatgcgaagcgccgtatcccatggcccacatcggtagggacgaagtagtacgcagacggttgatctccggcgtaagccggaagaagtcaaaggagattatagatgagattgtcactaggcgatcccgctgggtgtacttctgcccgggctcaacacaggaaatggctgtgcagcggtctggccgcggtattgtcgatgaccacgctggcggcgttggccgcaccggccagcgccaccggcacaatgccatgggggtgttcctatgttttgtcaactccttggggagttgacgtgtcgggattccggttggctgtcgtgggcgcgcttcgccctgccggtggcgtccggcgtcctttcccgtgtggcccgattcaggctacgagggctggttcctggtagaggacgccgtttttgagcatgctgtagattacgtcgcagcgtcggcgcgcgaggcagatgacagcggcgttgtggtgcttgccctgttcgcgtttgcgcttgtagtaggcgatggacggcgggtgtttggcggacgcgacgaacaaggactgccacagcgcgttcctgaggcgtttgttgccccgtctggagggtctctcgcccttgatgctggtgccggattggccggtggccggagcgatgccggcgtaggcggccaggtgggccgcgcttttgaagttggcgatgtcgccgacgatgttccagcctaccaggacttcatgaagcagatcgtcgatcagggcatttacatccagtggtacgactcagccacatacccaggtggcggcgtaggctaccaagacatgttcaacggcagcaattcgccgtatgtgcaggatacggacaagggcaagatctctgattccatcttcctgaactactggttcagcggcaacatgcttaaggattcggccgctcacgccgagagtttcggcatcgatccgaaatatgcggtgtttgctggcatcgagtccggacagaagaagttcgacagtatcggcagcaatgcgggctatatgaacgtcaatctcgacgatacaggtaagccgtatgtgagcctcaccgcgctcggcgccgacttcgtctcccgcgaactgggcgacgacaagaaggtctatccgaaataccagaaccaggtgttcgaccgcgaacgccgactgtggaccggctcgtccaccggcgagaagggcaccaccgacatcgccgacaattacatcgacgacggcacgagcaatgacggttggaagggcttcgttcccagatcgccgaatgctccgtggttggcggttccatgttctctacgtcgttcaacaccggtcacggtctcgaatggcgtgatggcggcgaacggaccagcgaccagcagtggggcaacatcaacctgcaggatattctgccgacatggcagtggtggatcgatgccgactccgacccgctgcaggccgacttcgactacggtaaggactcgaggcggtaccacgcttcaagtacaccaaggtcggtggttacgaaggcggcgattcgctggtgctgagcggcaagctctccaacgacaacaccattcgcctgtacaagaccgacctggatgtcgctgccggctccaagattgacctgacctacaacaagctcaacagcgatgattccaagttgcagcttggcctcatccttgccgacgaccccgagaccgtggtgccggtggacgtgacggacggttcggcaggcaacggctggaagaccgcgagcgtggacctgtcccagtacgcgggtaagaagatcgccacgctgggtctgatcgtcaagtggaatctcgccgactactccaccatcaagaactacttgctctaccgggacaataccttcctcggcggccgctacgacgacaccctgtatgtcaagcacctgcccgccaagaccggcacgctcaagctctacgccgtgggcgcggacggctcgcgttcgctcgccaccgaagcgccgctgaacgaagcggcggccgtctccgacgtgaaagtcgaaccaggcaaggacggcaacgtcaaggtctcttggaccaatccgcaggtatccggcgagaaaaccgtgaccgtcaaatccgacaccggttcgtggcgttacgccgcgaagccgtattcccagaccgtcaaggtcgccgccgacaagagcaaagtgacgattgccaatgcgccggttgacagctcccgctatgtggtgaacgtcgataatgcaggtggcactaccgctacggcaacaggtgcatttgccgatgccgccattgagccgtatccggcttgctcggtgatctggaatggcgataatgtgacgctggcccgtcctgagactcaagactggcgctacctgtacatgaccgagaagtggatcggcgagaatggcaagcagcagcaggagaaccagctgggtgctagctacacctactcgcagaacactccgccaatcactggtattatccgtggtcgtaccacacctgcctcatacaccaggtccatcccccgccagtcatgaactgcgggtgcaggtcgaggattacagcggcaacaagaccgatccggtgaagattccgaccgccgacgaactggccaagtgcacggtcgccgaccccacccagccggatgccaagaagtccacgctgaccgcggtcgacggttcggccgtggccgacggcaaggccatccgcacggtgcaggcaacggtcaaggattcgttcggcaatccgctggccaatgccgaggtggcgtttgaactgcccgaaggcgtctcggccattggcggaaacaccaccgtcaagaccgatgccgccggcgtggcttcgctgaacgtcgtgtccacgaaggtcggcaagtacacggtgaaggccgtgctgaacggcaatgccatcggcaagggcgtcaccgtcgaattcaccaaggtcgcggtgacgccgaacaagcccggcgaccagaacaagcctggcgataccaagccgaacaagcccagccagaacgacaacaagaacaatgacaagaatggcgcttcgttgagtgccacgggttcgtcggtcattgcgattgtggcggccatggtggtgctgcttggcgcgggtgcggtggtacttcgcgctcgtagcaagacggagtagttcgtcgcaatacgggtgttgatactcgtgccataagcgggatttaggggttgcccaatgggtgcccccctaaatcccgtttgttttgtcgcaagacatatgccgagaccagtgactaaaatgctttagttatttgactaaaattattgatatcataagagttagcgcacggttgatgcatatggcccaatgcgggggtgccgtcaaccgtatcgcaatagtcgcaatgcggtcgtaaaaaggagtgttcatgagatctgctcgcgaggcatcgtcatcgtctgacggcacgcagcgtgtgagcctgaaagacatcgcagatgaattaggcatctcgcagaccgcggtatccttcgccatcaatgatcggcccggcgtttccgcggaaaccaaacgtcgggtcaaagaggctgcagccaggctcggctggacgccggtctacgccgcacaagcactgggatcctcgaagaccatgaccataggctttgcccccgcacgatccacgcaggggctcacggatgaaagcttcatgctgcacttcatggcgggtgtgcacgcctcgctcagcctcaaaggctatggtttgctgtaccgcccatgccgattcctgaacgaggagatgagcgtatacaaggattgggcgtcgcgcaagcgcgtggatggcgttatcctcgtcgatttgcgagccgatgatccacgcccggaattgttgaagaatctgggtgtgcgcgcagtgcttgccggaggacccgacccgaacaattatgtgccgtcactgtccatcgatgattcacgcacgatgggaaccgtgctcgaacatttgtcgtcattgggacaccgccgaatcgcctatctttccggcgatccgaacctggattattcacaggggcgtgtcgcggcgttccgcgcatttgccaaacggcgaaagctggaatccatcaacatcgaattcaccgattttgttgcggaacaggccgcgatgctcacattggagatgctgcattcaccgaagccgcctaccgcgttcatctatgaaacggagatcctcgccgcggccagtcttcacgccatggccgaagattattccgctcggcagatggaggcgggggagggccatgcggaagtctatccgaatgggctgcccgccattgtcagttttgaagacagtttcatttgtgaggcggcgtatccgtcaattaccgccgcgcatcgtgatgccagcgaatacggtgccaaagtggccaaactgctgctcaaagtgcttgccggagagcaggtgagcggcaaccggcgaatcctcaccccgaaactggtgattcgggacagcaccgccaagcccatggataccatggcgtagaacggtcattgcatcggcttgcagacaatgacatgcgaccagtacggcgttgggcccccc

SEQ ID NO: 3230 - DNA, 6181 bp, Unknown
  R53_2m  MAG No. k141_6600
gatccatcaccctcaagcaccgtgttgtatccctcgggcagcatacggatgaagctgtccgcattgaccagacgcgcggcctcaatgcattcctcatcagtggcgttcagacggccataacgaatgttgtccatcacggtaccggtgaacaggttcacgtcctgcaacacaatgcccaaagacctgcgcaaatcaggcttcttgatgccggccacggagatgccatcatacagaatctgaccttgctggatatcgtagaaccggttgatgaggttggtcacggtggtcttgccggcaccggtggcgccgacgagcgcgatcttctggccgggcttggcgaaccaggtgatgtcgtgcagcaccggcttgtccgggttgtagccgaaggtcacgttggtgaagcgcacgtcgccgcgcagcagcgtataacgcccatcaggcgaggtgatcgcctgctccttggccttcatcgccacctcgcaggcggaaccgcgcagcttttcggcggccttcagagacctcgtaccatcgtcgccgatctcacgcttccacgcccagtggccggtctcatggtcgacttcggtcatggtgcggccgtccggcccaagttccacgttcacgagcgtcacggtgcccttgtcttcctcgatgggttcgtccatcaacttgaagatgcgggaggcgccggcgagcgccatcatcaccatggtcagctgctgggagacctggccgatcgggttgatgaacgagcgggatagggtcagcagggagacgagcgtgccgagggtgagcggcttgacaccggtcagaccgatgtcattgacgccggccagcgaaacggcggcaccgacgatggcgagcaggatgtagagcagatagcccatattgccgacgaccggcatggtcacattgccccaggtgttcgcctcggcggacgcctcaaagagttcctcgttcttctcatcgaaggtcttctgagtggcgtcctcatggttgaagaccttgatgaccttctggccgttgacggattcctccacgaaggcgttcacgtcgccgatccactgctgctgcttgacgaagtagcggccggaacggctcacgatcttgcgcacgatgaaatacagcagaacggtgaacacgattacgaacgcggtgaatggaatggacagccacagcatggacagcaatgccgcaatcgcggagataatcgaggagaacatctgcgggaacgactgcgagatggcctggcgcagcgtatcggtgtcgttggtgtagtggctcatgatgtcgccgtgctcgtggctgtcgaagtagcgaatcggcagcttctgctggtgggcgaacatatcgtcacgaatcttcttgagcgtgccctgttcaatggtgataatcagccactgccaagcccaggatgtcacgataccagccacatacaggcagcccatcagactgatggcgcgcagcaacggagcccagtcggggttcgattcccccaccatcggcaggatgtaggtgtcaatcagcgattggaggaacagcgcggatccggcctgcgcggcggcaccgatcaggatgcacactacgatggcgataacgcgcaatttgtattggaagatgtagctgaagatgcgcttgatggttccggggtcggctttgcccatggcgggctcgcgattcttgaaactctggtcgttgctcatcgtgcttctccttccttggtatcggctgcattggtatcagctgcgctggtatcggccgtgggcatggtcactgtcaccgtcacggtttcggacggctcagcggtagatgactcagcagcctgttcggcagcggccagttctccggtcttagcctggttcttggtctgggattcgtaaatggaacggtattcatcacaagtggtgagcagttcctcgtgcgcaccggaggccatgatacggccggaatccatcaccagaatcatgtcggattcctgcacggaggccacgcgctgggcaatgatgattttcgtggtgtccgggatctcgttgtggaatgcggcgcggatcagcttgtccgtcttggtatcgacggcgctggtcgaatcgtcgagaatcagaatcttcggcttcttcagcagcgcacgggcgatgcacaggcgctggcgctgtccaccggacacattggtgccgccctgctcgatgtacgtgtcgtacttatcggggaattcctgaacgaatccatcggcctgcgcgagctgcgcggcatggcgaatctcctcatcggtggcgttcgggttgccccacctgaggttttcggcaatagtgccggagaacagcacgttcttctgcaacaccatggccacctgatcgcgcagcgcctcaatgtcatagtcgcgcacgtccacgccgccgaccttgagcgagccagagctcacgtcgtacagtcgcggcaccagctgtaccagagacgactttgccgaaccagtaccgccgacgatgccgatggtcatgccagaacgaatcttcaggttgatgtcgtcaagcacgggcttttcggaactgtcggagtagcggaaggtgacgtggtcgaattcgatggagccgtcggccatgtcagtcaccgggtgagccgggttctgcaccgtgctttcctcctgcagcacctggcagatacgctcggcagaagcctgagaaataatcaccatgacgaaaatcatggacagcatcatcatggccataagaatctgcatggcataggtgaccagcgaagtcagctcgccggtggacaggcccaacgccgcattattgccggaagcgacgatctgctgcgcgcccatccatgcgatgagaatcatcgaggcgtagacgcacaccatcatgatcggcatgttgaagctcatgatgcgttcggccttggtgaagtccttgaagatgcgttgggagatgcggccgaacttggagacctcgaaggattcgcggttataggacttgaccacgcggatgccctgcaggttctcgtcgaccacgttgttcaacgcatcgtaggtgtgaaacacgcgctcgaacacggggttcacgagcacgaccagaccgcacaggccgatggccagaatcgggatgcaggccaggaacaccatggaaatcgacggggagatacggaacgagaacagccaggccacgaccaccatgatcggggcacgcacacccagacgaatgatcatcatgtaggcgttctgcaggttcgtcacgtcggtggtcagtcgggtcacgatcgaaccggtggagaaccggtcgatgttggtgaagctgaagccctgcaccttctcgaactggtccttgcgcaggttcttggcgaagcccgcgccggccacggccgcgtactttccggacaggaagccggcacccagcgaaaccatcgcgcacaccagcagaatcacgccgaacttgacggtggccggcatgctgccaccggtgataccctcatcgatcagcgaagccatgatggtcggaatcaggatttccagaataccttcgaccgccacgaacaccggagccaggatgctggctttcttgtattcacgaatcgaatgacccagcgtgcgcagtacatgcttaggtctaccgggttcgacggctttgcgcgcctgcgcgattgcctctgcggtatcgctcattcgttctcctccttcgtgtcagcaacctccgctccgtcttgatcgggagccatcaccacaggtgactgagggagcgtttgatgttcaaattcgcgttgtgcgcgctcgatgttcgcacgcatgcgtgcgacgtagtcgcgcagagcggccttctctccatcggagaagccgccgaccagcaaccgttcgacccggtcaccattcaccttgagatcagcgacgatcgcgtccgccttgtcggtcaggacgatgcgcttgcagcgcgcgtcatgctccaccgattcacaggcgatcaggcccttcttctccatcagggccagcacacgcgaggcggtggaccgggtgatgcagaattatacgcaacaattcatgataaagagacccatagacaacagttgtacatacaacaatcagcgtgttgtagtatttccggctcttccgattttggcgtgtaagggcatgtgtcagaggtgggtttggatggcgtgtctgaagccgccggcgtgcagcaggcttctggtgatggtggcgtcgaggttgcggaagcccagggccatgcccctgagggtctcgagccttccgctacggcaggtccttacgttcgaacacccacatggtctcgtccgtggatctgttgtcggtaagaatcgtcaacatgaaccgctcaccgtcgttcttcacgtaaccgcattgcactgcaccttccgacttgagccggctacggacgacatcgtagtcaagcagtcgcaggagaccttcttgatattcgggagcaatcctcacataacaaaactcacgtaatgcttcgcggaaggaaccgccatgaccatcaagcatacgctgaaagaaatcgggcaccatgatcgaacgctgcgtatcggtattcagattgactataaatgacaccggataacgtacattcagatgttcaagcagcattttcatatcctcatcgcgcaccagaatatcctcaagctggttgttgagcatgcggagctggcgtttgcctccgccattgacgtaataccgtttcttgtcctgacgcatacggatttccgcctgattgatgaggtccggaaggccctctccatcatcggattcggccatgcctacggatatatcccaatcaccttccaggaaatcccgacgcatacgcgccatccgacgcatactttggctcaccgtatggttgcagctgacaatcacgaactcatcgcctccgatgcggtagatcctgtcgtccccgaagcaggcacgcatcgcattcgcaagtccgcacaacgccgaatcgcccttggcatgccccaaatggttgttgatttcatgcagtccgatcatgtcgacgtacaccaccgtcaacggcttgtcatgcgtggcctggatgtactccaaatcgtcatcgtaggcattgcggttgagtagtcccgtaagcgagtccctgcggtaattatcggcatcgccgcatgtcaatattcccatgggcagattccgtccgaccagcaccacagcccaagggtcggatggggagcatgcgtgagcgggaaccgccgcgaatgcgactacgccggttttggccaatatctcgctgcggtatatccccagcacggtttcctgcctgtatagccgttcccggatcgaagacaaattcagatcggcgaagaatcgtccggcatcgtcaggatgcaccacccggttggcggtcaccgcacgcatgtaggcgccgaattcgtcgacttccggatcgggaatcaccccatctcgtttgatggcacggtattcgcctgtcgccacattcaaccgagatatttccgccagaccatcagccaggatttcaaaggcgtcggccgccaacgcggagactcccaacagcacccggccgttgacggtcacatgaccgcgatgcaggtaatcgcacgacatatcccaatagtgccgaccgtcggcacgctcggccaacagcgtttccatccgtttcaccggcagtggagggtagaaataatatccttggatgtatccgcatccgactgcttccagccaatcgacctgttccttggtctgggcgccctcggcgatgaccatcagatgcagcttcttagccatcacaatcatggattggatgattttcacgcctttaccggcattctccttgctcagctcgatgaacttcgcgtccagtttgatcatatcgacattaatgtctttgagcatgttcagcgaggaatatgccgaaccgaaatcatccatcagcaccacgatgcctctcgcatgcagtttacggatggtgtccttcaccatggacaggtttttcgccacggtgctttcggtgatttccacccgcaacagacgcgcgtcgacgtcatattcgttcaacagcccgccgctcacgtcggccacatccatctggtcgatatccatcatggacacgttcacggaaaccggtaccagattgcgtccttcacgctcccatctgcccagcatctcaaccacgaagcgccatacgaacatatccacatggcagatacgccc

SEQ ID NO: 3231 - DNA, 32694 bp, Unknown
  R53_2m  MAG No. k141_6641
acgcgtacatcatccactggaacaccaaacgccgccagatacgactggagggacacaccccggaggaattccggaacatgtccctcacagcctaatcaggtacccttaataaaccacgtccaacaatcggggcgcagttcagtttccaacaccggggcttcttattatgttgtgctatcgcaggatttcagctggagtctattacgccctgcccatcagcgtcaggacaatcagcagcacgttgagcgccacaatcagcgccacgacgatcataaagatcacgtgcttgacggttccatcagcccacttgcccatgagttccttgttatgcgtgtaccgcatcagcggaatcacggcgaacgggatgccgatggaaagcaccacctggccgatgaccagcgcctgagtcgggtccttggcgaaccacagcacaatcagtgccggcaccagcgtgaccacgcggcaggcccacatcggggcgttgacgtgcagcagaccgtgcatgatttccgagccggcgtacgtgccaaccgatgtggagctcagcgacgaagccagcaggccaatggaaaagatcgtgccgatcaccgggccgagcacctgcgtgatcgcccgctgcgcgccgtcgatggagtccgtgccagacatgccatgcagcgagttggcggcgagcaccagcatcgccagattcacggtgccggccagcaacagcgcccaggccacatcgattttcgagcctctcagctgcgttttgattgacggcttttcgccgcctgcgtaatggtcgttcaccagcgtggagtgcaggtagatggcgtgcggcatcacggtggcgcccagaatcgaggcggccatcaacaccgagtcggcgccttggaagcgtggaatcatgcctttgaccacttcgccggggttcggcggggctacgaacaggcctgcgatgaagccgaatgtgataatcagcagcatcacgatgatgatgcgctcgaatgtggtctgtgtcttgccgccttggaaccacagcatcaccgtggagattgtgccaatcaccaaaccgccggtgaacagcggcaatccgaacagcaggttcagggcgatggcgccgccgatcacctcggccagatcggtggcgatggcgatgacctcggcctgcatgaagaacatgaatcggccggcgtcgctcatacgctcgcccagcagttccggcagggatttgttggtcacgatgccgagtttggcggactgatactggatgagcacgctcatggcgttggcgagcaccagcacccataccaacaggtagccgtatcgtgcgccggacgtgatgttggccgccacattaccaggatcgacgtaggccacggccgccacgaacgcggggccaaggatgctggccagcgcatggtcatgcggcttcttattgttgttcgtccctgctccggccccggttccgactccggcaatctggcgttccttcccgatttccggtgtttcctgttcgatgtctgccacagcgttcgtcataacggttgccgcagtggcatctgcttcggtgtgtgttactgccatattgtttgtacctgttcccttcataccgcgcacagttatagcgcaggcatgtttcccgcgtcaacagacggacaatctgcggacgattgatggatgaccggcggactggcagctgacatctcccgccatctcgctcatgaaatgtgccagacggtagaaaactcgctcatgaaatgtgccagacggtagaaaactcgctcatgaaagtgtaaaatcattgatatagcagtaattcggaaaggggctcctcatgtatctcaaacgcaaagccgatgcctatctcaatgcatggaaatccgacccgaatcgctccccgctaatcatcaagggccctcgtcaagtaggcaagacagagactatcgattactttgccgcacacaactaccgttcggtagtggaaatcaacttcgttgaggaaccgaaatatcgtgcaatcactgcggacggttatggcgcgaataccatcgtccgcaatatttccctgatcgacccagccaaaaagttcattccgggcgatacgctcatctttttcgacgaaatccaggcccatcctgatatcgccactgcactgaagttctttaaaatcgacggcaaatatgatgtgatttgcagcggttcaatgttgggcatcagctataagcaaatcgaaagcaatagcgtgggatataagaccgactacgaaatgcgatcgttggacttcgaagaatttctgtgggctcgcggatacgatgaggccgtcatcgaaagcatgttcacccacctgtgtgatgctacgccattctctgaagtggaaatgaacgtcttctccacggcatttatggattactgcgtgcttggcggcatgcctgcggttgtcgcctcccatatacgcactggcacgttcgagggaacactgcaattgcagcgccagcttattttggactaccaggaggatatccgcaaatacgcgcaaggacccgatcaggcacgaattctcaacgtgttcaaccatattcccgtgcaactcgccaaggaaaacaagaagttccaaatcagcaaggttgccagcggagcgcgtttcaaagactatcgaggatgcgtggaatggcttgaaacctcgggaatggtgaatatctgccgatgtatgtcctatcctgaactgccgttgaaaggcaattatgacgaaaacaagttcaagatatatttcggcgataccggtctgttcgtagcgatgcttgacgacgaggccagtgatgatctgcgggccaatcgtaatcttggcgtctataagggtgctatgtacgagagcatcgtctctgaagcgctacggaaatccggctatgacctgtactactacaaaaaagaggattccacactggaacaggatttcttcgtccgcacgcgcgaatggctggtgccggtggaggtgaaatcgaaaaaaggcaccgccaaatccatgcggacgctaatcgcttcggattcttatccggaaattcagttcggcgtgaaactatccgccggcaatatcggtagcagcgaacacgtgttcaccgcaccatacttcaccacatttttgctccgacggctcctgcgcgcttatgacgaggggcaggcacctatgctcaacaatcctgagcggtagcccctattcgtctgcgggcacggcctggcccgggcaggtatggaggacggcgagcatggcgtccttttcttgggaggtgacggtgagctggtacttgtctttgacgccaatctggcgggccacgtagtcgcaacggtagtcggcgttggtgggtagccagtaggcggcggaagccgaacccttctcctgattggccggaccgtcgacggccagcaggttataggggtcattgccgaattcatggcgtttggcagtggaccagtcgtgcgcaccggattgccaagcgttttcaagggccaccacatggtcgatctgcactttggcgctggtggcgcggccacgtacgaaatggatggtctgggcggtgtacggatcggccagtgtgccggactcgaccacacaggaaccggcgtatttgtaggtgatgtccgtgagatcgcgggcgagcacgtcgtcgcgtacgtcgcagccattgccgtcgacgtcggtggtgcggaaaccgaaggaatcgcggtcgtagccggaggagctttggttgtcgtctacggcgagcgcgttcaaagtgtcggcggctgaaccggtggcagtgtagccaccggtgattttggccacgtcggagctgacctgcggcagtaacaggccgatggtcacgccgattgctacggcgagaacgatgagaatcagcacgcgctccagcggtccagaggcgttgaaacgacggcggaagtgggcgttacgacgtgccatcaatcacgcataggtgaaggtgagagggtcgtggccggcgcgggtggggccgtcgagggcgtcgatggcagcgtgttcatcggcggtcagggcgaagccgaacaggtcgagattctccctctgacggtcggcatgcacggacttggggatgatgatcgtgccgttttcgatgtgccagcgcagaatcacctgggccgggctgacctcatgggcggcggcgatcttctcgatggtgccgtcgccggcgttgaggtcggcgccacgcgccatcggcgagtaggcctccacggcgatgccgtgcttcttgcagaacgccaccacttcgcgctgctgccacgtggggtgcagctcaatctgattgacggccggccatgcgccggtctccccgtgcagacgcttcagatcggcgggcatgaagttgcatacgccgagcgtgcgtgccatgccttcgtcgcgcagcttgacgaacgccttccaggtgtcggtgctgcgccagtcgaacggcgtgggccaatggatcatgtacatgtccacgtaatcgagctggaggagtttcagggagttgtcgaatgccttgagcgcggagtcgtagccctgctcggagtcgcgcagcttggtggtgacccacagggtctcgcgcttggcgccggtgttgtatccggaagcggcgagcgcacgacccacgccggcctcgttgttgtatccggcggcgccatcgatgtggcggtatccggcttccagcgcagattcgacgacaggggccacgccctcgtcatcgatacgtagcatgccaaggccgacctgcggaatggaatggccgtctttcaaggcgatgtccggcacgttggcgggattgatgtgtccattggtcatggcttgtgatgctccttcatgtactgcaactacacgccactgtacacggttatgcaggcgatgtgcgggtgctgcaaccaaacggcatgattgcgcccggccttccgtgtgggagagccgggcgcaatcatgacaacatcacgctctactcctgcgaccggccctcaccctattgttcccgggcgcgaatttgccccggtacaggcgtcaatcgattgacgtttgcaccggggcagaaatcgttgtcccggtacgcaatttcgggccattttcgagaaccaggacaagacaatccccaaagtccacataccccgacaaacagaatcggcggaatacagccaatcccgaaatcaacatactgtcccggttctcacgtagaacgattgacgtgcaaaccggggcaacgggaattgtcccggtacgcgaaaaacacccgttttcgcaaaccaggacagtgatttctgtcctggtacccacatcaaacgattgatgcacgaaccgggacagaatcgcatcgctgcgccgagacagacgcatctgacagccgacaaccgataaacgacagccgacagatggcatctggcagccggttgccggctgccggcaaccgcatcataatgccgcatcagtctctatcaggagcgcttacgacgcaaagcaagcgagaccccgccggccacgccgagaacgacaaccgcaagacccacggcagtcaccgcgctaccggtattgctcagcacaccagtgatcttgtcgccattcgcaccgttggtcttatcgccctcgcccgtatcgggattgatagtagccccgccattacccgcaccgtccgagccgttgccggaaccaccttcggcccgagcggtaaccgcaaccgtataggtttcggtgacattcggattcgacttgagcgttacggtaaccttcgccgcatcagcgggagcggagaaatcgtaatcgagcgtgaactggccggcggaaagcgtcacgttacccatgcctgcggaatagttgcccacgaccttgagatcatggtcggcatcgatggcatcgcccacctgataggtggttttgcttggcgtgacggtcaggctggagacctccttttgggcgaggccggcaatggcatcggcaacaagcttgatcacatcgttcacgtcctgctcggtgtaggtgctgccggcaagcagcacgtcagcggcggcaagcgcctgatcgagtttggcgagcgactcgttggtgtactcatcgcgattgattttcccggcttcggccacggccttgtccaggttctccgtggatggcttcaccggagtttcggtctttttgacgagtgagaccttgtccacattgccccatgcgtcggcaggcaggttgcccgtgatggtgatggtcgctgtgccatcagcacccacggtgacaggcacggtggcggtatcgaacttaacccaaccgttgagttccagcgcatcggacgtggtcttgccacccgttgtggcggagagggccacaccatcggtaatagcggcgttgtccgctgccgcgccttggctcatggcggtcagcacgtattcgccaggctcgagtccggtgatggtctgcgtggcggagaaactgtaggcatcggatgcccaaaacttcagcgcgcgcttgccgtcggcggcgttgccaccgtcttcggtgatggacgcaccggtgccggcaatggtccagttcttatcgttctcagcgttctcgaagctgccgtccgttacgtaatccttggcgggagtggcggtgacggtgacggtgacggtcacgtcgtggccagcgttggtggtgccggtgatggtgtatgtgcctgcgccacgaatccagtcaagcgcagcggattgccaggtcacggtttcggtctcgtccaccccatcctgatagtgtgcggccacctcactcggcaattgcgctttaatcgcgtcgatggaatccgagtcagtcgcggtaatctccactggatctatcttggtgaacacatgatcggtgacggcaccggtgtgaatgtacttgaacgtcggcagagaggcgagcgccttgccatcgaaatcgaacaaagcttggttatcgacacccgagccgccccagtacaggccggcgtcattgggatcgtattcgccggccgcttcagtggcccagccgccaccgtacttgttccacgtatccaccagttcggcgttatccttgccgccggtgcccacgggcacccatgcgggctcccagtagaacacacccaggccgtcgttttcgccatcgccatcattgtcgccgatattgttcacggcctcggcgaccgcgcgaatctcatcggcctggccttgcgggctgatgtcgtatttcttgaggttatcggcggttactttactgggcactgtgttggaatcgtcgtcgccatcatccaaggtgtatgcccacgacgtttccgccaccatcacatctttcttataagtggaggccacgttcttgagcacgctggtgaggttttcggtggtgccatgccagaacgggtagtaggagctggcgaacacatcgtaatccacattgtggttgctcaactgtttggcgtaagtggcgtaggtgccggctttctccgggttggtgaaatgaatgacgaccttggcttcggggagcacttcgcgtatggctttggaacctgcggagaatactttggacatgccgtcccagccggagatgccggcgattttcgcagtggtttcgttgccgacctgcaccatgccgacgtccacgccggcttgtttgaacgtggtcagagtctgcttggtgtagtcgtatacggtgtcggcggttttgtccgcgtcgccttcaaaggatttccacgccttgggcacctgctgcttgctggggtcggcccagaaatcggagtaatggaagtcgaccagcactttcagccctgctgccgtggctcgcttggccatggtcagtgcgcgatcggcgttgacgttgccgccgccatatccttggccgtctgcggtgaacggatcgttccacacacgcagacgcacatagttcacgccggattccttgagcaacgtgaacaaatcctcgacctcgccattggcgttcttgaacgtgacgccgctttcttccagcgagagcatggatgaaacgtccataccgccgatgaaatcatcgcttaagccttggatggccttgaccgagacgtcggctttaactggttcttcttcggcggcgtttacagtgaacgtgcctcctgcgcagagcattatggcggccacgccggatgccataatgcgagtaagcgcggtatttcggcgcatgctttttctcctttgaatggtgaacgctcagaacgaacgcccagtgatgcttggcgcttcctttccttatacgccacgcggtacagctgtgtaccacgcaatcgtcaccttagcactttatgccgtgttggtcaaccggtgtatcaacgcctcgtacggcccagtacagcaacaccagcattacagcaatgtcgttcagcgtgtggaggcgcgggcgatgacctgggattcggtggtgagcagttcggacttggtgatgctgccgtcgatgcgtccgaggatgcgatccactgccgtgggagccgtccagtcaaggcgggaatccatggtggtcagcggaatctgcaggtagggggcttcctcgttgttatcgaagccgatgacctgcacctgcacgggcacctcataaccagcggtgcgcagagcggtcaatgcgccgatggccaactgatcgttcaaggcaatcacaccgtcgaatggcacgccggaatcaatgagccgctgggtcacacgggcaccggctccgatggtccaatcctgatcggtgttgccaatcagctgcggatccaaggagagcccacgcctacgggtctcttcgatgatgccgcgcagacgcagctgcgcgttgccttctacggcattcagcaatgcatcttcgtcgtaaacgtcacgggcaccgatcactgcaagtctggtggaaccgcggtcatacaggtagcctgcggccatggcggctgcggatacatcgtctggggtcacgtgatccacaatgccccacgtggtacgcgagccaacgatgaccagcggaaaatcaaccttcagatcatcgggcgaaatgttttccacctcgctcatggaaaggatcatgccatcggacaccgtggagttgaacttcttcagcagatcgcgcgcgcctttcgcggagccttccgcatacgtggtgacgtatacggaatagtcgcgctgacgggcggcctcgatggtgcggttggcgagctcggccagatatggcggaatcagcgaaggcacggcgagggtgatgaagccggtgtgatcgcggttgaggttgcgggcggccacgttgactcggtagtcgaggtccttaatgaccgactcgaccttggcacgggtctcatctgtcatacgcccggagccattgatcacgttcgacgcagttttgagcgatacaccggcggcctgagcgacatcgcgtagcgtcactcgacgcttggctgttttctcgtcgctcatgccgcactcctctatccggacaacattgccattctagcgcggtttagcaggacgttttagcgataagaatggcgttgcggttcagcgtatatccaacggcgtcagtctcgcaacggtgggcgatgatgggatcaccttccacaccgttgatggcgacgggctggtttgagcggttgaggtagaaatcgaagcgggtggagccgtctgcggatcggcggatggtgtgcaggatgcggggatctgtggtgggataggttggagtttgaccactctcagtcggctgcgccgacaactcctgccatcgggagccaagtgctttgagcaactgggcaatgtcgtgacggttgaggtcgcagcccacgtagatggcggtaccgttgccataggggcggctggtgatggcgggggtgcgctccagctcccagtcggcggcggactcacctgcgtaagaggcaagcactgtggtgtccgcggctacggaagtcacgtcgttctgccacaggcgggtcgtcagaccattggacaggctgatttcgctgggctcgccttcggcttcttcaccgaggatgttgaattcttcggagcggatgccgagcatgtcgcgtaggagcccgttgccggcgccggggtagccgccgaggccgatgtggaagtgctcgtcgatcaggccggcggcatagccgacgatgacggttccgccggccttcgcgaagtcggcgatacggagaacgtcttcgtcggacaggctgagcacggtgggcagcacgatggttttgtagccggtccagtcgtaggcgagcggcaccacgtccgcgcgcagcccggcatccaggaagccgcggtaccagtcgcgcacgtcgtgccagtggttgagtttcatgctgggcagggtttcggagcgtgtggcccattcggattccgcgctgaacaggatcgccgtgccggcacgctcgagctcagtgccctgcagcccggcgtcggagagggtcttcagcgccttaccgagctcgcatacgccgcggaagaccttggaatcggcgcccgcgtggggcagcatggcggagtggaacgcctcggcgcccgacttggattgccgccattggaaaaagcagatggcgtcggcgcccatggccacgtgggccagggagtcgcgcatgagttcgccggcccgtttgcgtgtgttcagcggcttccactgcacggctgaggtggagtgctccatcacgtaccacggcttgcccagcgcgagggagtccatgagcgcgtccgagcaggcgagttcgtccaggtgggattcgccctcatggaagtagtgatcgttggacacgaagtccacctcatccgcccatttggcgtagttcatgacgcactggtcggtggagaccatgaagttcgtggtgaacggcttgtcggggcagatctgctcgatggcgtcgcgttcggctttgtagaagtcgagcagcatgtcgttgccgaaccgctcgtaatccaactgctgcgacgggttgaccatggcgtcgccgcccatgtgacgtggcagcagcacctcgtcgaaactgttcacgtgctgcgaccagaaggccgtgccccacgcctcgttcaacgcgtcgatggtaccgtacttggcctcgcaccacgtgcggaacgcggccaaggcgttgtcggagtagtcgtagcggttgttccagccgtattcgttgcccatgtgccaggcggtcacatacgggttgtccttgtagtgttcggcaagtttgcggcacaggcgcagcgcgtattccttgaacaccgggcttgtgggctgccacgactggcgtgagcccgcgttgacggtatgaccataccggtctaccggcagcacctctggatgggattcgtacagccacagcggcgcggcggctgtggcggaggccaagtccacggcgatgccggctctgccgagcctgtcgatcacatggtcgagccactcgaacgtgaacgcgccctcgaccggctcgatcttgtcccagctgaaaattgccagcgatacgacgttcacgccggcctcacccatgagacggatatcctcgtccagcgtctcctcgggccactggtccgggttgtagtcgccgccgaacgcgatgccgcggccggattccgtcagcagggacggccacctaaatgctctatgagtagtcatattaatcaaatcctttattgtatcggctcatggccggtgctgtgtttgccggttttgggctttggctcccctcagtctcactgcgttcgacagcgtcatcggcgctttgatcaaggcgtgaatgctgcgttgcgttactgcattgccatgttgccatgttaccgcgttattgcatcgctacgttgccacgttgccacatcacattacattgccgcattgctgcgttgccgcatcacatatcgcaacacaaacgcagcaacgcaatgacgaccggagatggcatcgccgccacccgcgaggaaccgcaatgcaacgcggtaacgtaacgcaatgcgatgtgattcccgcgtagttacaggcagttacagattgagtaccgcatcagcaatgcgcatggcggattcgcggtgggagaccagcaccacagccgcgccgcgctccttgtctgcatgctgctcacccacggccatagcgtgaatggaacgtagaataatagcctcgttcaaagcatccaaacggctggtcggctcgtcgaaaagcaccagatcagcattgcgcaggaacacacgagccaaaccgatacgctggcgttcaccttcggatagacggtcgcccaactcgcctacctgagtatcaaggccatcgggcagggaatcaatgagatcaagcacggaggccttggcgagagcctgacgcaaacgagcatcgagaccgtcagctgctgccacctgaacggcatcgccctctgccgattgcgccgccaactgctgctgtcgggaatcaacggtcttggcacccacttccccattgcctgcaacatttgcagcttcaacctcggactcaggcaaagcaatcagcagattgtctcggatagagccatcaaacaggtgggtttcctggctcatcatggcctgaatacatcggcgagcatgcacatcgacctcgggcaacggcgtgccggacaacgtcacctgaccgcgctgcggatcccagtagcgcagcagcagcttgagcatggtggacttgcctcggccggacggcccctggatacccagcacgccatgctgcggcacgtcaagcgagaagtcggacaggacttcatgctcccccgcatatgcaaaggtgacgtcatcaagacgcatgcccatatactcctgcggcacaacagtgccgttctcggtcacagcgggcacctcgtccatcagtccgaacagtcggctagcggacgcgaaggtctgagtcaggttagcgggcaaggcggcgagcgccaaagtcggtccgaacgagccggcgaacagcacgaaggcggcaatcagagccggaatgctctgcgggttcgcgccggcacaggcaatagccacggcgaccgaagccgctgtgagcacagccaccaagagcccgctgattccggtgaaacggccgttgaccttgctgagtttggcgtgatccttccacaacgcatgggtacggtcctcgatggcctgcgcacgttcctcgccgcggccaaatcggatgatttcgtccaggccgcgcatgtcatcgagtatcacatcgtcgagttctccggcagcgccacggatggcagggccaaggttacgtacgccggtggcaaagaatcgcggcacaaggatgccgataaccaggtgggcggcaatcaacgccagcgccatccatgggcttagggtggcagccacaatcgtgtagatgatggtggaggttaccgcgatggccaccggactgatggtgtgggcaaagaagatctcaagcagttccacatcggtggtcagcatggcgataaggttgcccttacctttgcccgcgagcttggccggcgccagtctgcgcaacgcggcgaacgccttggaacggaagagtgcgagcagatggaatgccacattgtggttcagatattgttcaatgtatcgggtgatgccacgcagaagagcacagataatcatcatgatgacggcgggcgcaacacccatgccccacaccggattaccggtaagtgcaaatgccgcgataatgccgaacacgggcaggaaagtggccgaaagatggccgatggtgccggcggtggaggccgctgccatcagtcctgccagaggtcgggcttccttaagcagtcgcctgatcacttggaatgtgctcattttggaagacgaatcgctatttgcaacaccagccggagtctcagccgaggcctgctcactcccgccaacggaagccgtcggcaaagctgactgcaggcggtcaaccgtcatacccgcctctgcgcttacgcacgctgcgccaccctcagtccgactgtcgtcggacagctcctgcttgcgggaaccaacctgcagcacacgccgagcatggccttctccgaagttctcaatatctgcctgcgtggtaaacagcttggcgtagacgccgtccgccgtcatcagctcggtatgggtgcccctctcaaccgacttgccgtgttcgagcaccaccacttgatcagcgtattcggcgttggccatgcgatgggtgatcataataaccgtcttgccgcgggattgcgccaattcgcgaattgtatccaggatcagctcttcggattccatgtcaacgctgctggtcgcctcatcgaacacaaataccggcgaatcatgcaggagtgcgcgggcgatggcgatgcgctggcgttggccgccggacaggttggcggcatcggactcaatcggcatgcccagtccgttcggctgtgcgtgcacgaagtcggcaatgcgcgcctgctcgagcgcggaccacagacgggagtccacggaatccggcgaatcaggaatctcgtcatcgggcaaggccatcagaagattctcgcgcaatgcgcccgcaaacagatggctgctggcaccaatcacagtgacggctccggccagtgtttcgcctgacaaatcggatacctcgacgccgttcagtgtgagcgaacctcggtaaccggccagtgtaccggcgagcagcgaggcggccgtggacttgccggaaccggagatgccaacaatggcggtgaactgaccgggccgtgcggcgaaggtgatgttggtgagcgcaggagcgacggcggaattggggctggtttcaccttgcttatcggtctttgcggatgcggacttggagtcgccgtgcccggcatcatcataggaatagccgacgtggtcgaagcggaccgtcagaccgtcgtcagcggaatcggaatcgttggccggcagggtcgccgtgccatgctcgggctccggggtgtccagcagagcgaagatgcgcttggtggaggtcatgccgttcatcgccacgtggaagaacgagccaagctgacgcatgggaataaagaattcggcggacagcagcacaatcagcagcagtccggcgagggtgagcgggaagcccgcaccgaacggcatcaggtattgcaggccgtaggccaggtaggcgaatgcgccgggcaggtgggcggcgagcatgatcggcgaccagccggcggtgctggctcctgcggcggctgcggtggtatgcgcatactgctgcggtggtatgcgcgtattgccataacgccacaccaatgccggccgccgcaccgccgtaggccacgatatccatggcggtcagcgagcgcagctggatctgcagcacgcgcatggtcatgaccctgcgctccacattccgcgcaatcccattcaccttaagcgaacgccctcgcacatgccagacttttaaagtgagagaggccacagaattttcgattgcggagtgcgcatgctagacgcgccaaccagaagaaatatgcttcgatatcaggggctgaagcatcaactacacccaatacgtgcatttatccgtttcgaggaagctaatttttgcgtttgccggaggtctacttccgtttcaaggggctgatttcgcatttgccggaagtctatctccgcttcgaggggctcctcatccatgtaatcggaagtataaacagctacacgtcaacgtcattccgccgttttagggccgcgtctacttgggcatcagcccctcgaagtggaagtagacttccggataaggcaaaatcagcccctcgaagccgagaaagcacgtttctacggtgtcagaagccgacggaacgcaaaagggtcgtctgcacgcagacgacccatatgatcaattcgccaatagacgcagcaaacgcggcctagtgctgcttttgcgcggcgaccagtgcttcggcggcgaccgtacttatcggacaggaagccggaggagccggcgccgatcacgccgccgatcatgatggagctgatgaccagaccctgcagggccgggctcagcgcgtacttgtcctgcaggaagtcgatggctcccgaaatagacacggtcataaccgtagagcaaaccggttagacacggtgttgtatacaatccacaaaaccagacagacaacttctccattgcccacaacgcgcgcaaccttacgccagcgtaacctaacttgtcagaatggctcgattttgtcaacagccatcacgcaacgcacgtaaggacacggcccgcttatgcttgaccactacaccacgcctggcgaatccatcgaaatccgcgacaaccagaccatctactccctacttaccgatcgccttgcccgcaccggcgcggacacggtaatcgccgccaagaaaatcggccccggccgctggcagaacgtcaccaccggcgaattccacgagcgcgtggtctcggccgccaagggcctgatcgcgctcggcatcgccaagggcgacgcggtgaccatcttttcctccacccgtctggaatggggcattctcgatttcgcactggccgcggtgggcgcggtaagcgtgccgatctatgacaccgactccgccccgcaggcccagcgcatcatgaacgattcggtggtcaagctggcctttgccgacaatcgcgagcgcttcgaccggctcgactcggtcaaggaccactgccctgccttgaagcagattctcatgctcgagggcaacgcactgggcgcgctcgaaggtctgggcgtggctgtttcggacgaggaactgaacgagcgcgtggccaccgtgcgcgccgacgatctggccaccatcgtctacacctcgggctccaccggcaacccgaagggtgccgaactgacccataagaacttcgtgtccatcaccatcaccgcttcgcaggcgcttcatgaagtggtgcttgacgaccatccacgcctgctgctcttcctgccgctggcccactgcttcgcacgatttatccagtacgcctccatcgcctccgatgacggcgtggtcggttatctgccggataccaagtccctgctgccggacctgcgttcgtttgaaccgacctacctgctgggcgtgccgcgcgtgttcgagaaggtgtacaacgccgcctcgcataaggccggtgccggctggaagggccgcctgtttgtcaaagccgccgaggccgcgcgcgtctggagccgcaaggagcaggccggcgagcagcacacatttgccgaaatcgccgagcgcgccaagtacgaaacgctcgtctaccgcacggtgcgcggcgctctgggcccgaagatcaagtacgtggcctgcggcggcgcaccgctgtcgcttgatctggcgcatttctacaacggcatcggtctgccgatgattcagggttacggcatgaccgaaaccgccgccccgttcgccgccacgcgcgtgaccgacaatgtgatcggcaccgtaggccagcccgcgcccggctcctcgattcgcatttccgacgaaggcgaactgcaggtcaagggcccgaacgtgttccgcggctaccacaatctgccggagaagacggccgaggcattcaccgccgacggctggctcaggaccggcgacttggccgagatcgatgacgccggccgcatcatcatcaccggtcgaatcaaggacattattattaccgccggcggcaagaacgtctcccccattccgctggaggaggagatcgccaagtgcccgatcgtggagcactgcgtggtggtgggcgaccagcgcccgttcatcggcgcgctggtgacacttgacccggagtcgctggccatttggctgcccgcgcacggcctgtccacggagacgccggtcgaccggctcgccacgaacgccgcggtgcgcgaggagatccagcagtacgtggacaaggcgaatgcgacggtctcgcgtgccgaatccgtgcgcaagttcgccgtgctgggcacgcagttcacgcaggagaacaagtgcctgacgccgtcgctgaaggtagtgcgcccggccgtcaaccgcgtgttcgccgatgtgatcgacaacgagatctacaacggcaagcggtgaaacgcgcggttcgtaatccgacacaaaaaagggccttttgaaccgcacctccgatcatcgaatctgtattactccagtccaacaatcggggtgcggttcaacctcgccgggcacttcatcattcatcactggcatggttccattatcacgcacattatggcgcagagcgaatacggcaccccggcaacgcgagtgggtcgccggggtgccggagcgcgggggtgccagaatgccgaagggccgggataccggagtgcccggtcgcgggggtgccagaatgccgaagcggtgtatgggtgccgcccggcccaggtgggtcacgcccgggtcagtttcttgctcctgagacgcagcacgacatcggcggagtcggcgacacgcttggaatgcgtcaccacgattacgcatttgccgagctgatgggcggcatgctgcagcagatgaatcacctcgtcggtcatctccgggtcgaggctgcccgtcggctcgtccgcgaggatcgcgcggcccggggcgaccagcgcgcggccgaccgccacccgttgacgctggccgcccgacaggtgcatgatgttgcgcttggattcctcacggctcaaacccagttcctcgaggatcttcatatcggccttggtgctgaccagccgcaggttctcttcgggggtgaggtagtcgatcaggttatggtcctggaacaccagggacacgtgctcccgacggtgcttcgcatagcccgatgcggcgatgtcctccccctcgaagcggaccactccccgggagggggcgtccaggccggccagcagagacagcagcgtgctcttgccggcgccggacgggccggtgatcgcatacatcttcccggattcgaaatccgcgctgacatccgagagaacaaggatcttcgccgcgccgtaggcgtaatcgacatggtccagttgcagacagttagacatgattggtgactcctaacgcatagaggaaagaatggatttcggggatttggacagtacggcggcgcatgacacggcaagggccacggcgatgaccgcgcatccgagcagcaggatgagcaccgtctgctcaggcggcaaggcctccacgtgcaacgattccaacggcgcgacgcccgaatcgcgcaacagtcgagaagacacgtatcccgacagcatggcgccggtgcccagcgaacacagggcggcgaccgccgccatgagtccggtttcgatggcgagttgtgcgacgatccgcatcttgtcgatgccgagggccagaagcgtgcctatctcatggatgcgtgagcgaatccagaagaccagcgccatcgccagcaccagtacgtccgcgaggcagacggacagcagcaccatgcgcaccagatcacgcaccgtctgcacggattgcaggacgccggagagccgggccgaatcgtcggtgacgtcgtacttgccaccggccatggtcttggcctgactgaccgccgcggacaggtcctgcggattatccgacaggcatcggatcatgccgatccggtcgtttccggtcagagcggaggtcactcgcctgcccgaatagatgaggttctcggaagtgtccgagggcagggggctttgggcctgcacgttgccggagaagatcccggccacacgcaccgtggcgttgcgcccctcctgccggagacggaatgtcgagccgatcgataggccgttctgcagcgcgaagtcgcggtggaccagcacatcgtcgccgtcgcccgagatatggcggccctgctccaggcggtacaggccgctctggaattcctctgacaatgaggaatcggtggtgcccagcacgctgacctgcatggccagatcggagtccagccgggggccctgccggggcatgaccgggcgcgcgccatccacctgcgccaaggtcttcgtcgcataggcggtcttcgtcacaccggggatacgcgagaaccggctcgcctcctcggcgctgatgggattctcgccggcgctgacggtaaaccctatgcccatgcccgcgccgatgctgtcggacatggtacgcagggccgtcgagactccgacctgcgccaccaggctcgtgaagaccatcagcatcagcagaccgatgatgccgctgcgtaccggcttgcgtacgatcgccaacgtggcacgcttccacacattcatgctcatcatcgaatctccgacaggtctcgcggcgatttgcgcagcatcggcatgcacgccaccgcgacgcacaccagcatcaccgccaacaatccgagcgccacgtacagcatggcggtcccgtcgaccgacaccgtgagcgaatccagggtgcgcaccgacatgctggattcaagatcgccgccgacctgccccatgctgctcagctccttcgccgcggaggcgttcacggaatggagcgccgtggtgccgagccattgggccattccctgcgcgcacagccagccgaggacgagggacggcagaccgatcagcaccatctcggtgaggtattgggcgaccagggagggcttgccgacgccaagggacaccagtatgcccatctcctgacggcggtcgttcatccacagcagcagcatgagactgagcacgagcacggccgagacggtaacgccaatcagggcgccgcgcatcatggagcgcacgccgcgggcggcatgcagcatgctcgacgaatactggtcgttgcgcgtgatctgatagttgttccaatccaccgggagtttcttcgcggcgtccatggtcttctccacgtcaacgcccttggacagcacgaaggtggcgtcctggtatatttccttgccgtccttgtactggtacagatcgcgtgtggtatccagatcggtgtagatggtgttggcggtgagttccgctcggctggatacctttctggcgctgtcgcccttgaatatgcccacgatggtggtcttgacggtcgccgtcgaatgtgattcgttgtcggcgtcgtaggcgttggccttgagcgtgagcgtgtctccgactttgagcccgttggctttggcgagatcctcatggatcatcgacgtgtacttgtcggaggccttcagatgccgtccttcggccatgccgagcgtgcgcgacgtgaacacgttgagtttcgacgaatcattcgtgcctatgacgttggcggcgttgccgaattgctgctccttggtcgcatcgtaatcatcgccgccggggaccttcgccacattcgcccccacgagatcagcggtggcgttctgacggaccatatacgaatcgaccccgggcagttgggcgatcctgcgcacgtcggcgggacgcaccatgccacctccgcgaggcgtgagcatgctgccctgcaggttgctggccagcacgaacccgccgaccgcttccttctcgattcgtccggcggcctgttgagctgcccgagaaaccgcgatcgtggatagcatgctcgccgttatgatggtcaatactataaggagcactatggttcgtactcgttttctgagcacatagcgcaccgaccgtgcaacgaacgtcatcaatacctcctgtgggccttgggcttttcgcccaaaatgcgaaacatgccgcgtttcgccggttagttagccgcgacaatacatgatgcacctcaagatacgggaagagatacgccttgggcgaaaaacggaacagcggcaaatgtcgtttattctggattttggtccgtctcgggccgcgtcgatgcgtcggcccgagaggaatcagcgctcgcgcctcaccttcgaggcggcgaacacgaggagcggcagagcggcgaacgcatagttctcgcattggatgtacaggtatgcgaccaggacgagccagcagatgacggtcttgtgccagacgccggattcgcccgaacccgcgccggcaacgccatcaccactattgcccccggcaacatcagcaacgtcggcaacgtcggtgacacaaacaccgtgcgccagcccgtcggacgatgcgccatccgcaccgccacggcataccgtcctcccgcgcgtcatgcagaccatcgaggctccgaccagcatggccagcccgatcagcccgtattcggcgatgacgctggtatacgcgcacatcgtccacaccgtgtccgcgttcacgccggacgcgaatcccgtggccgcgccgccgttcataccaagaccgtccagcagccgtccggctttggccgcgccggcccacaccgcattgatgatgttgcccgcgccataaccggtgagcagcgtccacggatgggtgagcaatccgcatatcggatcgaggctttggtagatccgcgcgaagaacgagccgtctccctcggccccgttctccgcgatggcggagagtctggaatccgccagcacacccagcaggcccagtgcgcatgcgccgagaatctgcagcatgccccggacgcggcgtgcgccgtcatgccaatcggtgcgcgccacaagggcgatcagcaacgccacgacggaatcgatgacgattctggtgccggcttgcatgagcaccgcgccgacggcatacgtgacgatgaggtcacgcagccgtttggcgtagatgcggtcgcgcccgcgcatgagccacatgagcggaagcagtatgccgaacaggtgcatgccgatatagctgggctcggcgaacaggaactgcggacggccgccgacccacaccgagttgtcgctgatgtattgccggtacatgaggtgcgagaaatagtcggtcaacggtttggcgcgcagacggatggacagccattgcacgacgcccactccgaaggaaacccagtatgatgcgatgagaatccgcaatggcgtacgccacggaatgcgtttgatgtcgaacgcaagggcgatcgcacccaaagtggcgagcacgcccagcaatccggtgatgctcatgaacgcggcgttgaggtggatgccgaacttcagccatcccgggatggacaggattatacagaccaccggtaggaggaacattggcaggtaccggttggctgcgatgcgcagttgccgccaattgcataggcagtacacggcgaatagcgccggactgattggcgaccagaacggcgcgtacaggccaagcgtggtgccgtccaccggaagaaaagcgacggccagcaacagccaaatgacgttgcgttcctgcgatgtcagaaatcgcaggaacgaccggtattgcggtcggccatgatggttgcccgcgtcgatggtgtcgttgcgtacgcatgcctggttcatgtgattctccctccccgtcaaccttactcgttcatcacgatgcgcggacgggggcatgctttccccgctgaaagtgcaatggcccgaacattgacaaggccgcaccgagcccccatcattggcacattgtgcgatctcgtcgtggctggctgacgaaataatgctggccgaccggttacattggttcggtacagtgacggcattattggccactggatcaagcgatttgcggcagaacgacgaaagcgacacttgggcgaaaagaggcaggcatgactacgaatcgaccgctcattgcggtgactccgctgatggattacgggcgcgatagtctgtggatgctgcccggatatatggaggcgataatgcgggccggcggtacgcccatcatgttgccgctgaccgatgacgccgacattcttgcgcaatgtgccgaacggtttgacgcgtttctgtttacgggcgggccggatgtgggaccgatggttggtgcagcggcctccgccaccggccgtagcgaggtgctctctcctgagcgcgaccgaatggaatcgattctgctgccggccgcaatggcttggaacaagccgattctgggcatctgccgcggcattcagttcatcaacgcggcactgggcggcacgttgtggcaggatttgccaagccagcatccgagcgatatcgaacaccatatgaatccgccgtacgatgcgttcgggcacagcgtttccttggtgtccggcactcccctggcttcattgttcgcggggcagactgagattgcagtaaacagctaccatcatcaggcggttcgtgatgtggcccccggtctcgaagtcatggccgttgcgcccgacggcgtgatcgaggccctgtaccggccggcaagccacttcctgtgggccgtgcagtggcatcccgagtttctctacaaggtagatccatgctcgcaggcgatttttgatgcgtttgtggggagttgccgataacagcaaaaggggctgctccggttttccggaacagccctttttcagcggtagcagtcagcagactgatttagtcatcggtgctggcttgccagcgctgattggcgcgtgcggagaccgccgtccgaaggcgaggggcgtacgaaggtacgtcgaacctgaggaaaggcggtatacgctccgccaatcagtgctggttgttgagacggtggtacatctcggacagctccagttccttctcgaactggcgagcggtggtgttctcgtcgatgacggcgagctcaacaccggcgatgcgtgcgaagtcttcccaagcctcacgaccgacggaggtggtcatgcaggtgtggtgagaaccaccggcggtgatccagcactcaacggcggtcttcaggctcggcttcggctcccagacggcgcgggcgcacggaagctccttgagggagccctgcggctcaacgacgtcgacgacgtccatgagcaggcggaagcgttcgcgaacgtcggacatggagaccacgacggcgtccttggtgggcttgccggagaagaccaggcggaccgggtcggccttgccgccgatgcccagcgggtggatctccagcttcggcttggcgatggtgccgatggacggggaaacctcgagcatgtgggagcccatgtcgagctcgtcgccctcggtgaagttgtaggagtagtcctccatgagggaggcgccaccctcaaggccgtagcccatgacggcgccgatgcgcacgaggacggcggtcttccagtcgccttcagcggaaaagccccagccgtactcggacgggaagcgctgtgggccaacgcccggcagctgtggcagagcgccgaggtcctcgaaattgtcgacgccggcggtgcagccgttggcgcgcatcatgttgaccatcgcggcctcttccttggcggcgatgaacagggagtcgtacttggcgtccagcagagccgggtcgacgtcgtacttggccttgtagtcctcgatgatctccttgacctggtcgtccttgacggcgtcgtacgcagcgacgagctcgttgacggcccaagtgttgatggaggcgccgaacacgcgctcggcctcggtcttgtcgccctcggtgacggcgacgttacgcatgttgtcgccccagcgcatgaccttcatgttgttggaggcatcccagccggcgcaggcgcgggcccaggtgccgaccttctcgacgacctcaggatcggtgtagtggccgacgacaaccttgcgcttgatgccgaggcgggagacgatgtaaccgaactcacggtcgccgtgggcggcctggttcaggttcatgaagtccatgtcgatggtctcccacgggatttccttgtggtgctgggtggccagctgcagcagcggcttggtcagcacttcgaggccgcgaatccacatcttggccggggagaaggtgtggcaccaggtgatgacgccgatgacgttcgggttggcggaagcctcgaccatgaactccttgacaccgtcggaggacttcagggtgggcttgaggacgatcttggccggaatcttgccggtgttgttcaggtagtcgaccatttcagcggagtgaatggcgacctggcgcagggcttcctcgccgtacaggtcctgcgaaccaacgccgaaccagatttccttgccctcgaaggggttttccataaccatagggttacttcctttacttctttgtttatgggggtttgtttaagtttcattcgccgaccgaggctcccctcagagaggggagccaagacaccaccgtgctggcggagtcagcgctgatttgatgtgtgtgcccgcaaggcgcggaaggcgaaggcgtacgaaggtacgtcgagccttccgcaacgcggcggacactccatcaaatcagtgctggccgtagacgttctggtagcggtcgttgagcttatcgatgtcggcctggtcgatctcgatgatgtcaccgagctgacgggcggcccacatggtgtgagcgacttcctcggtcatggcagcggccttgacggcgccttcagcatccttgccgatggtgaaggggccatggttctgcatgaggacggccggggacttcgggtacttcttgagggtctcgacgacacccttgccgatcgcctccgagccgatcagacggaacgggccgaccggcaccgggccgccgaactcgtcgcccatcatcgtcaggccgcacgggatgttctgaccagtggcagcccaagcggtggcgtaggtggaatgggtgtgcacgacaccgtagacgtcgggcatgttgcggtagatgtaggcgtgggaagcggtgtccgaggacggggcttcggcaccgtcgaccacgttgccgtcaaggtcgcacacgaccatggaggacggggtcaggtactcgtagcgcaggccggagggcttgatgacgaacaggtcggcggtgtgcagacgctgggaaacgttgcccgcggtccacacgaccaggttccacttgatcagctgctggtgcaggttggagacgacctcacgaacctgcttgacctcggcgcgaacctcggggccgtaatcagccaaagttgccattattggttttcctttccactgtgatggatggacgttttttcaaaatctcaaggacctctctcaatagagggaggtcagaaaggcttacttatcttcgaggttgatggtttcgatggcagcgtgctcgatgggcaggcccttggtgaagcgagcgaagaagtcctcgaaaccaaccacatcggaagccaccggcttctcagtggtggactgggcgtccttgaacacgaaaccatcaaggaagtcagcgaggttgctgtgatcctcgttggtgttccacaggtagttggcgagcacggccataccccaggcaccaccttcggcggcggtggacatgaccttgatcggggtgttgaaggcagcggcgagaatcttctgagccaccttcggagtggtgaagatgccgccgtggcccacgagagagtcgacctgcacgtgctcctgcttggtcatcacgtccatgccgatcttgaccggggagaacgcggagaacagctgggcgcgcatgaagttgccgagggtcatgttggcttcggggctgcgggcgaacagcgggcggccttcaggcagaccggccaggaattcgccggaacggaacggatagttcagcaggccgccgcagttggcgtccacgtcgtcggcgatggccgcgcggaacaaggtgccgtacagcataccggcatcaaccgactggccgatggccttggcgaactggccgaacaggccgacccaagcgttgaggtcggaggtgaagttgttggcgtggctcataccggccagatcgccggccggggtggtgaccaagtcaacctcagggtggagggccttgagcttgtgctccagaaccaccatggcgaagatggaggtgccggcggagacgttaccagtgcgtacgcgcacggagttggtggctaccatgccagtaccggcgtcgccctcaggcggggcgagcacgatgccgggattcagggcaccggacggatcgagcagcttggcgccttcctcggtcagctcgccagccggagtgccggccacgagcggctcaggaagcaggttctccagcttccacggctgggctgcgacctcaggcagagcgtcgaacttctcgatgaatgcggtttcgtaagtgtgagtggtcgggtcaatcgggaacatgccggaggcatcgcccacaccgaggaccttctcaccggtgagcttccagtgcacgtaaccggcgagtgtggtgaagtaagccacctcggagacgtgctcttccttgttgagcacggcctggtacaggtgagcgatggaccaacgctcggggatgttgtactggaacagctcggagagcttcttgtgagcttcggaggtgttggtgttctgccaggtgcggaacggcaccagcagttcgccggcctcgtcgaatgcgaggtaaccgtgcatcatggcggagaagccgatgtggccgacgtgcgtgagcttctcgccataggcggtctcgacgtcgttggccatggaggcgtaagcggactgcaaaccgccccagatctcctcggtggtgtagctccacagaccatcctccaagtgggaggcccagctgtagtcgccggaggcgatggtctggaagttgtcgtcgatgaggacggccttgatgcgggtggagccgaattcgatgcccagcgtggtcttgccagcgcgaatcttctcggcgatgtgggcggcctgctcggccgcgttgtcggttgctgccatatctttcctttgccttggagcgccggcgttgttatccccttccttggggaggatgttagcgctcacaatttcaaaaaaacattgtaccgataacctgcattcgacacaacttataccgtgtcacgcatcataacggtttgataacagcgccaatttaccgccgaggagccggccccaaggaccgccgagcacgcacttcggcgggaatcagccccatgccgtgctgggtggtcaggaaggtcggctcgccgccctcccccagcaagcgcagcgtctcgcgcatggcggccacgccgagcccctcgaaatcgggatgcacggtggtcagcggtgggtacatgttatccacgccagacatgtcgtcgaatccgaccacgctgacgtcttgcggaatccgaagcccatgctcatgcaacgcgcgcatgacgccgacggcctgattgtcgttcgcggcgacgaccgcggtgggtaacgccatgccccgacgcccatactcatcaatgagatgattcatgtgcgcatatgcctcagaggcatcccacgtatggcagcgcacgatctgtgaatcgatggatcgggaggcggcgagcttgcgccacgcatccagtcgggtgtgggcgtcgcgccattcgttgggaccggcaaaatacagagccgatttgtgcccgtattcgcccagcaaggccaccactttggccattgcaccccactggtcgataccgaccagtgcagtgcgacgcttgttttcggtggagataaggcccaatccctcacgcacggtcatttggccgtgggtggcggtgacgatgacgcgtggctgagtgactcgcgcacggcaggcggcggcgaacatcacgtcggtcggggtcaggaagatgaaggcgtcgacgttctgctcgttgaaggtgtcgcacaggttgtcgaattcggactgcatgcacaaggcctcgtggaccatcatcacgctcatgaacagaccgtgttcacgggccatggattcgatggatgagatggaggaaatcgggccgaagaatttgaggcccccggcgatcagccctatggtgcgcgaacggcgggaagccagtgcgcgcgcggagttggaggggcggtagccgagttggtcaatggcggcctggactcgcgcacgggtggcgtcggaaacgtccggcgagtcattgatcacacgggagacggtttgatggctgactccggcgagcttggccacttcgaacatggacggacgtttgcttggcttgcggctggtcaccatgctacctaacctccccgctggcggccggcacccatgcgcggccaggcttgtaccttaatcaatactgactttagcgcgtccacaacagttttgcgttagcgctcacactatcgtgtcgcacgcggctcaggtcaggtgccatgagacacgatggagcggagtcggcccgtgttcggcgatggcggcacggtgtgcggcggaaccatagcccttgttatgagcccattcgtaggcggcgtaacgtgggttgctttgcgcgaggtcgaccatcagccggtctcgggtcactttggcgatgaccgccgcggtggcgacggtggcgcaatgctggtcgcctttgactttggtcgttatatcggctggaatcggcacgtccggcgcgtcgaacgtgttgagcgccttggtgatgtaatcgctcggcccgtcgagaattccggcgactttgggcagggcgcgaacgctttccccacaatttccaatggattcccctacggagtctcccggacgaccttccacaatcccccccgcagccttttttgccgtcaatccccctccaagccgtaagccaagttcgcgttcgacttggctgagcgcgcgcagggcggccacgccgagcgcataggtgatgccccattcgtcgatctcggtgttgctggcctggcctacggcgtaggccgcgcaccagtcgcgcagttcgtcgaaaatcgcctcgcgcctatgttcggtgagcatcttggagtcggccacgccgtccggtacgccgaggtaggtccgcccggacagttcggcggaatcatcgccgtcaagcggcgccaaatcacaggcccagatggcggcgcacccgaccatcaccggaccggcgagcgcgccgcggccgacttcatcgaatccagtaataaggtcatagccctgggccgcaaggctgcgttccaagtcaagtgtcggggtaatcatgcgcggctcccatcgtctcacaatggttaggattcagacggtccaggattcatatggttcagggttcagacggcccggaactcaatcagttcaaagactcacacggttcaaaaaagactcaggaattcgagccggaagcgtcagacacgtccttgaagacttcgtggtggtcatcaatcgcaccaagccggtcaagcggccagtatttcgcgattccgactccgaccacatcggagatgggaaccaagccgcgatcgccgtcatcctgatgatagcgggagtcggcggaattggcgcgattgtcgcccatgacgaacacgtggccttcggtcacggtcaccgagaacgggaaagcgctcgggtccacgccggggcgaatgtaggaggtctcattgatggccacgccgttgatggtcaccggctggcccgcgcccttgcattcgaccacgtcaccgggcaggccgatcagtcgcttgatgaggtacccgccaccgggagcgctgctctgctcctcgttcaaccagttgttgggatctttgaataccacgacgtcgccgcgctgcagatcgaagatcttgggggtgagcttgctggtcaccacgcgatcgccgggcaccatggtgtccatcatcgagcgcgaaggaatctcgtaaaagccgacggcgaaaatgcgaatcagcagcacgataagcacgggaacgccgcaccacaggaaaaagtcgcgtagggtgaagtggtcatcatccatcgatgatgctgccgcggcattcgcaccagcggaagaagcggcgtacgccgggcgcgccggtgccgggggaaccggggacggggcgatgccgtggtcggcgacttggaacgtacgggaatcgcgggcatcggcctcgtcatcatacgaggtctgattgctctccggattgtcggaaatcgggaattcgccgttatcctgatcgtcctgcataccatctcctcgcgattcatgctgccggatatgaggggtgccggcgcccgtccatcatacgtggaaaatacgaaaacagcccgaaaccgaaacggttccgggctgaatttcacggtttattcgcgcacctgcatcatcaggctcacgattgcacccgcgaatcgactcacttagcggagttgtcgcggcgctcggcaatacgagcggccttaccgcgcagagcgcgcaggtagtacagcttggcgcggcgcacacggcccttacgcacgagcttgatggagtcgatggacggggagtgcaccgggaagcgacgctccacaccagtgccgaagctgatcttgcggaccacgaaggtctcacgcacgccagcgcccttacgagcgatcaccacgccggtgaaggtctggatacgggagttgttgccttcctggatcttcacgttcacgtcgacggtgtcgccgggacggaaggccgggatttcctcagccggcttcatgtgcttggcgtcaaaagcctcaacagcgttaaccattgttttccttcagtgctgccgcatatcagccacagatctggggccatccacgcgattgcgcatcacgtgcgttggcctgttctcgttatccctcgggtttgcccttgggaagcctgccgatccgccgaaagtcaggccttgcggccgttcggactggacccatggagacgtgggcttatgcggcggcccacttctcgacacagcaatcgattattctacggattattgcggacagaatggctgcctgatggcattccaacaccacggcactgcgacgtagttgacagacctgcgggcgggctttatcttgggagcgtcggtaggcgaggctaccgcagggatatgggttgctgccgctaacagtggagacactgcacgcaggtcagcagttcttgtcggatcaaggcatgaactaacgcaattcc

SEQ ID NO: 3232 - DNA, 4444 bp, Unknown
  R53_2m  MAG No. k141_6672
gcatgaatccaccaggtcctgcgcccatgtcagggcgtgggcggccgtcatcgtccgcccctggcagcaacagaacaacgcccgcgaccggacgtcctcgatgagtagcaggtcgtagaagaccatgctcgcctccggtgtggccgcgacgggatcgtgcctggtcggcacgccgcacgattcgcggccgaaatcgtatcccagatacccgatcgcgcctcccgtgaggggcagacgcggatcgcgcgcgccatcgcagggtccaagccgcttcttcacgacatcgaggaaatcaccctccacggcaacgccgtcgacgaggcatccgccccgcccatgttcgatcacaagataggggaagagtcccaggatcgagtagcgcccctgcgcccccggcatcgaggagtccaggaacgcgaagcgttcctcgccgcgcacgcgctccacgatgtcggcaagcggtcggaacgtcctgagcttgaacacctgcgcactcaccggaactccttcgtctgcacccgggcccgcgtccgcgccaccatgcgggcgtaggtgtcgttcacgtcgcgcgacacgctccccggttcgaattccacgccgccgataccggccacgggcatggcacccatcagggagttggtgaggaacacctcgtcggcccgaagcagctcgtcgggcatgatcgggcgttcgacggcccccgtgaacccgatcacggcatggcgcatgaccccgggcagcagaccgcaggagacgggaggcgtcacgacgtctcccccgatgacggcgaagatattggagacggccccttcggcgacctcgccccgcgtattgaggaacaacggctcgtcgacggcgcggtcacgggcgcgacgcttctccatgatgttttcggcatacgccagcgtcttcatgcgcgcgaggggggaggattcgttcctgcgcacatcggcgaagtcgcagcggaagacgcgcttcgcccccggcgcggcatacgggttgcgtctcaacgagacgacgcggttgcgctcggtgaccgtgagcttgagggccgaatcgtccgatgcgccgagtccggcgcatgcgcggagcaccatcgtctccagatcggcgcgacgcgcctcgatgccgaggtatcgcaacgtctcacccaaacgcgtcagatggtcgtccagaaacacgggcgcgccgccggataccgcgatggtctcgaaggcccccatgccgaagaagaatccgtcatccgcatccacacgcgcccgggcaccggggccgatcacgcactcacccatcgatcagcgccccctttcccgtctcgcactgccatcaatcaggctatcagtcatgaagacggtaggtgcgccgccgacacgccgtccgtccggcgattccgtgcgtcacgaccggaccgatgcgcaatatccggcttccgcgttacactagtacggttattcgcgcgcgcgtggcgccctctacaccccgagccgcgaggacacgtggattccggccggccatgccccacatggcaaaccgagaacccgcacacctagcattacaaggagagccattttggcaaccaagattcgtctgaagcgacagggcaagaagttctacgccttctaccgtgtggtggtcgtcgattcccgcaagaagcgtgacggcaaggtcatcgaggagatcggtacctacaaccccaacacccagccctcgaccatccagatcaagtctgaccgcgctcagtactggctcggcgtcggcgctcagccgtccgagcccgtcttcaagctgctgaacatcaccggcgactggcagaagtacaagggccttgaaggtgccgaaggcaccctgaagaccgttgaggccggcccggacgccgaggcccgcatcgcggccgttgagaaccaggctcagaagctgaaggccgccaaggccgaagctgccgccaaggccaaggctgaagccgaagccgctgccgccgctgaggaagccccggctgaagaggccgccgaagaagctccggccgaggcctgagcggaaacgaaaggctagctatgcttgcacaggctgtggaacacctcatcaagaacatcgttgattttcccgacgatgtttccgtcaagtcccatgagaacgcgcgtggcgaactgcttcgtgtacgcgtgaacccggaagacatcggccgtgtgatcggccgtggcggccgcaccgccaacgcgattcgcaccgtgattcaggcactgtctgaccacaaggtccgcgttgacatcatggacgtccgtcgataaccgataaggaacgattcacagcatggcacagcaagacatgcacgacgaccctcagcagctcgagttgctgagggtcgctcgtattggccgcgcacagggcctgaagggcgaagtcaccgtgcgcctgtacaccgatgatcccgagtggcgcttcgagccggactccgtgctctacagccaagatggcgagaccgagtacatcgtcgagggctcacgcacgttcaaggatcgttggattctcaagcttgagggcgtcgacgaccgcaatgccgccgaggccctaaacggtgtcgaactctacggcgaggtcgacgacgcagaagatatgctcgaagccgacgaatggtatcccaaggatcttattggccttgaggcccgtctagtcgagggcaacggtctgggactgcccgccggccaagtggtcggcaaagtggtggatgtggtcgactcccccgctcagtccctgctcaagattcgtttgaccgagccggtggtaaccggccagaactccaagggcgaggatgtggtcgaaaagaccgcgttggtcccgttcgtggaggccttggtccccgacatcgatctggaggagcaatacctcacgctcgatccgcccggcggtctgattcccgggctgtaaacagtctttcaaaccaataccgagttccacactcaatttattccatcgcaaagggcggtctttctgagattagtctcagaaagaccgccctttggttgctccttaacgtttataccgcgtaagatggctgagcctcacagataaccaaatgggatgccgaagcgatcaagacccgtaccgatcggctggtatccgttgcgctaaaactactgcgactgcaataaactataaaaaatgtgcgatgcttacacatttatgatatgataaatgtgtaagcatcgcacatttatcataggatattcgtcatgaagctccagcgaaaagcactgaaaacgctcaagcagtggaagaccacacctgaccataagcctctcctgatccgtggcgcacggcagacaggcaagacatggcttgtcaacgagttcgcgaatggacaatacgacaacatcgtctcggttgatttcatgcagcggccatccctatccgggatattcgagcaggatcttgacccgcaacgaataatccgtcagctcgaactcgccgccaatcaacggatactccccggcagaacactgctcttctttgacgagatacaggaaagtccgctcgcgttgacctctctcaaatacttcaccgagcaggcacctgactatgacatcatcgccaccggctcctacatgggaatatccaagcacggcaaaacctcttttcctgtaggaaaagtcaccatgatgaacctacatccgctctccttcgccgaatatctggacagcatcggacaagacatgatcgccgacaccatacgtgaaggccggttcgaggacattccacaagctctcgaacctcagatgaatgacctactcaaaacatatatgtgggtcggcggcatgccagcagcattaagcgctcacctggataacgggattccgcaggatgtgcgaactgtccaacaagatattctcaacgcctacgatcttgatttttccaagcatgccgcatatacgctgggcgagcgtatccggcttgtatggaacacactgccatcacaactcgccaaggagaaccgcaaattcgtttacggtgttgtcaggcaaggagcccgcgcccgcgaatatgaggaagcgctcacttggctgacggactacgggatcattaccaaagtcccccgcctcgatgctctgcatattcctctgcccggatatgagagtcttaacacgttcaagatctatctggaagacacgggcatactgggcgcactgtccggtctcgacgtgaatactctggtgaacaagtcgaagctcttttccgaattcaagggcgcgttcgtagaacaatacgtatgtcagcagctggtagctcaaggaatcagaccccgctattgggctaacccaaatcctcaaggaaatgcggaaatagatttcgtaatggaacagggagacgaggtttttcccatcgaagtgaagtcctcttccaatattcgtgcgagaagtctctcgtatgtctgcaacagatacgggctcca

SEQ ID NO: 3233 - DNA, 29489 bp, Unknown
  R53_2m  MAG No. k141_6684
attcatcatcccttgacgcctccctcggtctggcctccgaccagggatcccgatgccagcatgtagatgatgaccactggcacgcaagccagaatcgcgccggccgtcagctggccccacggatacatgtcgccgaatatgagtccggctatcaccaaggggaaggtctgttgggaggtggatgtgatgttcaccaacgcgtacatgtattcaccccagcacatggcgaacgcgaagatcgtggtggcgatgattccgggcaacgccagggggaagatgatgcggtacatgatgcgcagtcgtccgcagccatccaccagtgctgcctcgtcgatgtcgcagggaatcgcctggatgtgcgggatcagcacccacgccacataggggatagtgaaggtcggatagatcagcgcaagaccccagatgctgttcgtcacgccgatgcgcgcgttcatcaggtacagcgggatgtacatgacggccgtgggtagcaagtaggtgaacaggatggttttggagaacgtgcgcttgcccctgaatgagacgcgggcgatggcataggccgccgggtacgccacgaaaatggagaacgcacataccaccacggcgatgataaggctgttaagcacggcctgcaggaagttggtgtcctgaatgaggtatttgtaggattccaacgtcggcttatgcgggtagaaggtcggcttttggctataaatctccgactgccctttcagggaggtgttgatcatccagtaaatcgggccgagagcgacgatcagacaaataatgatgtagatgcggctgatgattttgacgcctttggtttctctcatcgtaatctccttaccttcgcccgtctttgggcaccatgtgtcgtgcgagtacggtgatcagtgcaataagcaccggcatcgccagaatggataccgcaatacccttaccgagcatcatgctcttcatcgcggtctggtagctgaacacgttcatgacttcggtggagccgtttgggccgccgccggtcatcagccacacggattcgaattcgttgagcgtccagatggtcgacatcagcgtcgacaacaggatggtgtcacggatctcgggaagcgtgatgtgccagaactgctggaatatgttcgcgccatcgatggacgcggcctcgtaaccgtcggcggagatggtctgcaggcttgcaagaatggatatcgcgaagaacggggtgccgcgccacacgttggcgatgatcacggtggccatggccagtttgggactgccgaaccacaccagatcatggtctgcgatgcccaacgtggtcaatatgtagttggctataccgcccgtggagctgaagatccagcgccagttcaataccgccacgatgttgggcagggtccaggggatgagtagcagcgctcgcacgatgttgcgtccacggaacttggtgttcagcgcgagggccatcgccagaccgagcaccagcttaaggctgatggagatcgcggtgaacaccagggtgttcacgatagatgaccggtatgaagggtccatcaacagattgatgtagttctttaatcccacgaatgcgccgttgccgccaccgatggtcttgttggtaaggctggtgtagaagccccagcaaataggccatgccaacatgcagaccaagtagataatcaacgggatattaatcaaatacgcgaaccgcgtatccctggacattatggcacttcgttctctcctcatgccgccatccctcctgttcgtctgtgatgtgatgggaaccctcaccatcgagggctgttatgttcgccgcgtgcacatcggttgtgctgtgggcggcgatcatgtcgtccgtactcggttagcttatccgtcagcgcaaataatttccacttagactaacgaagtgggtagaactttcagctgcaacaacatagatcagcccaaaaataatcataaacagccatttaaagccagactacaccacgacctacatggtaagtattttctatttactcttttttggctggtcgaactttacaaatcgatttccagcgctttacgatgatggcacacgaaaggaggggcaatgaaaccaccaccgaacatcaaaggacaactcatcgtatcctgccaagcgctcaaagacgagccacttcattccccgtacatcatgggaaaaatggcctacgccgcagctcagggaggggccaaaggcatacgggccaactccgtggaagatatacgggaaatcaaactgcgcgtcaacttgcccatcatcggcatcatcaagcgcgactacccggactccccggtgttcatcacccccacgatggaagaggtggacgagctcgaagcagtcaaaccggacatcatagccctggacgccaccgaccgcccccgacccgccggccaaagccttgacgatctcgtcgtgcaaatccgacacacctaccccgatcagctactgatggcggactgctccacagtggacgaagccgcccacgccgaccagctgggtttcgacttcatcggcaccaccatgatcggctacaccgaggaaagccaaggcgatcgcgtagatgaggacgacttccgtatcatccgcgacatcctagccagagtcaagcatccggtcatcgcggaaggcaacatcgatacaccggacaaggcgaaacgcgtcattgagcttggttgccacagcgtagtggtggggtccgccatcactcgcccgcagctcatcaccaaacggttcgccgcggctctcgcccccgcgtagcccctatcaataggcccctacgccaacaacactgtttaccaacaccaacaccacaaccaacccaccaacaaaggagaacaccatgaccatcgatccgaacaagtaccgcggcatcttcccagccttctatgcttgctatgacgatgacggcgagatcagccccgaacgtgtgcaggctctcaccgaacacctcatcagcaagggcgtcaaaggactgtatgtcggcggatcatccggcgagtgcatctaccagagcgtcgaggaccgcaaggtcacgctggagaacgtcatgaaagtcgcgcgcggcaaagccaccatcatcgcgcacgtggcatgcaacaacaccaaggacagcgtcgaactcgccaagcacgccgaggcgcagggcgtcgacgccatcgcatccatcccgccgatctacttccgcctgccggaatattccatcgccggatactggaacgacatcagcgccgccgccccgaacaccgacttcatcatctacaacatcccgcagctcgccggcaccgcgctcacgccctcgctgctgaccactatgctgaagaacccgaaagtggcgggcgtcaagaactcctccatgcccacccaggacatccagatcttcaaggccatgggcggtaaggacttcatcgtgttcaacggtcccgacgagcagctggtcagcggccgtgccatgggtgccgatggcggtatcggcggcacctacgccgttatgccggagctgattctcaagatcaacgagctggtgagcaagggcgagattgagcgcgcacgcgaaatccagtaccaagtcaacgacatcatcgcactgatggcgagcggccacgcgaacctgtacgcagtgatgaaggaggtactgcgcatcaacgaaaacgtgaacatcggcggcgtgcgcaagccgctggagaaccttaccgaagacgacctgcccatcgcccagcaggctgcggcccgtatccgcgaggcaatcgcggcactgtaagctgtgcaatcagagggaaaggggtgaaatcatgacgcactatatctgcatcgacatcggcgggacatccatcaaatatggaatctacgacgacgcttcgcagcaattcgtacggcatgattccacccccacccatgcggatcaaggcggtccgcacatcgtaatcaccgtattggggctcatcgaggacctctcccatgctgcaacggcgccattatacggcatctgcgtatccacagcgggcatggtcgactgcgccacggggagcatcgcttactccagcgaactcattccgcgctacaccgggaccccattgaaatcgatgatcgaacagcagaccggcctgccctgcgaagtcgaaaacgacgtgaattgtgcgggtctcgccgaatatcatgccggcaatgcgcgaggcgccaaaacagcgctgtgcctgaccgttggtaccggtatcggaggctcgtacatcgatcacgggcgcgtactgcacggcgcgggcggcagcgcctgcgaagtcggctacattcacctgccgggcggggacttccaagacctggcctcaaccaccgccctcgtgcgcagggtggccacgcgcaagaatatgcaggccgaagatctgtccggcaaacgaatattcgaacttgcccagcagggagacaccgactgcgccgaagccatcaacaccatgaccacctatctgggcatgggcatagccaacatctgctatgtgcttaaccccgaggtcgtgatcctcggcggcggcatcatggcccaaagtgactatttgggcggtcccatcaggcgcgccctcgacgataacctacgcaaaccagtggcccgagccacaagccttcgttttgcacatcaccggaaccgcgctggtatgcttggtgcgtactatcatttccggtacatgcaagaaagtcggaaacatggctcattttgacaaggacgtcattccgcagatcgaagccgtatacgccacactgtcgcctacggagaaagtcgttgcggacttcttcatccataaccgccgacgtatggatttcggggcacccaatatcgcggatattctgcacgtatccctggcgtcgctctcccgtttcgccaagaagatcggatttgccgggtatcgcgaattcatctataaatacaaggaagatctgcgcgaggacactgcacagacagtgcctgaccagtggtcgatgcaggcgctcagctcttatcaggaactgttggacaaaagctatgcgctggtcaacgagcgccagatcaacgcactcagcgacatgctgtccacctatcagcgcatctacgtgtatgggcgaggcagctccggccttgccgcgcaggagatgcaactgcggttcatgcgtatcggcagtatcatcaccgccatcaccgatagcgatgtgatgatgatgaattccgtcctgttggatgacacctgtttggtgattgccatcagcatcagcggtaagacaccggcggtgatcaaggcactgcgcaaagccaaggagtccggagcaaggacagtactgatgacttcccataaatctccagaacagcatgaatactgcgatgaggtggtgctgctggcgcttcgggagaacatcgaagcgggcaaggtcatctctccgcaatttccgattctcatttacctggacatcctatacgcgcatttcctgcagcatgacagcaaccataaggagctactgcacgagcgaacgctggatatcttgcagcaggacgcaacagagcaggagccgggcgagcaggcggagtaggcatacccgctaatcaagcttcggcagccccaatcacgcttccaacacgctcaacaccttcttctcgttgtagaacgcgaatacgatgccgcccaagccgcacagcacggccgcgcacacggcggcgatgcgatagcccgcgccggacgccatgccgatggtggagacgccggtgaacagcagcatggccacggactgccccatcttcatcgcaaaggtgcgggccgcgtagaacatgccctgacggtcctggccggtggtcttggagctggcgtcggcgatattcgccacgatggcttgcggcagaatgccgaacgcggccatcggaatcgcgccgaccaccgagagcgccaaaccctgggccatcgccggaatgaagccgagcgcggccgaaccaagggcgccggcaaatgcgaacgcacaggtgaagatcacgaaggcaaccagcagcaggcgcttcttgccgaccttattggccaagatattgaccggcagatagaacagcacagagacgccggtcatgagcacgaagtagatggtcgtggtggtttccggcagcttgagcaggctggtcacgaagaacggcagaccggtctggaaggtggtgatggccacccagtagaccacgtcggaacacacgaacttgcggaattcgtcgtcgccgaacgtctgcttcagggattcgatggccgattcggaggtgggctgggagttgacgtagtccttctcgcggatgcccagcggcggcaccagcatgcacacgaacgccacggcggccatgatggtgaaggtcacgcggatggcggtgatacggcccatcatcggcacgaacgcgccccaaatcaccggcgccacgtacgcgatggccgtgccggccacccaagtgaaggagatggcggtggagatggtgagttgctgcttggagtcgtggccgagttcggcgatgagcgcgttgtacggcgtgcagtagaacgtgaggacgatgtagtagccgatcacggtgacgaacaggaacgccgcgttcacccagccggtgccgttgatcggactccagaacacgagtacggtgaccaccgcgagcggcagggcggcgaatttcaggaacggcatacggcggccggatttggcgtcggaacggtcggagagggacgccacggccgggtccacgaacgcgtcgaagaatcgggcgaaggcggtgatgccgcccaccacggtcacgatgccgagaacgaccaggccctgcggcacgaatacggtctgaccttgggagatggtctcctggtcaggttggtagaaatacacgagccagttggagatgatgccggaaagcagcgcccacccgaactggccgaccgcaaacgcccacactttggcgatggggagatctttgatggctgatttcgccggtgcaacttgcgcgcccgttacacttgctgtagtcgtattacccattccccataacctccgaatcaacattgacacagtgtcaaaaaccagtatacaccggggttttacactcaattccctgcagggcaaaaccgcacaccacaatccacaccccgagccgccttcccctcagccatccgcaggctctacgatgagagccatgactggtctggccgaacgactaccgcacgtcgccgctttccccgaagcgctgggcaccgggttgctgctgcataccgatgtcgcgctggatgacgggctcagtaactgcatcgatatgttcatcagcacctatgaagccgcattgtcccggttcaaggatgattcgacggtcggccggatgcgcacggccacgcatggcggcacgttcgattttcctgactgggcattgggtttatttggcctgtacgaccagctgtttgcgtcgactaatgggaccatcgacccatgcgtgggcgaggatttgattcggcttggctatgacgagtcgtattcgtttacgcctgcgccagatgccgctgaacatgcaggcgcgatccacgaacgagccatttggtcagccgacgttgagcggcatggcacaacactggtgacgcgcggaccggtcgcgctcgatttcggcgcgtgcggtaaggggtatttggtggatttgcttgcggggatgttgggtgatggcgcgggtcaccctcaacccattcaatacgtcatcgacgccgggggtgatttgctagtgcacacggacgaaccaatcaccatcgcccttgaagatcctgccgatccggccaacgccgtaggtacggtcgaaatcagccacggcgcattctgcgcgagctcccccagccgccgccactggtctgacgccgcaggtcaccaacttcaccatctgctcaacgccatcgacggactaccggttgacgatgtagccgccacatgggtggccgtcacgccgccatcgagcgccataaccacgaagacatcgacgcatggcagcaatgcctcgacaacggcaaaccgcgataccgacgattcgtcgaacaccgttgcggcacacgtccctgtcacactggccgacggcctcgccaccgccctgttcaccaccccggccacccagctgcgcgctcacttccccttcgaatgcgccattctcaacgccaaccgcaccgccgcccaatcccccaattttcccggcggctttttcacacactaatgtacgaaatcatcagtatcacatccctcgggtggaccgatgggttgctcccctcagtcagctacgctgacagctcccctcggagaggggagccgagtatagctaatccgctaatccgctaacgcaggaaacaatccgtcagtcagcgagtgcgaactggctgttgtagaggtcggcgtaaaaaccgcccgccgccagcagctcgtcgtgcgtgccgcgctcgatcacgtcgccgtggttcatgacgagaatcatgtcggcgtcgcgaatcgtggagaggcggtgcgcgatcacaaagctcgtacgccccacggtcagcgcgtccatggccttctggatcagctcttcggtgcgggtatcgaccgaggaggtggcctcgtcgagaatcagaatcggcgcgtcctgcaccatcgcgcgggcgatggtcagcagctgcttctggccctgggagagcgacgacttgtcatcgagcacggtgtcatagccgtccggcagcgagcggatgaagtggtcgaggcccacggccttgcacgcatcctcgatctgcttgttggtcacgccgggcttggagtaggcgatgttctcgcgcacagtgccgcggaacacccacgtatcctgcagcaccatggagaactggtcgtgcacgttccagcgcggcacggacttggtgtccacgccgtcaatcgcaatcgagccgccggaaatctcatagaagcgcatgagcaggttgaccatggtggtcttgccggcaccggtcgggccgacgatggcgaccttctgcccggccttgacggaggcggagaagtcgtggatgatcggcttgcccggttcgtaaccgaactgtacgtggctgaattccacgtcgcccttcacttcgtggccgttggtcccaagcaaagcggacttgccggattcgtcctccatctccggctcctcaaggaagccgaacacgcgttcggcggccgccgcgcaacgctgcaggttctggaaggcctgggcgaactgcgccaacggctgggtgaacaggcggacatacatcatgaacgccacgatcacgccgaactcgatctgcccgtcgagcgcgagcgccgcgcccaccacgcacaccaccacgtagccgaagttgcccacgaaattcatgagcggcatcatcaggccggagaggaactgcgacttccagccggactcgtagaggtccgagttgcacttctcgaagcgacgaatcgaatcggcctcgccgttgtatgccttgacgatgaggtgaccggcgtacatctcctccacgtggccgttgacgtcacccagcgccatctgctgccgggcgaagtacttctgggaggacttcatgatggccatcatgatgatcaggccgatgaggctggcaccgatggcgcacagggtcatgatcacgttgttgtagaacatcatcaccagcgcgcccacgaacagcgtcaccgaggtaatcagcgagccgagcgactggcccagcgtctggccgatggcgtccacatcgttggtgatgcgcgacagcacgtcgccgtagctaaccttgtcgaagtatttgagcggcagtttgttgattttgaccgagatggactcgcgcagtcgctgggcggtgcgctgggtgacgttggccatcatccagctttgcacgtagccgagcacggcgtagcccacgtacagggccaccaaagtccaggcgatgtggcccaccgtgccgaaatctaccgagttcatcaccggtctgccgttaacgatggcgggcagacctttgacgatctcgttggtcatgtccttgagcttgtccgggccgacgatctggcagacggtgccggccgcgcccaggatgagcgcgatgatgatgacgggaagatagttgcggcagtagttcacgagtttgcccatgactttgccgaaatcatggggcttttcgacggcacgcctgccgcccattggtcctcttggcatttgttttactccttaaaagtccgtattgacctccctctgatgagggcggtggcgcgaagcgccggagggagagaagccgtacgcgactacccctcagtcagctgtgctgttttattcgctcgcttatcagctcgtcttcgcctgggaacagcccactgggctgttccctttacggctcagcccctgacatggggagctaccgctgccgccccccctacgccgtaagctccgactggctgagctgggattcggcgatctggcggtatacgtcgcagttgtcgagcagttccttgtgcgtgccctgacccacgaccttgccgtcgtcgagcacgacgatgcggtcggcgttcatgatggtgccgatgcgctgggccacgatgagcttggtggaatccttggcctcgcgggcgagcgcgtcgcgcacttcgcggtcggtcttgaagtcgagcgcggagaacgagtcgtcgaaaatcaggatttccgggtgacggtacaccgcgcgcgcaatcgacaggcgctgcttctggccgccggacacgttcgatccgccttgggcgatcgcggcggaatacccgccgtccatgcgcgccacgaactcgctggcctgcgccacgtcggcggcggccttgacgcgattcagctgctcggccggtatatcggcaccttccgcggcctcgccagcggcgatcaacgcggcctcgcgcttgcgcccggccggggtggaggtatcggccatctcgacctccgccgggtcgcccggctgatcgccgtagctcacgttggaggccacggtgcccttgaacagcacggactgctgcggcacgtagccgatcttgtcgcgcagggccttcaggtcgtagtcgcgcacgtccacgccgtcgaccaacacctggccttggctggtgtcatagaagcgcggcacgagattgataagagacgacttgccggagccggtggagccgatgaacgccaccgtctggccctgctcggcggtgaagttgatgccttccagcatcgcctcgcgcgaatccgggtaggtgaagctgacgttgcggaattccacggtgcccctctggccggttttggccacgtcggcggcggttttggtgccgttctcgacgattggctcagtgtcgagcacctccatgatgcgctgcgcggacacgtcggcgcgcggccagagcacgaacaccatgctcatgagcaggaagctcatgatgacctgcacggagtagttggagaacacgaccatgttggagaacacggtgagcttgtccttgagcccggcggcgtcgatgaggtaagcgccgatccagtagacggcgagcatcaggccgttcaggacggtgttcatcaacggcatcatggacgccatgacgcggttggtgaacagctgggtctcggtgaggtccttgttggccttggtgaatttggcttcctggtagtcctcggcattgtaggcgcgcaccacgcgcaggccggtgaggttctcgcgggccacgaggttgatgttgtcggtcagggtctgcatgaccttgaacttcggcatgaccatggccatcatgacggtgatggacaccagcaggaccgccacggcgatgccggtggcgagcgtccattcgaagccttcgccggcgatcttgcacacggcccatacggccatgatcggcgacttgacgatgagctgcaggcccatggtgatgaacatctgcacctgcgtgacgtcgttggtggaacgggtgatgaggctggcggtggagaacttgctcatctcggccgggccgaaggactcgaccttgcggaattcgagcgagcgcagacgctgggtgaacgaggcggccacgcgcgcagcgatgtagccggtgatgatggcacacgccacggatccgagcgagatgagcagcatcttgccgcccgcgatccagatgtccttcatgtcgctgcccggcgtctcgaccagcgtggtgatgtctgacatatagtcgggcagtttcaggtcgaagtagatctgcccgacgatggtcaccagggcgatgagcatctgaccgatctccgctttggagaggtatttcatgatgcgaaacattggtttccccttgtgttggttgggttggttattggttattggcgattggttcttaagttggctgggttatcggtgattatcggttcacgatgtcttaatagtttccattgtttgattacttacactgtgagatattatacgcacttctgtatgttcgctgtgagcgtcctcaattacctttacctccctctgacgagggaggtgtcaccgcgcagcagtgacggagggagagacccgccagcgggaggaagctagtctcgctcagcctccgcgcgcttagctgccatgtgttcagccacgcgcttgtcccgctccacgaatgcctcacgcacttgttcagccgtcggccgaggccgccccggatggcaaatcgacatatatgtggtgaactcagacaccaggtcaacgaattcgcgcgtgcgccgctcccccatttgcgagaaaatccagcaaattgcggaacgcatttcctctatcatccgatgagactgctcgcgcccggaatcagtgagattcacgcgaataatgcgccgatccttggaatcaatgtcacgcgtgacccagcctttcttctccagagacgacagcacagtggagatgcggccggaactggcctgcagcgccgatgccaattgcgatggcgtttgcgtccccttcatggacagctcccggagcacgaactgctcaccatgggctccacgagtgaattccctctgcatcgtcgaacgattgccccacacgctggcatacagttcactaactgcttcctgctcaaatcccataagagcaccatccattcccattcgccacacggcagagcgccgcaaacaccccaagaatatctcacaccgtaaacaattcattactagaaactatttttggaacgcataatgcacacactccacgctctttgatattctgaaagccgcatagatattcacttcggggcgtcgtctaagaatatttgctgggccaacagtagcgacgttggcattgtgctccatgaggtatctggtcgaaaaggcggacgaagacagaccagttgggcggagcgcgcccatacctcaaaaccattgcaattattggctttgaccattttcgtggagtcacgaaaatggtcatgaaaaacataaggacacacccatgaaccgcgacgaaatcacacgcaaaaccagcgaactcagcactatcgcacacaccaccgaggactccaaagttgagtattggtatgcacgcgagctaatgacctatatggggtacgacagatgggaaaacttcagcaaagctattacacgagccaagcaagcttgcgacaattccggcgtatccgttgaatcccatttccgtgacactacgcgagacgtgactctcggcagcggtgccacccgctccatcgcggacgtcaagctcacccgatacgcctgctatctcattgctcaaaacggtgatccaaagaaagaagaagtggcacttctccagagctattttgccgttcagactcgcaaaacggaaatcattgagcaacgcatgggagaaatcagccggctcgccggccgagaggcccttgccactgcagagaagaaactctatccgtatacccaaatcacacacaacaaaaccgcacaagagcacatgtacacgcccaaccacgccgcagaacaccggcaaggatgtgatacaggccacagaaagcgttgtaccgcctaggcaatgcaacaattgtccgctatgctctgaaggcagatggcggcacggatgccatcccaaagagggggtatgaccatgattcggggtatgaacctatgcagcatcgccggctgcacgcacgaagcagaagaagcgggcatgtgcaacatgcatttcacatcggcgctggttcacggagcgctgcactacactgcggacggacgtccgtcgcactgctgagcgcaacaacaaagcaaaacaaccagtaacgctcaacggcttccacatgttcatgctctaattgcatgtacttgcagacacaatggccggtctgagccagctgccctcgcatggagcagctggctcagaccggccattattgttgctttgtactgtttgcactgtattgcgcctgcattgcgcaagctcggggtagtgcccgaaaagttgcgcactttggatcgtggccgtccatggcgcgatagtcagttcgcttccacgaggttgtcaccgagccgggacatgtcgagatagcggcgggtcgaccattcgttcgcggtgacgtgacggatgcgggcgcatatgagcatcaacgcgctgttcccgtcggggaagccgcccaccacgcgcgtgcgccggcggatctccctgtccggccgctcgatcatgttgttcgtgcggatcctcctgcggtgcccgtccgggaactcgtccagcaggtaggtcgtcgtctcgccgacgccctcgcgcaggcagttcgcggcggccttgagcctcctggattccatctccgtggcgacctgttcggccttggccagggcggattcccgggattccatggcgaatatggccttgagggcggcggacgcccattcgcggtgtgtcggcggcgtcctcgagagcacgttgcgcatgaaatgcaccatgcaccgctggtatctcgccttgggcagcatcgagccgaccgtggcgacgagtccggcgcaccggtcgccgaccaccaggcgcacgcccttcaggccgcgttcgatcatggagcggacgaactgctcccagctgtccctgtcctccttcatgccctcggccacgccgatcacctcgcggtgcccctccgcgttgactccgatggcgaccaggacactgacgttctcgaccgagccgccccatgaacgcttgtgccacacgccgtccatgaacacgtacgggtactcgtcctccaacggcctcgtgcgccacgcctcgatctccccgtacaccttcttgagcttgtcgctcagggtctgggacggcatcctgtcgccccacagcaattggctgatgtcgtccacctgccgggtgctcacgccggccaggtacatgtcgatgagggcctcctcgacactctcctcgcgtctccggtatcgttcgatgaccgcggactcgaagaccgcgcccttgagtttgggcaccttcaacgcgagcctgccggccttggcggtcaggctccggtcgtagtggccggccctgtacgccttccgctccccggtgcgctcgtacttggcggcgttggcgatctcgtcggcctcggcgtcgagcatcgcgttcaatagctcggcgaccttttcggcgaccaagcggtcgagcctggtctcgagcaggttctggtcgatctgtatgatgttcaagggtcttggttccgtctcctggcttccaatcgcggttttttgttttggcgaatgaaaatcgtacacaggacgcgggccatgccctcttacgtcagacccggaatccgaaagtgcgcaaaaaatcgggcgttatcaccacaaacgacgcacaaagtcatgagccattcgaattgcgctggcccaatcgctacgaatcatatttgccgtagcccttaagtgaatcccactgcatcgagatatcgcgcccgctatcccttccgataacgccgaccacgcgtgttgccttcagcaatcagctttccttgcgcaactaaaccgtttaggaatttgcggactgttctgttatcgagctctgttatcttggcgagttcaggtacagtcacatagtcaacctctgtcaagagtcgattcatcgccgacagcatcgctgcccgcgaatcaatttcacccgatgcggttgcatctgctttcttaccatccacacgttccccgccaatgagcctcgcaccctcttcggcatctttctcaactacagatctcacgctagcaaaaccagaaccatccacggtcttcagcgcaggaacaataggaatcgtcgcctcgaatatgtcaccatcgcggaactcaggctctcgctcagtatattgccgggacgctcttatcagattccgcagtccgctacccagctgctcggctatgccggtctgcacaaacacattagcgataatcggattctttggcattggcgtgaactcgcccagcttcattcgaccttcaaagaatgagcgcgaagcattaaccgtccggatggattcattatcaatggtgacacgcgccaccaccggactggaatactcccgatgcatgaggctgtttgccaccaattcacgggcgatcatcgtacgcgggctcactcgcttatcgccctttaacacaaagcggtcaggcagattccgctcagtaaattcacggagttgctcgtacgaatcgaacaagttggtccgcaccataagtcggtcatcgtatcggtcaatattgtctcgccgaaccacggcatcagtaatatacgctgggcaaaccgaggaaatgacttcatccttgcccaagagcagcactgcagcaagattaaagccctcttcgccggtcgtgtaatcacgatcgtatagcttggcgctgcggaacagttcttcgtcagacatagttccccaagggtgcccagctcgctgagcgaccgccagctgccgcattcgcgcaatcagctcaggacgcaaatcaaacggagtcacgtaacggaaaattcgccgttcggaatagtagttctgcttgcgaatatacatttgactaatctggatatcgctttcgatgtgtgtatccacatcagcaatgcgatcaaacactgcgcccttgaaccgcacaaccgaagaactcggagctacccaaatacgaacaataatccgttcgtcgtactcgatatgttccgtttccaccattggagccggttcgaacatcttacgattagacactacgttgacaacgttgcgctctatctcaccaacgcgcttagaatcgacgccgagcacttgaccgtcatcgtcaacgccaagataaatgctgccaccagaacgattggcgaatgagcatacagtctcaaaagtatccgtatgaggcaattcgctgcagcgcttgaactcgaccatagatgattcaccggcctgcagcacttgcataagttcatcctgcgtcatcgcattccgcccttcatagcgataattcatacattaggacatggcacttatcgtattttagcatctaattagtacattaggacattgttttatgtcctaatgtactaattaggcggctaattgtactaataattgcacactgatgtactaatccgatgatcgaatgcactaattgtccgcgcaaatgcactaatcggatgaccgaatgtatcaatgagacctataggcagccgattggctgacgatcagcccagtcattgactatcggccgctagccagtcagccgccaacagccaacagccacccaactaatagccgccagccaatcagcccgtccaatcactccttgtgttccagtgcggccttcaaatcgcggctacggtagcgttcgcgcagcatagagaatccaccgaagcccacaagccacaccaggccggcaatcgcggaattgcgcgtatcgtccgcaaggaacaacgtcaggtagatgaacacgaagaacacgatcgccaccgtattgagcaccttccacgcgggcatgacgaacccgtccgcgatgaaatcggcggaacggcgatacctgcgatgcgccagcagcgtcaggatgtagatgaacaggaacaccgcggagctggcggacgagaacagcacgaacgcccccgagatgccggggatggcgttgacgatcggcgacagcaggatcagcgccgcggacaccaggatggcgcgggccggcaccttgcggtcggacaccttgccgagcttgttcagcatcgggttcggcgacacctcggacagctggtacaggtggcggccggcggaatacaacagcgaattgagcgacgaggacgcggcggtgatcaccacgaagaacaccagggcggacgcccagttcaaaccggcatactggaacaccatgatgaacggggaggcgaaggagccgtcctcgttcggcttgaacgaggtccacggcacgatgcacatgatggccacgagcgcgcccacgtagaagatgagcacgcgcacgatgatctcgttgacggctttgggcagcacctcacgaggattcttggtctcggagacggtgacgcccacgaactcgagcagctcataggcgaagaacaccatctggaagctcatgaggaaggccatccagccgttcggggcgaacgagaagccggcgaacaggttgtcgagtccggcgtggcccgccggactcacatgatccacgccatgaatccgcgcggccgggtaatggtagccgatcacgatcatgaccacggcggtgacgatcatcgcgcaaatcagcgtgatcttgatcatcgagaaccagaattccacctcgccgaacaccttgacggcgatcaggttgacggacaccagcgacaccaggaagcacagttcaatcagccatttccaatgggtcaggtcgatgccgaacgtgtcgaagaaggtgatgaagtacgtggagacggccgtgatctcggtcatgcccagcagcacgagcgcggcccaatacgtccagccggcgaaatgcccccatccgttgcccaggtagcgggtgatgaaattgatgaaggtgtgctggctggggtcgcggtacatcatctcgccgatggcgcgcatcaggaagaacatgatgacgccgaccaggatatacacgaagacgatcgaggggccggtcagtgccagcgacttgcccgaacccaggaacaagccggtgccgatggtgccgccgatggcgatgaactgcacgtggcggttgttcaggccgcgctccatctcgttggtccggtccaggctttcgacagacttgagtttgcccgtagcctgccgtgtaccaccattcacattcgtatcggccatactgatttcatttctcttctccgccgcccgattgttacgcaccggacgcgatactcgttcaaaacaagttcagactgtatcaccgaaatatgtcacgaaaacgctcagctcaagaatacatgcgatgatgctgtaaatattccgccaaaaaagttcaattcaccaacacctaattgaacttctacctctattccacggacttgagcgagctgaccgggtctacgcgatcgagcactgggttggtgaacagctgcaccagcagcgcgaacgccagcgtcgccaccacggcaatcgcatagctgtaccagtgcacttccacttcgaaatacagcgacggcatattcaacgcagcagtcagtaatccgcctatccacctgccaagcggcagaccaaccaccacacccataccggtcaatatcatcatctcgcggttcacgtagttgtgcacctcgcggtcatagaagcccagcaccttcagtgtggccatctcgcggatgcgttcggacacgttcgtattggccaacgtaaacagcaccaccagcgccaggccgccggcgagccccacaatcagcgccaccacggcacccatcaaatcgaacttaaacgtggcggccagatgcgcacagctcacggccttgagcaccgacgattcctcgcccaaccgatccgcatattcggcctgttcggtctcggaacctttcagcttggcgagcatcgcgttccacgtcaaggtcgaggcagtgccatctcccgaagccgaagacgtcacaccgccggccgcaaacttctggtcgtacagtcgctcactgatgtacacatcagagccaataagattgcgcgtcacggccgcgacctgcaccttggcccggctgctgccgccattgcccagcgtgacggtgtcgccggcatgaatattcagcgagttggcggcggactgcgacacaatcacgccactatcgtccagcgctacagtgccgccacccgctttgccgaagatattgggcagcccaaaccatccatcatcgccagcttgttccagcgtgaccatatcgttcaagatattcagcgaatcgttgggcacggtcatcagctgcacggtttcgctttcctgcgccgcattgctcatctcgccactatccacgcgcagattcagcgtttcggtggtttggccatcttgtgccacctgcttgcgcatcgcggtggcgtcatcgtcattggccacgaccatcaggtcgtactggtagatctgctcgtattgtttgacgccaatcgtgtcgacggtgtcattaatcgcaaatccgcagataatcaacgctgtgcaaccggccacgccgcccacggtcataatcaagcgcgacttgaatcggaagatattgcgcgcggtgactttgccgaggaagttcagccggctccataccgggcgaatccgctccagcaatatgcgagcgcccgctttcggtgccttcggccgcatcagcgcggcgggcgtgtgccgtatctcctcgcgacaggcgagcgcggtggccacgcccacgccgaccacgaacagcacgatgccggccgaaccgtacagccagtcgtattcgagtcgcacaccgggcaatatatacagtccctcaatcaccaccagcaggaatgccgggatgccgaggaatccgaccagcagaccgatgccgccgccaaccaagcaggcgagcaacgcgaacagcagataccggctggacacggcgagtccgccatagccgagtccaaggtaggtgccgataagtccgcggtcttcctcgaccatgcgggtcatggtggtcaggctcatgagcacggcgaccagcaggaacacaatcgggaatgcgcggccgatggattcgatggaactgacgtctgatttgagcgagctgaatccgtcgatcgaagcgcgcgtctgcacataccaacgtgcgttggccacatcgtcgatgcgccgttgctgcttggcgaattcgctttccgcttcgcttcgcttcgcatcgagttcagactgcgcatcatccagtttcgccttgccgtccgcgagctgttgttcgccttcttccagctgccgctcgccttcttcgagctgctgcttgccgctggccagttgggcggcctgcgcttcaagttgcgccgactgggtttcgagggttgcggcattcgcttcgagttccgcggatttggtattgagctgtgcctctcctgcagccgcttcctgttccttggcggtcagttgcgcgttctgctggtccaaggtggattgtgcgggggcaatggtttcgtttaatgtgcgctgcaaatcggctttctgctgggtcagactgtctcgctgcgtttgcagttccgtttgcttggcggccagctgttgccgcagctcactgattgacggcacttcaggcagggtaatgccaaggcgcgcgagcagttgcttgatggcctgccatgtgggtgagttgaagtcgatattcgggtcaagttgcgccagtagattgtcggcctgttgaatcatggacagcatctgatcaatttgtgccacgccttggtcgatttgggtaatgccctgttcgattttcgtgcgattggcagtcagttccgtttgcgccgcatcgagctgtttgcgagccgaggcgagctgcgctttgcccgattcgagctgggtgcgcgcttcggctatctgctggcgaccttgcgcgatctgttgacgggccgatgcaatctgcgcacgtccatcggcgagctgccgttcgccatcggtaatggttgtcctgttgttctccaattcggtacggctatcttgcaatgtcgttttgttggcttccagctcggcccagttgtcatcgatctgcttctgggcttcgtccagctgctcgttggcctcgtctttggcatcatccagtttgcgctgcgcgctggagacgatctgttgacgacgggctttctggcgtgtggcctgtatctgatgttcgatacggtcggccacggttttgatggcttcatcgtaggcatcggaaaacgtgtcaaaatcggacgcaccagtgacggcaaccgatatcgcagtgtatatattgccggtcacgccgtcgctgggtacaaagaacgtatagtcctcggatgaggtggaccggaaggaggtcatgcccgaatagccgtctggattgttgaggtcgcgcgggtcgagtacgacgccggtgatggtgagtttcgtggggaactgcggggattgctcggcgtcggcgtccgtattggcgtcggacttcgcatcggatgccgaggcattggcggcgacacctaccgtatcggcattattggaatcgtcagtctccgtggccgctaccgatatgacggatgaagaggtgtcttgtggcgtcacagtaatggtgccgccaatcttgagtccgctatcgttcaggaattgctgcgtaaccgccacttcgccggccttgttcggcagtttgccctgccgtatgtacggctgatcaagcccttcggtaccgatttcctgcatggtcacggttttcttggtgccgtccaccaacgtggtcaccgtctgagaacgttcgggctgcacggtttgcacaccgtcgattcggcgcagtgccgttgcatcatcatcggtcaggccgtatgtggatagcacctgcaggtcatgcagtccctgctgatcgtaaaaacgaccggccgccagaaaagcatcgcggcatccggcgtagatgccggtcagcacggccacgccaagcagcgtgatgacggcgatcgagacgaacctcttccagctgcgcagccagcaacgcaacgtatctttggcaaataccgcagaaacgcccgctcctcgaccgccgctatcgtcgaggttccgccgtttcacagaatgtttcacaggttgtttcacgaatcgcctcgcttgtttcacggggcgtttcacagagtgtcttgcagtgagcatcgccaatcacctaccattcgatatcggcgatgggccgcggcgttgcgttgacctcctcgctggtcaccttgccggagcggaagcgaatcactttgtgagccatcggtgcaagcgcggaattatgcgtgatgatcattacggtcatgccttgtgtttggcaaatatcctgcagcaactgcagcacttccttgccggtctcgtaatcgagcgcaccggtcggctcatcgcacaacaacagcttcggctttttggcaatcgcgcgggcgatggatacacgctgttgttcgccgccggacagttgcgcggggaagttgtccatcctctcccccagtccgactttgcgcagcgtttcctctggatcgaaatggtcagggcagatttgcgaggcgagctccacgttttcgagcgcggtaaggttaggcaccagattgtagaactggaagacgaagccgatatcgttgcgccggtaggtcaccagttcctttttccgcagacccgtaatatcgcgtccgccgaccactacgcggccggttgtggcggtatccatgccgcccagaatgttcaatgccgtggttttgccggcaccggactgccccagaatcacgcttaattcgccttgttcggcggtgaagctggcctcgtcgagcgcgcgaatcacactgctgccagaaggatattccttgaccacatggtcgaattcgatatacgccatcgcacacctccaacgcgctcgtggcagccacctagccccataggccccgccagaacttcctgctatactcaagtaaaacaacactgtgtcggttctgcaaccaacagttggattgtgggttgtcggaacttggggagaaggccatggccaaagaattgacggaaagccgccgcacccgctacacgagacgtgccatgcaggacgcgcttatcgagttgctgcgcgatcagccgctcggctccatcaccgttaaagcgttgtgcgagcgggccgatgtgaatcgttccacgttttacgcgcattatgcgagcatcgaggaactgctgcacgacattgaagacgaaaccatggcctgggtcaccaccgcactcgaacagctactcgcccagccagatcctgccggcatcgagcatgttattgagcgcatctgccagtacattgccgacaatcgcaatcatctccaagtgctgatgagcccgaaagcggatatcggtttccagcagcagctgctgggattgatttacagccagcgcggtgtaggcgaacagttgcaatcttcggcgggttacccagccgaggcgcagatgcgtatgcgattcgccgtgtccggcagcattgggcttttgcaatattggctcgccaccgatctcgcggcctctcccgaatcggtgtcccacaccatcttcaccatgtgtatgcctgccacgcagtgagcacagtgaattcagtgaactcagtgaactcagtgaactcagtgaactcagtgaactcagtgaactcagtgaactcagtgaactcagtgaactcagtgaagcgtgcggtttcataagcatcgctcgctatagcttcgcctgctcaccggccgcgcccacgcccgcgcttgcaatagcgcacaaatagacgattgaccatttctgagacgatacggcggcatagaataacgaacgttgcgcatcacggcaagccccgcgtgcgccaaacccaagaaatgtgagagaagagcacaatgagtactactgatgcgcctaagaagccgcgcgaaaccgacgacgtgccggtgccggccacgctgcgcaagtcattgaaaaaccgccacatccagctgattgcgctgggcggcgccatcggaaccggcctgttctatggttccagtgaatccatcgcgctggccggaccctcgattctgctcgcctacttggttggcggcctcgcgattttcgcgattgtgcgtgcactgtctgaaatgtccgttgaggatccgaaggcgggcgcgttcagctactatgccacccgctactggtccaagcgcgccggctttatttccggctggaactactggttcaactacatcctcgtctcgatggtggagctatcagtggtgggttcgtttgtgaactactggttcccggcgattccgacatgggtgtcggcggccgtgttcttggtgatcatctgcgccgccaacctgctgggcgtctctaaattcggtgagttcgagttctggttcgccatcatcaagattgtggccgtgatcgccatgattatcggcggcctggccgtcatcatctttgtcctgcccaccgcatccggcgtgcgcgcaagcttcgcgaactggttcaccgtgggtaacggcttcttcccgaacggcctgatggggcagaattccgacggttcctggaccggcctgctgatggcactggttgtggtgatgttcagcttcggcggcaccgagctcatcggcatcaccgccggcgaaaccgaggatccgaagaccacgattccgcgcgccaccaatgatattatttggcgaatcctcgtgttctacatcggcgctctgggtgtgatcatggccgtagtgccgtggaacaccatcgatggcaagtccagcccgttcgtgcagatcttcgattccgtgggcattcacgcggctgccggtattttgaacttcgtgtgcctgaccgctgtgatgagcgtctacaactccggcctgtacgccaactcccgcatgttgtactcgctggccaagcagggcaatgcgcccgcttacttgggcaagctcaactcgcgcggcgtgccagtggccggcgtgctgacgtccgccgcgatcaccgccatcgccgtggtcgtggtgttcgtgtggcctgagttcgcgttcaactacctgatgtcgattgccaccattgccggcatcatcaactggacgatgatcatgctcaccgaaatgaagttccgtaaggtggtcgccgcgggcagcgctcccgaggattccgagctggccggtctgagcggccaggaggcactggacgcgattcacttcaaactgccgtttgccaaggtgaccccgtgggtggtgctggcgttcctggcgctggtcgtggtgctgatgtgcttctccaccagctaccgcatcgccgtcatcgccggcgtgatctggctggccatcctcttcgccgcctaccagctcactcaggcgaagaagtaaggctccatttgcgaatagctctcactgatgagcactcagtgagagctattcgcaaatgggattcattcatgaaacagctcatcgatgccgacgagctgaacgtcggattgagacgccgcagcatcgtcgaccagtgattgatcgaaaccgccgagcgaaaacagcaggtatgttcgctggccgataccggttcgcgcagcacggtctcgcagtagattcagcacggaacggtccaccggcgcattgcggaatttgcactcgcccacaatggcagcatcagacgcattgtcaacggccatcacgtctatctcatcctgacgatcccaccaacggccaaccgcacgcgcacggaagggcaaccgtccagcagcactctcacgccacatccattcacggcacagaccctcgaacggtttgccggcaaaatcatgtaataccggcttgatatgacgctcgtatacgccttccacatcgccccgctccaattccgaacgatacggaaagacaaacgaataccagaatcggaagaaattgtcgctcagctgatacagcccacgcgaacctttcgcccgctccttaggcttcgccgtgactgggaactcacgttccacaatccccagttccataagattggcgagatacgacgatactgttgcgtttgccatcatcgtgtgtgtcgcgatctcattcagcgaagttgcgccgagcgcgatcgcccgtatcacgctgttatatttcgcagtttcccgcagttcttcatgcaacaaaaattcaacctcgctgtatagcggagcaatgcgtctcagaatatgccgcttgacatttgcgtctatggtctcatctgggtcaaattcctctaggtaacgcgggataccgcccagtattgcgtaggtcagcgccttatcctcgctactatagttggggaagaattgcgctgcatcccaatatggcatcggcagcatcttcaggatgccggtcgcacgaccatatagcggcgatttttctcccaacagctccttttcgatgaagctcatggcactgccgcaaatcacaatcatcagatttgcatgacgcaacgtgtggtcccaaagattctgtagcactgacggcaatgacggatcagatttgaccagataaggaaactcatcgaatatcacaagcctgcggccgccatcgctcggctctggcagccgggttaactcggttaacgccctttcccaagaaggatattgactcagataatccttgcccggggcacccgcctcgaacatgagacgggagaacgatgccagctgttcatctttagtggcattctgcgccgcgaagaataaggtttccttgtcttttgcgagttgaataagcgtctctgtttttcccacgcgcctgcggccgtagacgaacacaagctgtgccctacgctcagtgaaacattcctgcagttgcttgaggtcatcgtctcgtccgatgaatgccatgctgcccgcctcctttatgccatacgccggcgtatttctatcgcatcacgatttattgtatcacgattagtataatcgtgattatacaagctgtgacgaggtgcgggtacgggccaatcggcatcgacgagaccagccgcaggggctacaattacatcaccgtggtcgccgatctcgtggagcacgatgtcatcaacgtgacgccgggcaaggacccggccacggtcgaacggttctcgcgtgatttcatggaccacaacggggtcccggaatatgtgcgtctggtcgcctgcgacatgagcctgggcttccggaagggcatccgtgagcatctgccccatgcgcggcggatcgtcgacaggttccacgtggccaggcacgccaacgaggccgtcgacaaggccgggaagacggaaggccgctccaacccgctgctcaaacggaccaagtacctgtggctgcgcaacgaggaaagcctgaccgaactgcaggtggagaccaagcgcaacctgacgaggcaacggttgaagaccggccgcgcctgccggatgcgcgaggtcctgcaggacatccacacggacagccgcaccccgtccgaggcatgggtgcgcctgcatcgcctgtgctcgtggatgatgcactcgaggctcgagcccatgaaggacctcgcccgcatgatccgacgccacttcgccgagatcgtcgcctacttcgagcacccgtacaccaacgccgtgctcgagggcgccgacagcgtcatccagaacgtcaaacgacgggcgagaggcttccgcgacatggactacttcgccaccatgatctacctgacctgcggcagactcgacctcaaagccgtcaccaccacttgaccatcacccaccacaaacagcgaatagcctcaatttgttatctttaccgcgcttgcgtagacagagaacgctcagacctcgaagatcgccgcatattcgcgagagaacccgcctagtcaatgagatatggattgaaaacacgctcggtgacggggatatggagcatcagcacggtgccgtaaccaagaatcaccagcaggaacagtccaccgggcatgtagaaccagctggccaccagcagcgccacgaacacggcatccacgatgaccagggccacggtcatcgcgatgtgggagatgccgaagatgaaggcgttcttcaaggtgccggccacggtgttctcgaagcgtgcctgaagcgcgaacacccattcgaagccgataagccagaggatggtcagcgcgaatttgatgatgagcagcggcgtgatctgcaggacgatccatgaccagaccagtgcaatcagcaccaccaagaacggcagccacagcagtgtggctttgatgaagttggctttgaatgacttgaagtagttggcggttacgcctttgccctcgccctcgatggagcggcggcaagcatcatggccggcggtcagggccgcaccgatggtgatgagcggaatcgaagtgaccagcatcagaatgttgatccatacgccgtcaacaagattgctccacgcgcgcatgaatttcgagtccggtgccagccagttcatcaactactccttgtgtcgcctgtggctcccctctctgaggggagctgtca
